United States Patent Application Publication US 2009/0018031 A1 - sequence listing, part 21

SEQ ID NO: 11021 - DNA, 6000 bp, Homo sapiens
ttgggacttctggggaagtggcggcttttagcccctgcgggagccgagccgggccgggggaggagggatggtgctgtttctgggatgagtgcgagttgggggccgagggaacacggatgtggggtgcagaacgctgtagtggggacctccaggccggcttttgcttgcaccggagggaagaagaaactacactgcggggacgagcgtaagagtgggcacgagcgacaaaaggtcgtgaagcgggtgggaaaccgagcactggaatcatggagccgaaggactctgggcgagcagaactggaaccttcggattatttacactcttattcaggtcttggaggtccttacctatgaggtgggcagctgggagcccggggctgagatctgtttctggctcctcctctggcagcttctgaaaccctggaaggggcaaagagtccacgattgggggcagggcagccacccatgcaggctacccttgagagaacagggcgcagggatggggagcctggattcctagaggaagaggtatctggggacgcagcagggagctgggagcccctgagggtctgaagcggggaaggagagacagtctgctcttacccagtccttgctgggcctgtgccccggggtcggccgtctccgttacctggttgggtggggtcacagtgcccagagttcagattcagctcatgtcacccctacccctctgaaagtggacccaagctgcaggcctggggtttctcctaccagcaccatccccaacacacacctccttagaagggagaacaagcaaggcataggtacttgggcggagaaacagatgtacctcgggaagaggagaggagacacaaggggcttatgtcgggacacaagcacaacatcacaggaacatggaaagagagtcagcaaagagacaagacatccccaccagggacagccgagccagctgagccagagggggcaaaagaccacaggcacaaccagagggagccaagcatccgcaagatacaactctccaccagggcctgttgcagccactcaccagtcctccctgatcctggggcactaaggccagcacagccaggacagtgataggcaccgccagcaacaaggtcaccagagaagtggctcctgccacagctagcaggagggaacccctcccctggagcctcccacccctgccctccagccccagtgcccccattgagactgaaccagagccagagcagggggctttcatacctcagggacgggcccaccccctccctgtagacctgcacacctggctgggactttccgcacacccctgctcccctcacccagcttcctgtttacccagagctggggtggggcagctggatgcctgggttctctgaactggggaagaagttgaggttagggagacaggctctcagggtggaaccaaaggggtctttagacatcttctggctcagcagagagagaaactgaggcccagggagggaaggtagcttgcaggaagccagtcagcagagctgaaatgagaacacagatctccaggtttccaatgtggtttgcattcttctataccctcaaggtaggtgctggaggaagagctgatcccgtctctgaggtcaagggccggactaggacaaggactggaatcttgagggatggatgtctgggttccctgagaagaactgattcccatactgggctgacctcctcccgttcccttgctcatctccagccccctgtgctgagtgagaaagggagaggtaagccttagcctcaccactgactactgactcactaaggagggatggaaatggagctttacctcccttgctacaaaaagtaaagacagatggacgaggcatactcccaccctcagagagcttccaagtctacaatgagccctatccattagtaggtgcttactaaatgtttatacataaatgaataaaaggacaaataaatgcaggaataaccaaaacaaagcagcaaggaccacatgaatggtagatgtaggcagcatgagtggttaagagtcaagggagtagccggggtagtggcttacacctgtaatcccaacactttgggaggctgaggcaggtggatcacttgaggtcaggagttcgagaccagcctggccaacatggtgaaaccctgtctctactaaagatacaaaaagttagccgggcgtggtggcacgcgcctgtaattccagctacacaggaggctgaggcaggagaatcacttaaacctgggaggcagaggttgcagtgagccaagattgcaccattgcactccagcctgggcaacaggctgagactctctctctcaaaaaaaaaaaaaaaaaaaaaaaaagagtcaagggaagaaagaccaggtccaaggaagctggaagtggctccaatcatctccccttcttggtaacatctctatgtgtttccgtaatactaataataatatagctgacccacaaaatgcacttaacatgtttatgccactgatttacacactttaataatttttttttttgagacagggtctcgctatgtcacccagactggaatgcaatggcaggatcatggctcactgcagccttgacctcccaggatctatggattcacctacctcagcctcctgaatagctgggactataggcacatgccaccatgcccagctaatttttgcattttttgtagagatggatttttgccacattgcccaggctgggctcaaactcctggactcacgtgatctgcccgtgttggcctcctaaagtgctgggattacaagcatgagccatcatgcccagccaataattataatcctgacaaaaaccctaagaggaaactgaggtacagagaggttaagaaacttatggagctcacagagtcagtggcagaaccagaatttgaacccaggcatctggctccagagccttgataacaagacagtttaaaaactgaatactggggctgggcgcagtggctcttgcctataataccagcactttgggaggccaaggaaggtggatcatctgaggtaaggagctcgagagcagcctgatcaacatggtgaaaccccatctctactaaaaatataaaaattagcggggcgtggtggtaggcacctttaattccagctacttgggaggctgaggcaggagaatcacttgaacccaggaggcggaagttgcagtgagccgaaatcatgccattgcactccagcctgggtgacaagaacaagactctgtcttaaaaacaaaaacaaacaaacaaaacagtattaggccaggcgagatggctcacacctataatcccagcactttaggagaccaaggcaggtggatcacttgaggtcaagagtttgagaccagcctggccaacatggtgaaaccccttctccattaaaaatacaaaaattagctggatatggtggcacaaacctgtagtcccagctacttgggaggctgagacaggagaatcgcttgtacccagaaggcagaggttgcagtgagccaagatcacaccactggactccagcctgggcaacagagcaagactccgtctcaaaaaaaaaaaagagtactgacttgagatttgtatgtaaaatttgccttcctcaggccagaaaagaaatggggaaataaatactgaactccagtcaatgttaagcttctgaagggtttagatgtaaaatgtactgatatttgtaattttaaaagatatttaaaagtgagatggattgataaatatgtgataaagcaaataaaaaatgttaatagagccaggtgcagtggcccactcctgtaattccagcactttggaaggctaaggtggaaagattgcttgagaccaggagttcaaaatcagcctgggcaacatagtaagaccccatttctacaaagcctcatgtggtagctggtgtctgtagtcctagctactcagaaggctaaggtgggaggacctctgagcccaggaattcaaggctgcagtgagctatgatttcaccactgcacttcaggctgagtgacagagtgagaccccatctcaaaaacaaaacaaaacaaaaaatgttaatagtagcatctaggtggtaagaatatgttcactgtacaattattctcatttcaccctatgtttgcactttttaataataaaatgtaaaaaaaacaaaacaaacaaacaaaaaaccctgaatattattcagcatggggaacatggaggatggggagaagggtgggggaggaagtagaaggttcttgaatttggaaggggaaacgcaaattaatatggacccacccaggcaccacatctcctcctcaccccttgccttacaggcgctccccagtcttcaccctcctcaaggagtgggtgtgcaatcctccagcacccatctccttctccatcacagtgccactaagaagccttcacccaggtctctccagagagcctcaggccgctgcctttacttagttctgtgttcaatgccagaatgctgcctcctacaggaagtccacctgtattgcccacacctcctttcctgtcaccaacttgtcaccaactttctgtccttgatctatccacagggctcatgtagatctagtatggctgcctttaactctcatgtttgttaatcagacagccaagcagcctgctgcatagagctgcagaacaccaagtgggtcaccagaacaccaaatatgccagagctcccagtctgaactggagcagggtacatgtgtccacagacatatgccaagatcaagaggtctcaacagatgcagtgtaagaggtaatagagaagagttaatcaaggaagacacctgaaggtggtgggtgtttgctgactagtggcaggatcagtgaaatgactggagctgaggcagattatggccctagctacaggcccagaagtttgaaaagaaagatgttgtaaccctaaccctggagccgaacttcctctcctaacaatgctggggaggaacccaggctgggggagaagttaaagccagaggaggggcaggaatgtctgaggtggcaacacttctcttcagccagacagcactggccagtttggagtctgtccatcctgcaggccacaagctctgggtaagctgggaatgggcagggaccttggtggaaggatggtcacaccccagagtggggtgaagctaagatgaggggagggagagtatgggtttgagtttccctgggccgtcgaggaatcctctgagtctctgctccccaaagaaattaaagacaattcatttctgtgcccacggcccttatggcctccacctgcacttctgctccccaccccccagaattcctcttaaacccagaagggtcccagtttccagaccctagtcagtatatctggctctggggtgaagagaacggccccctcttcaccctcaaacaggaaccagtggttggaggggaggaagtgcctgaggggaagttatggggccccagatactcctccatgccccacttcagccctagcagcatctgcctgtgggaagcagctctccacaccagccaagggggcccccacactcccgcgctgctctgcggctcagggagcagcccacctgctgggtgtgctgatatcaccctcccttcttccccccagtgcccacacccacccaggcccaggctccttcccctccatcatccccttaccagcacctagaaccatccagggctgaaaagtcccctccaaaccacgtggtcagcccagggcagaggaaagggctgggctctggagttgggcagagctggccttaaaccccagctccacctttctgggatgggtgacctagtaaagtccaggcttgaatctcgggtctttacttgggcaacgggcaccatgataccctatgttctggggattagcagtgaggaatggaaagtgcccagctcagggttggcacataagggaggctccccagcctgggaacgattataacagagggcccctcacttcacagatgaggaacttg

SEQ ID NO: 11022 - DNA, 6000 bp, Homo sapiens
ggagagccctcaagccaggccgcaccttcttcttggcaatacatcaggggtgtggcctaaatttaggatatgagttgttgtgtgccacctggagacactggaagggaggatgaagacctgaaaaacctgtttctccattttccccagcccagcctcccagggaacctccctgaaggattcctgtgtaagggagggagattgagagtattatttcctgggaggtgacctgacccttaggtcttcttataataaatgtacattttatcagactcagacatttattactcaaaatggaaagaggtgagtatgggggatggggtacatatgggagcctgggtttggggagtcagctctgtacagtgaggtcatcaggtccttgtgggagccttcactggggacaacacagaagccccatttcaggcccagatcccaatccctcctcaagtaggggacagcagagtataggaagcaaagtggggagcccttctaggagccaatggaggtcctggaaggaagtgggaagggacccagaaaaaggagagtgaagggtgtgaggtgggaaggatggatgaggagaccactcggaacagtgtttaattaaagaaatgggagctagggagagacgattctgtaaagccaggggatacagagacacagggagagaggctcaggccaaggcaggtgggaggaggggcagccaatggaatgagtctcagtgcagcagccagaggccaaggccagccaaggaggtaaggaagacaaggcccagggctggagtgggccggggtcctgcgctgttgcagttgtccttgttgcagcaggtggtgttatatgtcagacccagcttgcggttggtttggttgaaggcctcctgacagggctcttctggtgtgccacagcgcagattggagaaaacccacatcttacctaggggtgggaatgggcagggaatcggccaggatgggcacctggcatgcctgtgtccacctccccaccccatccacccacctaggcttccttccttcccaactctgtccctggccctccccttctcttttcttagtctgatcttccttctgcacatccttacccaccactcccccagtcctggttctatcacttgctggccatggacctgttactgtctctgttttttgtttttttgttttttccaagacagagtctcactctcgcccaggctggagtgcagtggtgccatctcagctcactgcaacctccgcctcccaggttcaagcgattctcctgcctcagcctcccgagtagctgggattacaggcgcccactaccatgcctggctaatttttgtatatttagtagaaatggggtttcaccatgttggccaggctggtcttgaactcctgacctcaagtgatccaaccaccttggcctcccaaagtgctgggattacaggcatgagccaccatgcccggctgtgttactgtctctttttgaggccgttttctcagtataataatagcacccacatcacagggttgtcatgaacattaattgaaaaaaaggcatgcaaagacataggatgttgcctggcacacaaccatctttggccaaatattatcattgctataatcctctgcttctccatctcagtcttagacccatttgggcctcagtcctggtcatagaggctcccacctccctgttcaccccactaaggaaggggatgttaccaaggtatgcatgtgttgtcaggcattgctgtcctggctccaggcggcaggactgccggtccacacagcccagcacagggaccttgtagcaggagtgacagcgaatgtcagctgggaagacacaagtcaggctgaggtgatggggtctctgacttacctggggataagctgagctgggggcaggggtggagggtggagaagagcccatcccgtaggtgctccaacctgtttggctgtttggtctagcaagcacagagcaggtgagtgatgcagggaaaatggaaagtgggcggcaggtaagggtagagctgttgctttgtgaaaggcccacgccctacatatcttccatcactccaccccgtttggaggtgagtcaagagggacagaactatgaagaaaaacatggggctggagatagatggaatgtgaggaagataccatggggaaagaatgtggatggtgaaggaggagatggaaacttgaaagaaggagaaataataaaaatgaaaatcatgagggttacaacactgtcagaaatgccttggaacttgaggctggcgagaaagccatctgtggccagctttagcaatttacaatttactcttcacctcctggagctggcaagagtgtggcaagaggaaccagacctgaatagaatcctctcaccccagtagctcttcagcagaaaggaatgatacctgagagacagatcaccagattccatcttagcaccttatcaaaatggagagggtggatacagaaggtggcaccccaagtttcctgcttcagttaattcaaggtttgggcaggcaagatttggtgacgcagggtccgagggtggaagagcctggtaagtgtacctcagtgaaatccacttcaccctggaggtaagtggcccagttgtcccctcttcagaaggctcaagaaaacgctctgtttccatggaggctcttagatgtcactgcaaccatctagaaagtttgtatcccctgtatgggaggaggtatgcaacccaggaggggagtagggggtatctaggaaaggccatggctgagagactgaacatgtgagtccctgatggagtagatggggagggtaggttacaaaaggagcctggggctggatgcctaggtcttcgagaggacaccttactgagcacagcagatagaggagaaggcaggtaagctagactctggagagttgcatattgaagtggggctggttggggaactggataccagagtttccaaggaggagacaccttggagtggggaacaggggacccagagccctggcaggtgagagaaatgggtctttcttggaggtggggaggatggatggagacctggctttttgagaaatagagcaaggaggctgtcatagggaagcctggtcttggtggcacaggagagctgagccagttggggctgggggtgttgggatcccgagtggtgggtagggccgggaagtgggtagagcagggtgtaaaggtcctgaccaggcaaaccaggtctttggggcccccaggtgctcacctgagacccagcagagcagaacagacagggtgagcagcataagggctttcatggcgagggtcctgagaatggtggcaaccacagcagctgatagagtagattttcaaggatccagctctaggagttgagtggcctttttggaatttataaacccaaaggctcctcccttccctgcctctggtagcccctcccttctcacttactacgcagctgaccagagaaaagacaaggggtgggaaggcactgagcaggactgagtggggagtagggatgggagagagggatgggggaaggcaggtgccactagtggccaatgccattgtggttcttggtttcaggccaagatgcccttcctggtccccagctaagagtcctgctgctcagtcctctgaatgagcatcatcaaaggcctctgtgatttacagtgtccatggtggcagcttctgctggttcctggaaaatggacaaaaggatgtggcccaaattaattgctgaatttgggtccctgggtccctgctgggcattgataggggcatgctggtggaaattgggggaggaatgggtcaaattaatctccattcagcccccactcggtctttccaatgcctgctcagcaataagtgactcactgatggcttctgtgatgccacagcagcagaggcaggggctggggctactcatccaggagagccaccacaggtctgctaagtagggctgcctcaggctcccatgaaggttctcaggatgtcacccgtgctccacttgcgcttggtgtggccttgttgctccagtccagcagcagcaattgtcctaggtgtggctgtgtgcacctgctccaaagcacctccccagtcaaaacctgccaacttgggcagggtaccaagccaggaggaacagcatgggcacagagaggtgaggtagaagctaaaataagaatagaaatagtaggccgggtgtggtggctcacacctgtaatctcagcactttgggaggccgaggtgggtggatcacaaggtcaagagatcgagaccatcctggccaacatggtgaaaccccatctctactgaaaatacaaaaattagtcaggtgtggtggcatgcacctgtagttccagctactcaggaggctgagacaggagactcacttgaatccaggagccggaggctgcagtgagtcgagattgcactccagcctggccacagagcaagactctgactcaaaaaaaaaaaaaaaaaaaagaatagaaatagtaataataatggcaagcacttacatagtgatcctatgtattctaagcagtttacatgtattactttatttcgttatcacaatcccctacaaaacaggagttttttttgttgttgtttttgagacagggtctggctggctctgtcgcccaggctggagtgcaatggcctgatcacagttcactgcaacctcgacctcctgagctcaagcgatcctccctcctcagcctcctaagtagctgggattacaggcgcacctgaaaagttaagcaggccaaagcatttgtgtaaatggcccgagcacacattttaagtgagaaccatttgaagactccgagtttgcctgcgaggattcccaaagggatctgggcagctggtggccccgccccctctcttatcggagccccccagcccctccgttctccccacgcctaacttccctccggtccccccccaaccggccccacgccgctgattcgctcgcagcttctcctcaccacatcctaaccatggctgtgtttctgcagctgctaccgctgctgctctcgagggcccaagggaaccctgggggtaagcgatccctgggagagttgtgatagacgcagaggggctgaagcaagataagggccgcctagtagggtgggttgtgtgtgggaagatccaggatggctggagtgcagaacagagaagagaaagaggagacgggatggagggtcgtcttgccctgtggacgtgccctaaccacagcctccggcctctcctagcttctctggacggccgccctggggaccgggtgaatctctcctgcggaggagtctctcatcccatccgctgggtctgggcacccagcttcccggcctgcaagggcctgtccaaaggacgccgaccgatcctgtgggcctcttcgagcgggacccccaccgtgcctcccctccagcctttcgtcggccgcctacgctccctggactctggtatccggcggctggagctcctcttgagcgcgggggactcgggcacttttttctgcaagggccgccacgaggacgagagccgtacagtgcttcacgtgctgggggacaggacctattgcaaggcccccgggcctacccatggtaggtgcaggcctgtgcgcacaagggtacttaactccgacacatacccggaggagggaagagggccttggctgggggttcttgagcgggactgctggctgtccctcgtcaaacccctgacctcagcatccctccccgccacgcctttcccccagggtccgtgtatccccagctcctgatcccgctgctgggcgctgggttggtgctcggactgggagctttgggcctggtctggtggctgcacaggtgagcaggagggacccggcctcgttaaatggggagtgaccagaggtggaaggggcaggaccagaaccttcgcaaaagaaagagctagacctagagctctggtcctggcttggcgaagaatgggagaggtcaaaggtgggagcgaggccgc

SEQ ID NO: 11023 - DNA, 6000 bp, Homo sapiens
cgaaggagggaacgtaagaaatgaccaggtcagaaccaagggtggtccagaagctaacccttagcttagggacagtttcacagagaacacgtccatgatgcaagactctgctgagggcctggagcagtgaagactggggcaaggtcaccctctgggaagtgaagtcaccagagaccttgcggagcagctttgagagttctctgagtaggaaggtaacagaatgtgaaggacactggagagaaggccaataggaagcaaacaaaaacaggccaaggaaacccagtacagggggctgcagggcccagggagtgggtccctcatctctcctccccacgcttggccaggtccccacctcccgggagtgcgtgggctttgaggctgtgcaggaagtgccggtggggctggtgcagccggccagcgcaaccctgtacgactactacaaccccggtgagcactgcaggacaccctgaaattcaggagaactttggcataggtgccctcctatgggacaatggacaccggggtagtgagggggcagagagccctggggctccctgggactgaggaggcagaatggaggggcctgtgccctaactcctctctgttctccagagcgcagatgttctgtgttttacggggcaccaagtaagagcagactcttggccaccttgtgttctgctgaagtctgccagtgtgctgagggtgagactgagggcctggggcggggcagtggaggcgggatggccggggccccccccacactgtctgatgggttccccaacttcagggaagtgccctcgccagcgtcgcgccctggagcggggtctgcaggacgaggatggctacaggatgaagtttgcctgctactacccccgtgtggagtacggtcagtcttcccaccgaggccctggcctgaccctccctcggggaccggccgttttggtctctctgggtgtagcctgctcctcttacaggtcatgcacgcagcctgtttgctctgacaccaacttcctaccctctcagcctcaaagtaactcacctttcccccttctcctcaccccctcttaggcttccaggttaaggttctccgagaagacagcagagctgctttccgcctctttgagaccaagatcacccaagtcctgcacttcagtatgaagcaaaccggagaggcgggcagggctggggggagacagggaggctgaggtgtggccgaggacctgaccatctggaagtgtgaaaatccccttgggctgtcagaagccttgggcttggccataaatagggaggcagtggcacctctccatgggggtggcgaaggtggaatgagaggatctacacagagtccccagcctgggctcaccctgcaccttctcttcccctctgaccacttttgcgcacgtcatccccgcagccaaggatgtcaaggccgctgctaatcagatgcgcaacttcctggttcgagcctcctgccgccttcgcttggaacctgggaaagaatatttgatcatgggtctggatggggccacctatgacctcgagggacagtgagtcatctggtcccctcagtctcttgtcctccccatgcctcgccacctaggccttgcccctcagaagccagatgcctgtgctctccgtttccacctgccatcctcccgagccctgctgactgcccctttgccccctgcagcccccagtacctgctggactcgaatagctggatcgaggagatgccctctgaacgcctgtgccggagcacccgccagcgggcagcctgtgcccagctcaacgacttcctccaggagtatggcactcaggggtgccaggtgtgagggctgccctcccacctccgctgggaggaacctgaacctgggaaccatgaagctggaagcactgctgtgtccgctttcatgaacacagcctgggaccagggcatattaaaggcttttggcagcaaagtgtcagtgttggcagtgaagtgtcagtgtgtgttgctagggctgagagcagtgcccctgcccgatgcagttctgggcaggccaggttgacataaccttagactctctgagccctgatgacccttgggctgttcagctctgctagaacctcccagatgacccgctaggagtctagtgcttcacaggaccaccccgagcagaactgggacccaagagcctgcaccccaaggaccagagtccatgccaagaccacccttcagcttccaaggccctccactgcccggctgtcgccagtcaccacggcctcagacagggcttgtgctcagctgacacctgtgacacagctcttctgcctcatgagctgttgtccagctacacctccccgactctgtcctcgtgctgctggcggttctgaggtctgcagattttagctgagttccgggctgttgaaagcctgctgacgcttggttctgttatcagtggaatgaggtgactttcccggagttgtgcaatcctcaggtccggcagtgtcttcttccagttactggtttcaaacaagccaaaagtctgactttggtgtgtttgtgaatcctctgaggaagccgctgttctcctggggtctccccttcccaccggacctgcctaactttcccccatttagtggcacacctggggtcttcagagatgactccgcgtctgtccaaagaagtttggtgagatcagtttccgtagaggtcatgacagttcagcagcctgccatccagtcattcgacagaaattcgggaatctttcacttcatgccatgccctgtgccaggtgccagagatacagctgctcactccagggctcatcgctggggagacagataagaggacgggcagtccccaccctctgtgaaagatgtgatgtcagggagcagtgtggtcctgtggggcatctaaccaagtcaggggcattgccaggcagggacagggaaggcttcctggagcaggtggcctccaagtggggctctgaagactgagaaggagccaggaaaagagcaggggtagatgagggcatctggggcagaaggagaatatacaaaggcccagaggccgggggcaggacagggtacctttggggacattgcatgtaattgaccacattcggagtttggatttggaagtggtggaagagatggagatggtgagacaagtagtaagcacgtcagccttccaggtgcgctcctttccgatgagcactgtcttatcccacgtaactttgagaagtttgggcctttcccactgtggcagaggtttcctgaggctcttgcatacatggccctatggttgctcatcagatctttctcccagtagctgctcagcatggtggtggcataagcccattttccggagccagggattcagttgcagcaagacctggcccggtctgggaggtcaaccatgaagaaggcagtagctgtcattgcccaaccccagaaatcccaatcctgttttctccctctcagtcctgatcatggattcagcagcagcgaactcgccaatgtagtgggtggcacagccagggtcttgactctggctctgcagtagcacagtctggaaaagctctgaggggagagagacccccactggtccgagggtctggcacagagccagaaatgggggggaaggtatggggctgggtcgcctctgacctctcaggtaccatccaggaggccctggcctctcactgaacccggccactcctctttggcatggcctcttcccaaatccccaaactgcctccttactcacaaaagtggtctctgagtgtcagtccagtgggacccccaccccttatggcttcagttccccaaatagggctggacccttgatcctgatccagctgtggctatccagccccttcctggggactttggactttgagggggggcatgcccagttgtgctgggaatccatactttccctggctggagtagaacctgtggactgtagtcctgagggcagtcatgttctgcctgtgcctggaaacacaagaaacttgactgcagagagaagaaagaggagagaggaacagagcgaggaaactgcccgtctccggggctttttctgttccctatccttggctttctaagaccagtggggtcccctcctctgcttctttttcctgagttctgtgaaattccccaatccttactttttgtctcaaaccagctcaaggtgggctgttttcctttcaaccaaagaaaggtgctcctggtggctaaaggtacatattcgacagctagatttccaggctggaatcctgccctccacaacatgcgaacaatacccgtgttgcatatagagcatggctgtgaagagttgagtgagtgcccacaaagcacttagagcagtgtctggtacatgctattactccgcagcgggaaaccacttcctcctttgtcttctgggcacttttgtgagtgaaaggaggcactaataacaatcacactgggatacctgtatatactggaatgccccaggcaaaccaggcttaaactgtattactctatctgtagcttaaactaacaaacaaacccacacaaatcacattttgttcttcaggcgattcaggaaggcctattaggcagggactgccattttctctctgagacaaacatcatgccagtaaactggcccacggtggggtggcagagggagagggcccaggtcggggcggacacccttgcctgcacgggtgatgtggaaccagaaagctgactctggatgcaggaaaaaggtcagggttgcatttcccttccttgcttctcgatgggtgattaattttttttgaaatacggacgtcccaaggccaatgagactggtgtcattccagaaaagggccactctgtgggtgggtcggtgggaaggcacctgagggtggggtcaagggaggccccaaaacagtctacacagcaggagggatggctggggctcttgagctataagtggcacctcagggccctgacgggcgtcttgccatgctgctcctgggcctgctgctgctgctgcccctgctggctggcgcccgcctgctgtggaactggtggaagctccggagcctccacctcctgcctcttgccccgggcttcttgcacctgctgcagcccgacctccccatctatctgcttggcctgactcagaaattcgggcccatctacaggctccaccttgggctgcaaggtgagaggctgatctcgctctggccctcaccataggagggggcggaggtgacggagagggtcctctctccgctgacgctgctttggctgtctcccagatgtggtggtgctgaactccaagaggaccattgaggaagccatggtcaaaaagtgggcagactttgctggcagacctgagccacttacctgtaagggccgggggcattttttctttcttaaacaaattttttttttgttagagatggggtcttgctatgttgcccaggctggtcttgaattcctggtctcaagtgatcctcccacctcggcctcaagtgggagccaccttcgggggcttccccaatcctccaggtcactggaagctcttggggggcatatcttcaggagaagaagcaggtgttgaggaggcagaagaaggtcaggccctcggcttccttggtcagttcccaccctccagcccccagctcctcctgcagacaagctggtgtctaagaactacccggacctgtcgttggtctctgctctggaaagcccacaagaagctcacccgctcagccctgctgctgggcatccgtgactccatggagccagtggtggagcagctgacccaggagttctgtgaggtaaggctgggctcctgaggccacctcgggtcagcctcgcctctcacagtagcccccgccctgcccgctgcacagcggcctgctgaactcacactgtttctccacagcgcatgagagcccagcccggcacccctgtggccattgaggaggaattctctctcctcacctgcagcatcaactgttacctcaccttcgg

SEQ ID NO: 11024 - DNA, 6000 bp, Homo sapiens
catctaccacaaccctatgaatgacagtgatagctcatggttatataacatttttcatgttccaagtcactgtttcttccttttttttttttttgagacagagttttgttcttgtcgcccaggctagagtgtaatagcacaatctcggctcactgcaacctccgcctcctgggttcaagccattctcctgcctcacctcccaagtggctgggactacaggtgcccaccaccatgcctggctaatttttagtatttctggtagagacggggtttcactgtgttagccaggatggtctcgatctcctgaccttgtgatccgcctgcttcggcctcccaaagtgttgggattacaggcgtgagccactgcgcctggccaatatatatctctctctatatatagatagatatatattttttgagttggagtcttcgctcggtcgcccaggctggagtgcagtggcgtgatctcggctcactgcaagctctgcctcccaggttcacgccattctcctgcctcagcctcctgagtcgctgggactacaggcacccgccaccacgcccggctaatttttttgtatttttagtagagacggggtttcactgtgttagccaggatggtttcgatctcctgacctcgtgatccacccgcctcggcctcccaaagtgctaggattataggcgtgagcccacgcacccggccttgcctggccaatattttttaattaaaagattttaactccatctggctgggtgcggtggctcacgcctataatcccagcactttgggaagccgaggcgggtggatcacctgaggtcaggagttcgagaacagctggctaacattgagaaaccccatctctactaaaaatacaaaaattagtgggcctggtggcgcacgcctgtagttccagctactcaggaggctgaggcaggagaacttgaaaccaggaggcggaggttgcaatgagccgacagggtgccactgcactccagcctgggtgacagagcaaggctctgtctcaaaaaaaaaagaaaaaaaggattttaagacctttctattttgaaataatttcatacttaagaaaagtttgcgcctgtaatcctagcactttgggaggccgaggcatgagcccaggggtttgagaccagcctgggcaacatggcaaaaccctgtctttacctaaaatacaaaaattagctgggcgtggtggtgtgcccttgtagtcccagctacttgggaggctgaggtacgagaattgcttgagcctaggaggccaaggctgcagtgagccgagatctcaccattgcactcctgcctgggtgacagagtaagaccctgtctcaaaaaaaaaaaaaaaagttaccaaaatagcaaaaagcagtcatttatactcctcacctagatttcgcaaatgttaacattttgtcatgtttacattaatatcttttttctctaaatatatatacatttatttatatacgttaatgttatatttaaatataaacatagattcaaattttcctgaatatgcgctcacagattattcaaatttttccaactgtccttacagaaaaaaatatacagtggaagatccaaatcaggatcttgagttgcatgatcttgttacgtctctttagtatctttttgtttgtttgtttgtttgagttggagtttcactcttgttgcccaggctggagtgcaatggcaaatctcggcccactgcaacctccgcctgccaggttcaagtgattctcctgtcttagcctcctgagtagctgggattataggcgcccaccaccatgcccaactaattttgtatttttagtagagacggggtttctccatgttggccaggctggtcttgaactcctgacctcaggtgatccaccctccttggtctcccaaagtgctgggattacaggcatgagccaccacacctggcctcttttttttttttttttgagacaaagtctcactctgtcgccaggctggagtgcagtggcgccatcccggctcactgcaacctttgcgtcccagaatcaagcaattctcctgcctctgcctcctgagtagctgggattacaggcgcccaccacgcccagctaattttgtatttttagtagagacagggtttctccgtgttggccaggctggtctcgaattcctgacctcagatgatccaccctcctcggcctcccaaagtgctgggattacaggcttgagccaccacgcccagctaattttgtatttttagtagagatggggtttcaccacgttggccaggctggtcttgaactcccgacctcaggtgatccgccggccttggcctcccaaagtgctgggattacaggtgtgagccacctcgcccggccagtaatgcatttttgatggggtttctacagaagtgaggtcgtatcttcagtgtatcacctcatgaagtacattatatccagtaaggtagttttgagtgtcctccctgctacctgtctccccagtaggccttgggttcctttgggaccttagcccaccttgatttcttcctttcttttttccttttcttttttctttcctttttcctttcctttcctttttgagatggggtcccgctctgtcacccaggctgaagtgcagtggtgcgatctcgactcaatgcaacctccacctcccgggttcaagtaattatcctgcctcagcctcttgggtagctgggcttgcaggcatctgccaccatgcccagctaatttttgtatttttagtagagatggggtttcaccattttggtcaggctggtcttgaactcctggcctcaggtgatttgccctccttggcctcccaaagtgctgcaattacaggcgtgtgccactgcgcccggccagattttctccagctcttctgataacctccccccaaatctctttgtagcttctttggtttctatgatgcaaatgagaccgtcctggagatggaggagcaactggtgagccccctgggattacttccccttctagccgctgtcccaccttattccagagccctctctgtgactcctgagctgaagggttcaccctgtggggaggaggtccaggatcccagcagtaactcactttgtctctccttgtgtctctcttccatgcttccacgccccttcgaccaccttgaaggtttatctgcgggattcttttgggttgaagactctattggcccggggggccatagtgaggtgtccaatggccggtatctcccacacagcctggcactccaaccgtaccctttatgagacctgcattgaaccttggctctcctgaggatatattcaggggtccccaggaactcctcggtccagagaccaagtggtggccttggaaagcagatgtcaggctttggtgtgcctgtgaccacctcattgctcccatattatcccccatttttagtagagacggggttttagtagagacttggcctcccagaacccccttcctctgctcctccatgaatgacaattccaggcctcccctacctcatgtcctctcatttgggggattgctccgtgctgtccctttctctcaaggccgaagttgggaagtgagaaaccatgtttttaacttgtggctgcttttgctgctgctgctcctccgtatctggctgtatgggtggagaacccaccccctgcccaccacaggggtctccttccaggccactcaggacatttttagcttctctcctccccatgttcccttttttctctaaagtcccctgacatcagccctcccaactcctaagagggactacccatgagagtggggttctgaggctcccctatggggacagttccgttcttgaagtgtcagtgttggggaatatctgtggcctatgaggcccatctcaggtttggggatcccccagtccctatgatcagtgttggagtacccccctgggagagcctagtttctttgaggccccaggccctcttttaactacctttgaataggtgttatccctgtatttatggaaataaagttccatttcctcagtgtgacttggctcatttccaggtggaggggacctggctccccaaggagggtgggggtggagcctgaggcctgggtgcccagatgcctggtctagggtggggacccccttggtgtttccgctctctctcaatgcccattctttgtgggttcctggttctctgcgggttctttcctgctgaagacaattctcttcctctcccagtccccaagactggggggttaagctcagggctccagtggtttgggcctcagcctcatgggtggaatgcgcctgccacccccaggctagacgagggggcagagggtcagggtgggcattcgttgtgccgcttttgagctttgtgggccagagctgggtgtagggctggacaatgagcctcctcttccttgaaagaaggaattttggctgagacaatagggccctgtctgttctggcatggggggtggtggctgactcaattctgttccccctaagccctaacaaatgtcatgaagagaggggggcagttttccccttggtgccctgggctgcccccctgcccctttgtgacgacttgcccttctagctttcctcagctgatcttgctttttctcccataacctgaactgctttgttccctgcagctggttctctccctgccccctaactctcccctagtctgttttgggttcaagggggtactggtggtgttacagagctcatagcttctgatctggggagtccagaaataggggcctcagagggttggaaagatacttctagggagccctttgctggggtggggatgagggtagtgggacttgaccctactgagctgaccctgctggagctaaggaggaggcttgtgggagggggcaggaatgggaggactctctggcccagcccctcctctccttcttagcctgccaggcccacccaccagtctgagctgcttctgctgaggctggtctgcttgaagcctcccaggagaaagaagccaggtgggaatggagagagagaggaaggcaagtggggagagaatttcaaatggggaaagagtggggtttactcagagccttagggtgggcatgagttgcggggtgttttgttggagcaagggatgtgcatttagggcgttatgtgacggtgtgggtatatgaggggagtagcagtgtgtgaaaggtgtggagtttccaggtgcttggtttgtgtgtacggtgtgaaggtatatagctaggggttttttttgtttgtttgttttgtttgtttttttgagacggagtcttgctctgtcgcccaggctagagtgcagtggcatgatcttggttcactgcaacctctgcctccagggttcaagggattctcctgcctcagcttcccgagtagctgggattacaggcgtccaccactgcgcctggctaattttttgtattttttagtagagatggggtttcaccatcttggccaggctggtctcgaactcctgacctcatgatccacccacctcagcctcccaaagtgctgggattacaggtgtgagccaccgcgcccaaccagctagggttttgaaggtatgaagttataagagggcatgttaaagacaggagggttggccaggcatggtggctcacacctgtaatcccagcactttgggaggccaaggcaggcggatcacctgaagtcgggagttcgagaccagcctgaccaacatggagaaaccccgtctctactaaaaatacaaaacaaaattagccgggcgtggtggcaggcgcctgtagtcccagctactcgggaggctgaggcaggagaatggcatgaacccgggaggcggagcttgcagcaagccgagatcgcaccactgcactccagccagggtgacagcgagactccgtctcaaaaaacaacaacaaaaaaaaaaccaaaaaaaaaaaaccctagctatataccctcacaccctacaaaacaaaacaaaacaaaattagccaggc

SEQ ID NO: 11025 - DNA, 6000 bp, Homo sapiens
ccagacacgggccatgaaggaatctgaagagcctaccaaaccttgcacaagagaaaagctttacttggaacatcatccaggctcagagaacacaaatatttcatttccagtaagacgtttctggtctttttctcttcctccccttccctgaacctaccctagatgagctatggcctcaaagtgccagtagaacgtaagaaggaaggagaaccacactcattcctgccttcaacaatttacacagggatagaaagagatttatattaaatcaagttgggactttcaattattatatagtaccaaacaatctaattgctgaactaagatatacttgtgcaatttaagggaattgtagaatagcatattaattagaatcaagaaaataattcatgaagtatgctataattcctacccaagcgcaggggaatagcatctctaatgaaattctctaaagaggcaagagcaggcacaatgagtttttgtttgattaaagattccatttagtgcttatccaacctagcaattacatttgtatgcttcagatgttttaaaaaaataaacaaaagaaagtaccttaaataaagaataggatcaaatagtatttaaacaattgagtaaattaaaaaattatatgaattagattgattgaaattgatactttcctaattctcctccttcaacacacagacacacacacacacaacacgtatgcatacaaacacatctgaattctataaaatcattctgaccttgatgagattccatagtttactcatgcaacagaacataatgtctaaatgaagtttctggtctctgttttacatggatgattgagtaaaatcattccctattcctggaagaatagctaagaaaggattcacaggtgaggacatgcgttttttcagaagatgagaacaaagatgagaagatgagagcaacagaatgtcctatatcctaattctctgtgctgacttcggagtggccaatatgatagagatggaaggaactctgaaaacaaattgccagaatttctaaggaacaggagatgttgagtgagtgaatcaagccatggactggctgtatgggggcagctattagagacaactacccttagacttctttggtgattggtcaagctaatcttttccttcagagtctctcaattataagacttagcttgtgccatttagaacagacaagaacacagagaattatagaacaatctgactacaggttctcaagttaaagcaatgaaacttgtagttggccggcaggaaaatattctgagatgtggattcaaagtttctaagtgtgcacacgtacacacacacacccctacctgcatgcattttgtaatttacaaagactagtcaagtaaagaggggtaatttcacaccccaggaggtctgtataaagataactctggtctttaaagcatcaggtttcaggtagaggtgaagagagaatgaatcaaactcaaactgccatcctcccaggttaaagatgagtccagtcatcgtggaggcctctattaacacaggacatgctaggaaggcccattaacccactgccctagcacatttgttaacgtcctagtgcatttgttgatatcaacagttcacagtttttattctgatagggatctattccagcagaccagcttctgtgacctctcaggatgagaaaaagtaacacaagaaaagcttcttatgtagtgaattgagaaggaaatacctagatcaatattccctcagcacctctggtaggaagtccttagtaggagaaaaacaccatgaagacccttagtgcagaaggaaaagggggtagggggtggtggaagggaagctaaaagaaggggctggaggttctcagaattcaaaccacacaaacaaatgaagtattgaggtcccagacttgatctgggcccagtgtgaaagccctaacttatttctccagaagaatatgtcctctggttttagacttggcactgtggggagaaccagagtgatctatggtggatatacacacaaacatagacacacatatttgcatttagtaatttttgtaaaatttccatttgcttctctgatcctgtctgtatctttgggaatagatgtaagaatattacatctctcaggcttgctctgccccaggtttctgaacatggaatacatttctccagtgaaactcagtattatgagatttgggaggtggaagttaggccacagccatctcagggacaggtttcacagacatgagttttggcagcagccttgtgttctaaagacatttactcctaggggctctagaggatctgcaacatcagcagaggcttcctgtgggttcctgatcttttaaaattaggggtctgcagtgacttgtgctcctccagaccccctaacagttttaagggctaattccctgtaatatattcagttctgcttagactgattacagggattcctatttcttgactgaattctcatggctatagtgtctcgtcaccatttgacatcaccaagaagtcctcattcaggtgcctttggaaattccctcaaacacacaggaaattagagtttgaaagaaaacggagaaccatgagcactgtccaaataggaacttctctcctatcacagagaaagggaactgaaagtcatttctcaagtgtcccaaatttagtaatctcacaagaagaaccaatcagtgttctaggactaaacagtgtcataagttgctgagcaacaacttggattgaagatgctattataatatatgaaatgtctttgaatttaccatgtttttctcaagcaccatttaagaacaaggcattatggcagccagcaaagggcagacatagaaaattatacatggttttgcctctaaaagaggagatgacaagcttaaatcataggatcagactcttagcacagactgataccataggctctcatctggcccattctcctgactctttaactttcaggaaaggtattcctgaaaaattgcaggagagaccatgctgtaggtctctttctagcgatctaggagttaatgccacagtgtgttcaaagccctttgatgcgatcagataatcagtaatgtatggaatatttgtgttcataacttgtgagaacggctgcatggcaggacaagaccccagcacaacagtatggaaaatccaccctaagcagacatgtcatgactgatgttgaacaatggactcaccagccaggcacggtggctcatgcctgtaatcccagcactttgggaggcagaagcaggcagatcacgaggtcaggagatcaaaaccatcctggttaacatggtgcaaccccgtctctactgaaaatacaaaaaaaaaaaaaaaaaaaaaaaaaaaaaaattggccgggcatggtggcgggcgcctgtagtcctagctactcgggaggctgaggcaggagaatggcgtgaacccaggaggcagagctttcagtgagccgagatcgtgccactgcactccagcctgggcgacagagcaagacttccgtctcgaaaacaaaacaacaacaaaaaaaaacaatggattcaccatccgatgggctccctcactgccaggtcactcttcatggaagtatttgtattccagtcctttctgtggaaagaaattaacattctccttttcataacactgtatcttcagaaacaagagagtcgaagtctcctaattttcaggactgtctatgttgaacatcaaaatatattctttagagcagatctttaataatcatatgacaaaagaaaaactttcataatcttatgacatgagggaaggaatattaaagccgttctgtgggttattatctctaacgttcccaatagaataggctttgccagctgggtgtggtggctcatgcctgtaatcccagcactttgcgaggccaaggcgggcaaatcacgaggtcaggagtctgagaccagcctgaccaacatggtgaaaccccgtctctactaaaaatacaaaaattatccgggcatggtggtgggcgcctgtaatcccagctactcaggaggctgaggcaggagaatcgcttgaacccgggaggcggagattacaatgagctgagatcacgccaccaactccagcttgggcgacagagcaagactccgtctaaaaaaaaaaaaaaaaaaaaaaagaataggctttgcccactatactctctcatattcattgacctgaatcctcaaatgaggtgtgtccattagtcaactccaatctcttgtcatatataagatggtagagatgagaagaaggtagctcctttacagcccactatttccactaactactacctgtgtttcaagatacagcctttcatccttctccagtgttgagagtgttgaacctcagagtttctcctctcattttctctaaatgagatacaatgccagccatcccaagctcttggcctgagttgatcatcttgaagtctaggactccaagaagcatgaaagagcttctttagtgaagctatgtcctcagtactgccaaaattcagacaatctccatggcctgacaatttaccttctatttgggtaatttattgtcccttacgcaaactctccaactgtcattgcacagacatatgatctgtatttagctctcactttaggtgtttccattgattctattctcactaatgtgcttcaggtatatccctgtctagaagtcagattggggttaaagagtctgtccgtgattgactaacagtcttaaatacttgatttgttgttgttgttgtcctgtttgtttaagaactttacttctttatccaatgaacggagtatcttgtgtcctggaccctttgcaagaacccttcccctagcaacagatgcgtcatctcaaaatatttttctgattggccaaagagtaattgatttgcattttaatggtcagactctattacaccccacattctcttttcttttattcttgtctgttctgcctcactcccgagctctactgactcccaacagagcgcccaagaagaaaatggccataagtggagtccctgtgctaggatttttcatcatagctgtgctgatgagcgctcaggaatcatgggctatcaaaggtaggtgctgagggaatgaaatctgggacgatagactacgaagcattggagaaaagacctatggacatttggaagataatgtgtggagtgaaagaatagtgtgacaggtattatgtggtctcgacagaaagtataacaaattgtggtttggtggagttcttccctcaccacaaactgaagtaagtcaaatttggtttagagggtcaaaactgagttgtgtattgatgaatagcaaggtcctgctacaagccaaactgggggtgggggtgggggtgggggaggaagaatattttctggcaagcattaacaagttatatttctgggctttaattattctttctggaaaattagtaaaattaaaaactaaaaaccacacatagttttgctagaattaaatgaaaaaaaaaaagttattagccctgttcttatctgaatacatgatacagtagttattttttggagtgtaaatcctgtcggtatatattgagcacatatattgtgttgaagattactagaaggaaaagtcatcaaaaagcaacaatttaccccaggaaaaggggagggaaggcatgctgatatgagttgcctcatgggacagtgatagccattccctgccttcccatctccatggtacagcagatcttatatcatgttaacttagtaatatttccaagagagtagaaaaataagtaaggaaatggggaatctgatattattctctctcatctccagagcaacattggtgctgttgtaaagatgtactgtagaaaagtattcttcacccagcgtgacccccacagaaggtgtcaggtagacttgaaataagcaaagtaataacccagctcccatacccatagtggcaattgtagatttctattgccccaaa

SEQ ID NO: 11026 - DNA, 6000 bp, Homo sapiens
tatgggggctctccaatccttgcacaccaaattcatttacatattgtcaaaagccagaggatatttatgataagttgcaaaaatagctacaaattctttgtagctcattctgtcaagaaatgcaatctattaatccacctcttgatgtgagctagtactatgacttgctttgaataacagaatgtaatggaagtgatgttgtgagttttaagtttcagctcaagacacctactgtttctatcttgcacaggagagctttccagcacctgtgataagcctcagcccgcctgccggataatgagcccacatggattgagagaggcctcctatccctgccaaacctattgatgctacagagatgtgagggagcccacctgagaaaagctgaacctgcccagtacataaaaaccactcaggtgggttgagcacaatttcctgtcttacagaatcatgaggagacactaaacaattatttgaagtcattaagttttggagtactttgttacataaaaaaatctgacagatacaagagtcttcaaaaaaattttgtttttcagcaatgtcttagtgcttctgtggctcacaggctcccacatgcctggagtgctacagggagaaggttaaatgaatgaggaaaaattgataggctttcccagcccaaagcatgatgttattatcattatcattattaatatttgtctttatataggagctaccacttgggaatagttgctatgtgtcagacactggattgtatttaactttataattgtacttatctatcatttcattttaccatattaactatcatctaataattttccttctgttttatagaaaataaccttaaggctcaggagttttgagtagcttgcccaaggtgatgcagctgataaaatgaaaagcagcatggaatacatatttatcttattacaaaatctgtattctttttactttgctactctagactctcttattattgtgaagcagctttaactactgcaagacagaagtcttggccttcagagtaaaacttcaccagtgcataaagtcagactaaagcaatttgaaaatatacagtcttagagaatgttataactgtttattagaactaacataaattctacctaatttcttagagggctcttaatgatgtcaattataatggcacatcccattgttattttagtcatggaatcaatggcatgtcaataagtgctttctgagaaaattgttggacaaagtactattttgaactccaaattttattcccactattaatttatgaagagggccttttctctttctactagacaaaggtaacaaattagctcttgttaaaatggtatgctgttcttctgagtctcatttacttattactttaccttacattaaaattatgacctgaagacataagcaactggaacaacgttcactgtgttatggccggatgaagcaggaagaggaaagagacaaaactaggttaaagatagaaatggcatctattgggccagtcgtggcctcacgcctgtaattccagcactttgggaggccaaggcaggcagatcacgaggtcaggagatcgagaccatcctggttaacacagtgaaaccccatctctactaaaaatacaaaaaattagccgggcgtggtggcaggtgcctgtagtcccagctacttgcagtgagccgagattacgccactgcactccagcctgggcgacagagcaagactgtctcaaaaaaagaaaaaaagaaatggcgtctattatctcttcaatgactttgccttgcttggactttcccttcaccccacaggatgtgaggtctgaaacggcaccctcaacttcccatccaagatacaattctaatcctacatttaacaccctaacttcttaactggagttgagttatttaaactgtaattttaataggtgaaattctggactaccatcccaaaacattttgctcatttgccaaagtcctaaggaatttccatgagatacaaagcaggtaagtctggatacaggaaaaaagataaaaacatgttatttgctacacagccagaagggtattgagtggcaaagggagcacatctcaaaggggacctcaaaaaccctcttcatccacaatggcaggagctagaaagaataaagccacctatagggtcaaatatctctcctaatcatgttaaggcactggattctgaatttgcacagaaggagactctcacccatcactcctcacaaggactcatggcttgccccatagcatcacatctgtgctgcttaccagctgcgtgaccctgggaaaagtccttcaactctctgggctttaatgtcctcctcggaaaatgagaacgatattaaaatatgacaagtatatgtaaagagtccaggaatttttcattccaagtgcagtgtatgtacatttctcacaactgcctaatgaggtacctcaatgcctccagccaaagaccagcaggagcatacaagcaatgaacaagtcagctttattgtttattgcaatgatggataaaactcaccatgagaatcatgcagcccctcagtaagagattgttggaaccaaagaagtagaaccacgagaatacatatattaagagaatgatgcaaggaattaatttttgcatctgtgggggtgggctaggcaagtcagagatcctctgggaggtagttatcaggaagggcaggctggaactctcagcacaggctgacacactgtccagagtggaatttctgtttcctcagagaaacctcagctctgctcttaaggcttttcaacagcttagattaagctcacccagttttcctaggataaattcttaaagtcaactgattatgaacttcaatgacatctacaaaatatcttcacagcaacatctagattattagtgtttgactgaataactggggatcacagtctagctgacacataaaattgaccattaatcagttgtaaggtttgtgcttgttttaggtgattttggggaggatttaagaaagagggattttgcttttaattggattctgacagaaagtggagggttggggtggcaatgttatgattgggtagcttcataaatcctacctagagggacagaagactatcctgaggctacagacgtggttggtaaagaagcagtaatcactcccaagagagagatgtgcctggtcatttttgtggtttggacaatatttatgttttgtctgggttcagacatgatgactgagcattcaggtgttctgtctcaatccactgtgctcacagagtacctgtctgattctgatgttctatgaaatcctttatctccaacaggagaaccaaaaccacctgggagtgccaggctagctgctagcaaccccaagcctttgttaattacatccagacagctctcaggtgtcaggacatttttttttttgttttactttttttttttacagtctctgccagtaggaggtaaaacatagtgctgagaatctcagaaggccatttatcaaggacagagtgattctaaatagaagctccattaacttacggtttctatcacatacagaaaatagatgcatctgaaaaaacataataagtttccctctaaggactaactttagctcaatctctagtcccttgcaaatatttggaattttaatggggtaggataacaagttttaaaagatctgatagtttaagaaaagaaaaccatttttctaaggcagtgcaattcttattctaccctcaacttttgacttcatattcttaattaaaaaaaaaattcttagagtaattgagccagccaaattttaaatgtaatcaatgtccctaaatttcctttaaacgtactcaagaagcaccaaaacacagaacataaggattactcaatgcaaagaaaaactgtataaagtctcatatagttactatagacagccccatctgacattataacccctttttattgccctggccaaaaccacctggagcttttgagcacttgagaagaacttacccagctggatttatacaagtagaaaaggcaaaggtattgcttgggctaccaccagcagagatccctaggtaggtggggtcagcttaacatttggagaattccatacgcactgtggaagctaaaagaaaaacagctaacccacatacagaagccagagaaagggcaggggatggggactgccagggagggaaatcaactcagggaaaaattcctggaggttgtaagccagaacatcctgaaggatgccgtataactgatgacctcatctatccacgaggctgctcagaaatgcccacccctggccaggcgcggtggctcatgcctgtaatctgagtactttgggaggctgagacgggcagatcatgaggtcaggagttcaagaccagcgtggccaacatagtgaaaccccgtctctactaaaaatacaaaaattagctgggcgtggtggcaggtgcctgcagtcccagctacttgggagggtgagggaggagaatcgcttgaatccgggaggcaaaggttgcagtgagccgagaccttgccattgtacctcagcctgggtgacagagtgagactacgtctcaaaaaaaaagaaaaagaaaagaaaaaggaaaaaaaagaaaaacacccatccctcttgcgactggcagacatgcacacaccagagaagattccaatttaatgtcctccctttattcatagaacaattcctcaagtccactctgagtagaggctgcatcacaaggggattgccccgtctccttccagggctcttaatacaaactcttcaactagtaactgagatgtcaccataggggatttttctaattggccaaaacctgacttggcagggtttggtttgggtgtcttcagatttccttgtcttgaggtcctcacaattactctacagctcagaacaccaactgctgaggctgccttgggaagaggatgatcctaaacaaagctctgctgctgggggccctcgctctgaccaccgtgatgagcccctgtggaggtgaagacattgtgggtgagtgcatgagtgagggatgttctctggagctgaaaaacagtaaattgaaggaaaagagataaagcgatttgcagagaaactgtagagatttcctaagggccctttcagtattaagacaattaaaaattatagctgttcctccttcaggaaaccagagccccaacctactctttttgttatctatgctgttgtgttcactaaggacgctattctgtttatattatattcagtgactacggcctggaggtctctatgtcgttccatcatgattgcctcaaaaattagtgaggtttccatcagtggataattttttattattaaaaatttatgaagtgtcattctcaaatttccctgaacaacttttgaagcttttcggatgtctccggtggtagatcttggggtcattccatcaattatgtactctatagatatttaaaatgttgcccgtttctttctctcagacttactcacatttccacatgggaactggcacaggtggggagtgggtaaaggagtccagcaggctgaatgccttcaacaatcattttaccacatggtcctcacttactctcagctgcctcatatgtgtcacctcacaagtaatcaaataaaatgggcatgtggctaagctttgtaaatagtgaaaacatgaatgtcaattttttttacatatttctattacagatatagcttcacatttcttttctttagcaaaataagggatcattttattttaaaattgagaagtagaaaaaattggtaaaataaatcattttattctcaaattatcaacccaaattacctgttcttcacctcatctaataaagtcctataaaaagaaaagtgggccagacaaggtggctcatgcctgtaatcccagcactttgggaggccgaggcaggaggatcatttgagcctgggagcttgagaccagcctgggcaacatagca

SEQ ID NO: 11027 - DNA, 6000 bp, Homo sapiens
aaaggcttacaatgggcactaaagagagaagatgggggcaggggaatgcttccactctcatttgtcctcctctccgcgcctatgcacttgagatagtcatgcattcattattatctttgagtcgtgggaatattggtgtccatgggatttatgcaccataagaaatgtaaaaggaagaccttcacacggtagccatatgatatcacatagaaacctggatctatacaaagaaataaacgctggaaatgaaacattttttcacatttaaaaaatggtctaaaatgaggcttctcaacctcagaactgttggcattttgtttcaggtgattattttcttgtaggaggctgccatgtgcattgcaggatgtgtaacagcacccctggcctctacccaatacctgccagtagcaccctccccagtaatgacaacaaaagtatctccagacattgtcaaacatcacttgcaggaattttctattggcctcattttagaatgtctgtcttacaaaatcatacgaagatactaaatcgttgttggaagtcattaagttttggaatagtttgttacatagaaaaatctgacagatacaacagtcttcaaagaaattctgtttcctagaaatctcttagtgtttctgtggctcacaggctcctatatgcctggagtgccacagggagaagcttaaatgaatgaagaaaaagtaatagtctgtcccagcccaatgtgtgatgttactatcattatcattattaatatttgtctttatatagcagctcccacttgggaatagttgctaggtgccagaaactggcctgtatttaactgcataatttgtacttatctatcgtttcatcatattaattatcttctaatagttttcatcccacattatagaaaataaccctaaggctcaggtattctgagtggcttgcccagggtgatggagctgataaaatcaaaagcagcatggaatacgtttattttattacaaaatctataatatttttattttgctattctagactctgttattgttgtgaagcacctttaactactgcaagatagaagtcttggccttcagagtaaaatttcatcaatgcataaaattagacctaaagttagggtcttagagaatgttataactgctccttagaactaacataatttctgcctaatttcttagagggcccttaataatatcaattgtaatggcatatcccattgatattttagttacgaaattaatggcatgtcaattagtgctttctaagaaagttattagacaaagtagtattttgagctccaaattttattcccactattactttatgaaaaggactttttcttttttcttttcttttttttttttttttttttttttttgagacggagtctcgccctgtcgccagactggagtgcgtggagtgtagtggtgcgatcttggctcactgcaacctccgcctcccgcgttcaagcgattctcctgcctcagcctcccgagtagtagctgggactacaggcgcgtgccactacacccagctaatttttttttgttttttgttttttgttttgtagagatggggtttcaccatgttggccaggatggtctcgatctcttgaacttgtgatttgcctgcctcagcctcccaaagtactgaggaccttttctatttctacaagacaaaagtaagaaattggtttctgttaaaatggtatactgttcttctgagtctaatttactgattattctatcttgcattaaaattatgacctgaaaacagaagcaaatagaacaaggttcgctgtattctggctggatgaagcaggaggaggagagggacacaaaaccagttaaagatagaaagagcatctattatcttttagtcaatgacctggccttgcttggactttccctccatcccacaggatgtgagatctgagactgaacccacgacttcccttctaagatacaattctgatcccacatttaacaccctaacttcctaattagagttgagttttttaaactgtgatattaataggggaaattctggagtgctatcaggaaagatttagttcatttgccaaaatcttaaggaatttctgtcagatacaaagcaggtaagtctggatacaggggaaaaaagatagaaatgtattatttactacacagcaaagaggatgctgcacggtgaagggagcagagctcaactgcaacctcaaaaaccctcttagttcacaatggcagtggctagaaagagtaaaaaggccacgtacagtgtcatatatctctcctaatcgcactagggcacttactctgaatccacacagaaggagacacccctcacccctcatgaggaatcatggcttgcccctgtagcatcccatctctactacttacgagccatgtgaccctgggaaaagtcctttacctctctgagttttaatgtcctccttgaaaaatgtggatgatactaaagtatgacaagtatttataaagagtaattcattccaagtgcagtatatgtacattcctcacaactgcctaatgaggtaccatcagtgcctccggccaaagaccacgaagagcatacccttgaatgaacaagttggctttattgttcattgcaatgatggagaaaagtcaccatggggaatcatgcagcagttcagtaagagattgttggaaccaaagaagtagaactaggagaacacatatattaagagaatgactgaaaggaattaatttgtgcaactgtgggggtggactaggcaagtctaagacccactgggaggtggtcatcaggaaaggcaggttgaaattcttagcactggctgacgtgctgtccacagtggaatttccgtttcctcagagaagcctcagctctgctcttaagacttttcaactgcttagactaagctcacccaatttatctcagataaattcttacttaaagttaactgattatgaactttaatgacatctacaaaatatcttcacagcaacacctagattattagtgtgtgaataactggggaccacagtccagtcaacacataaaattgaccattaatcaattgtaagatttgtgcttgtgttaggtaattttgaggaggagttaagaaagagggacttcatttttaactggattctgacagaaagcagggagtggggatggcaatgctatgattgggtagcttcataaatactacctagagggacggaagactatcctgaggctacggctgtgattggtaaagaagcagcaatcactctttcgagagatgtgcctggttatttttgtagtttggacaatattcatgttttgtctgggtgcagacgtgatgactgagtggccttattttctgtctcaatccatcgcactcacagagtacctgtctgattctgatgttctatgaaattgattatcttcaacaggagaatcaaaaccagctgtgcacaccaggctagctcctagcaaccccaaggccttgttaattgcatccaggcagcccccaggtatcaggacactttttattttacctttttttagtctctgccattgggaggcaagacaacatgctgagaatctcagaaggccattcaacaaggacagagtgattctaaatgaaacctccattactaacttgttgtttctataacatacagaaaatagattcatctgaaaaaaggtaagtttccctgtgattactacattttagctcattccctagtcccttgcaatatctgaaatcttaatgtggttggataacaaatatgaaaagatccagtagtttaagaaaagtaaacctattttctaagttaaagcaattctccttattctactctcaatatttgacttgacattcttaaattaaaaaaaaaaaattactggccgggcgcggtggctcacatctgtaatctcaggactttgggaggctgaggcaggcagatcacgaggtcaggagatcgagaccatcctggctcacacggtgaaaccccatctctactaaaaatacaaaaaattagctgggcgcggtggcgggcgcctgtagtcccagctactcgggaggctggggcaggagaatggcgtgaacccaggaggcagagcttgcagtgagccgagatagcaccactgcagtccggcctgggccaaagagtgagactccgtcttaaaataaataaataaataaaataaaataaaataaattattagagtaattgagccagccaaagcttttttaatgtaatcaatgtccctaaatttcctttaaatatattcaagcagctccgaaacacagagcataaagattactagaagcaaaacaaaaaactgtgtaaaagatcggttactgtaggcagcaccgcatgacagtctaacccctttaattgccctggtcaaaaacacctggagcttttgagaacttacccaactggatttatacaagtagaaaaggcaaaggtattgcttggctaccaccagcagagatccctaggaaggtggggtcaagtcaaaatttggggaataccatatacactatggaagcaaaaagaaaaatagctaacccacatacagaagccagagaaaggggagggaatggggactgccagggaggaaaatcacttcagggaagaattcctggagaatgtaacccagaaaaccctgaaggatgccatattattgatgaccttacctatccaagcggctgctcagaaattcccgcccctcttgacactagcagacatgcacacatgacagaagattcagatttagtatcttccctttatttatagaaaatttcctcaagaccatgctgtgtggaggatgtgtcagaaccagaggatgtccctgtcttcttccagggctcttaatataaactctgcaactggcaaacaatatgtcaccataggggatttttctgattggccaaaacctgacctggcagggtttggtttgggtgtcttcagatttgcttgtctcgaggtcctcacaattgctctacagctcagagcagcaactgctgaggctgccttgggaagaagatgatcctaaacaaagctctgctgctgggggccctcgccctgactgccgtgatgagcccctgtggaggtgaagacattgtgggtgagtacatgagtgaggaatgttctctggagctgaaaaacagtaaattaaaggaaaagagagagtgtaatttgctaagaaatagtagaaatttcccaagggtcttttcaatattaagaaattttaaaattatggcagttcctcctttaggaaaccagagctccaaccgactctctttgctacctgtgctattggagtttaccaaggacgttgttctgtttatattatatccagagactatagcctggaggtctgtgtggcattccatcatgattgcctcaaagactagggatgtttccatgaatggagtatttttttgttattaaaaatttctgaactgttactcccaaatttctctgaacaacttttgaagcttttcatatgcctcctatagcatatgttggggtagatagttccatgaagtatgtacactctatagatataaagaaagaggttcttttctttctctcagacttacatttccacatgggaattggcacaggtggggagtaggtgaaagagcccagcaggctgaatgccttcaacaatcattttaccacgtggtaaatgtggtacttactctctgctacctcatatatgtcacctcgcttatgatcaaataaaatgggcatgtagatatgctttatgaatagtaaaaacatgaatgtcaactttttttaacttattcctattacaggtataacttcgtattttttctttagcaaagtaaggaatatattttaaaactgagaactttatgataaaatgcttggtaaattaaattattttattctcaaattgtcaacccaaattactagttcttcaccttatctaatgaagtcttataaagagaaaaatgggcaggcacagata

SEQ ID NO: 11028 - DNA, 6000 bp, Homo sapiens
gataaatgcatcagagtgagaaggaactacgggactcttctgctctcacctcccaactcacagatttccctgtgagttttcagccctgacatgtggggacccagtctgtgcttggccacttacagtgacaggagaatgactccttgccactgtaattgtaagtgtctagagggtatgacctgtgtcttatttttcactgagaatgactccctgacacagtaagtggccaagcaaagagtggtatttgaaactaaacaaaacaaatcctataggtatttcactaggaaacttagcttgctcctcagtttaaaggactcaaaggactcatcaggaaaaagagggtaaaataaaaagacacaaagtcctctagcagttattggaaactcatcttcttaatacatgaatgtcccttgtactttttaaaatgctttttaaaaaacactttcacaagttctgcagtccaaagatcagccagctatggaacagattatttttcttcaaaatatcatttccattcagacaaaaatatgtattaaaagactactatatgtcaaacactgttagatgctaaatacccaaataaaaataatacatacgtcctgttctgcagacgcgtataagtcacagaaggaaacacaagtgacaggacaacagcaggttcagaaggataagtgcagatacgtaggtatacacaagatgcgaccaaacagcacatcagggaaggcttcctggggaacagatggcttcaatgtaggcattcagaaaacagggcaaaagccacttctctcagggaagacagcctgaccgggagaagatactgagtttactgtggggctattgcacttagaagacctgaaagtcatctaaggagaaataatacatagatatttgtggattatgggtggtctcaggagaggaatttaggccatagaactgagagtcattagtggcaggtgcaggttaaataagattttccaggaagagtgccaaaaatcagaattgccgagatctcagggtataatgagagaacatgatagttaagaggtggtttaaaagatgataaggaggatccaggtaaacaggagaaaaataaggacagggtagttcatcagaaagaagtggattatagtgcaaatgttattagtaactcaagtcagaggcactgagaagaacccactgaatttgaccttctgtagaggttcctgatggccaagatgagaggatcctcagggatgtaccagagacaagtcagaagcttagctccacgtgtgaggacacaaagaaagtgtctctgggacaggatgcagactgaaggcaaggttgttttttatcagttggtttgcacttatgtttttaaggtaaatgacatgtttaaatgttaagagactgggcagggaagccctgaagagacagctgagctcattaggaatttctaccaagaatactaaaaagtatttgcatctatgaagagaagcctattgtggtgtttattataacataacattagaaataactcaggtgaccgcgaacagggcaatagatacttctggttctacccagcctgacctcctctttattctacacatcttaaataaaactgtctgaagccagtgtgcatcttgtacgttatggattctaaccttccccatcactagattttggaatgacagcatcatgcacaggcttgatgtcattctccctgatttcagctacaggaaaaaggagcattcactacggtccatctctggctgagtccttgcagctatcaaaagtctaggcctcccttgcagtcctgaatctctcagaacccgaatcacaaggctatcaagaccatgcaaccctgctgtcttgagagaggaaagcttgtgaccacccacaaagacccaggaagagccctagggtcctagaagagagggaggatacagaaacactctttgcacttcgtctcctaatgcagagtccatagctcggagttcctgtaaagcagccacaaaagatagaggctggggatcccagagagataggagggccctgatagtaggtcactgtgtgcaggaatctggggaaggcagtgtatgaccctcagagctgggtctggacttcaaacttggctcgttgatctgctgtgtaaccttggaaaacttattcatctttttgagcttcagttttttcaaaataatttctaaataaaaggaataatttctaaatgaatggaatattatcttcattgaagattcctgtgagatgtaaatggggaaagaaactatgcaggagtctcataaattctggctgttattgctgttattattatgagggccagagggaacatagactatgaggaccagatagatcaatgagcccctaaaatctgtgatccctgaagcagcaattgatgtgaaccaccccatcactcaccccgacgctcctgcgtcctcctgagcactcacccttgatggccccagctcctcggagactcagcaggaaagccaaggagagggctctcaagatcacagctctgatatggaacattctgtcttcagggcgcatgttgtggggtctataattgatgactgtgagcacaggaacagtgatgaggaactgaggccgagtggaggcagatgagactgaaactgtgggcctctagcactggaaatgggtggagaggaatcagcatggctgggattcacctatcagagaaatcatagagctgacattctctgttgctgggtaaagaggacgctggaaggtgctggggaagagatgggagaattttaggtaccagcgtggtcaagagagctccagttcacagttcattttcagagttagagaaagagatgtaaaaagataagttacaccttcttctgacggcaaatgttttccattatgttccttctcccgagccccacccccatcccagacagtcagatgatctttgatgttttttggtcactatattttaaatcatgttttatgttatgttgtcaatattttacaaaaatattctgctgataattaagaatgaatgtgctatctaataaaatatataattaatctttctttcaggtccacctccctgagatacctcctttttatttaatcatttctgcagaagtgttataatttctatttagaggttttaattaacttgaatgaagttgatctttaattgtttatctattcctggttacctttgttagtgaaatttctagataatttttatttttcagatttcttagtatttgatttttcctggtatttaaacagtgtaataacatttttatctttaaattactagtcttgttatttcattttcatataagaatacccaggacagcattacctgtggtaacaatgtgcgcccatattttgatcttgtttttaagaagggtttctctaatgtttttctgttacaggtaatgttaattttttattttatattctctttaccatatttaagaaatacttttctagtctcattttaaatatttcaattttgagctatttatttgatactcatagagaaggtcacaaaacatttactatttaatgtaatgatgaagtacatatattacgttaatattttatcttatttgtggtagccttaccttgcataaataataattactaacagattaggacatgagagattctgttattagtgctttgcatgcattacctcatttaaacctcatattaaacctgagggaggtattattaatgtctactgtaaaaataaattacctgagacatcgaggaagtatttgtctaattatctatggcaggtaaatgacaaggagaaaagtcccacccaggcagttactaaaaaaactgagtttttctccacaatcctctcctggccccttaatcctactagacaccttctactacataattattttcttctcttgcattttacatgctagccttctatttacattttaatattgatttaaagaaatgatgccaatttgattttttttgaaattagaattggtggtccaacaggatcacatttataagtgtctaaagtaagaagtaatgttctttgaaagtttgtaaaaatattcactctaaacaaaatagaatcagatgctttgaaggaggtggggtctttgatgattttttttcactttcttccttatttaccagtcaatttatattctctatggactttatttttccaaagcaatttcagacctattgatctcatttgatcttaagagctttgctataaggcaggttatatcatccccatattgaagacaaggaatcgaagtccaagagaggcagtgtcgttaaagctgcatatttacatggtagggtaggtggtgtgtccacgctcccagtgtaaggtccctagactgagccctcctgaccctgatgacagtcctgtggaagaacctggtaactcctgcacatcgcaggactcacagacctctgggagaaagtaaatatgaatgggtgctaatcttaaacacacccttggacaaaggcaagacagacagactcagacctcatttgagttctgagatgggtactctaatccctctaagtcatgccactgaatgaccttttacacactaagatagcactttttccacaacagaccatgtcctgtgggtgtgtgaggtgtggcagaattggggaaatgataatccctgtagatgggccagcagaatatttgagatcaccttcagagcaaagaaaacgcataatctccccaaacatcatgacttatctgactggttaaaatgagtatcactgtctttcctccgtcatcttaagtgcatcacaggctttatattttcagacctttcatactaactttctgcctagtgagcaatgactcatacaaagctcagtgtccattggttcttttctcagactctgtccaatcccagggtcacagaagactacttgggttcatggtctctaatatttcaaacaggagctccctttagcgagtccttcttttcctgactgcagctcttttcattttgccatccttttccagctccatgatggttctgcaggtttctgcggccccccggacagtggctctgacggcgttactgatggtgctgctcacatctgtggtccagggcagggccactccaggtaagagccgaactgccattcttggagggtctggctcagggaacaattcctaggggacgttatctttaagggatcaaattctgagacaggctgcgggggctcctgccctaaggcagtgtcctctcttcccagctagagaaagaggttcatcccctataggatagcttgctaccctactggcctattctctctccaaggacatgggtacagtaaacagagagaggtgcccagtggtcagtgtctttggggaaaatgggaccaagaggtcctggataaccttggacagacaaggtttgcagagagagaagttggcaagtgcaggctcctgggcgtgttcatgtctgcatccagcctggaggggactcaggcagagagccctaagctggagtgtccaggctctgaggatcactgaggattcagtgctcacgaagaatgcctcttattccccagggtggagcaggagcccacatcccttggacaattaaggagagaagggagggagggggataggttttagcccctgaaggcattctcattaaaggtacttctcccagcctccccagaacttggttagggtactagagtgggttgcgacttgtaggaagaatgagatgaggttgtgtgggtgcatgacagggattgagtgtaggttatcagacagccaaggaagcagtaaccaagtgaaaaatctcttcttcctgctgcctccctgtggctggtgtaatattatggcatctatgatccattgtttttctctcaggatactctcaggatatttctttttatatatatatatactttaagttctagggtacatgtgcacaacgtgcaggtttgttacatatgtatacatgtgccatgttggtgtgctgcacccattaa

SEQ ID NO: 11029 - DNA, 6000 bp, Homo sapiens
ggcttttgccacgcacttttgggaatgggcaggagacctgcttcctctctccagaggttgcattttcccaagcttgaacgcttcatgtgcctactctgcaggactgaggagtttgctctgtggtgtgaaaacctaaggaatggggggcgggtgtcttgccacttgtgtgacaggcttaacctttttgtatgaagttcgtttgccttatcggccttactgtttgatagtttactgtgtctgatttcttcccccgtactttttcaactagtctctagtgatccctgaaaagttccagcatattttgcgagtactcaacaccaacatcgatgggcggcggaaaatagcctttgccatcactgccattaaggtaagtgaagtagggtaaggaatagggaatgtaaatgagaattgggttgtgaagacataagcaaaaatgaagcaaggctggggagacttgagtctcatccagatcaccttgactgctggattaagaaaagaaagtggtttagggagagactgacccctttagcatttaccacagaaaataagtgattaaagccaagatagtggtctaaggtcaagccaaaacatttcacctggggaagtggggaggaggtatggttgctcacccgaattcgctaagattttcctgaaccacgagcttgtgagatttcttctagattcggtttctttacccatcccaccatcataacagcaacccttcctgcgaaatttatattccctgagaattggaggattattgggcatcttgagggataagtagaaataccaacagataaaaagtgtgaagaagcctgtagatggagggtggaagaagtctgagtgggacatttactcagatgagccataattgacactcctttcctgtcgaagtgtgaaggagtacatccatctttctttggcttttaagaatcgaatcaatgaatgcaagaatattatttcacttgagtatttctctccacaaacctaatgaattcttggctttctagatacataacgttctttttttttcccttaagtcagaatgtgtagttagttgtggaaatagcctaccagtatgtgtccatgcgtgcagggctaggcctgtcttcttggcttctgttgcatggtaggtacttaggcgacgttagggaatggatagtagtagggatactgttggctctgttgaggaatttgtagagggaaattccttctgttgggtgctctgtgaaactaataaggcagtgtgaaatactgtacttatttcagagaccggctgtgaggcttaagtagaggtgcagcattcataagtgtaatagagaataaccttcatggatgtatctaactaaaaattagaaatcttatttcatctatatctcttcccacacccattttgaagtaaatcttttcacttgtaaacatataattaaatttgaggcttagtgcagtggctcactcggaggctgaagtgggcggatcccctgaggtcaggagttcgagaccagcctggtcaacatggtgaaacctcgtcatttaattaataaatttgaaagaccctgctctcttctgaatcaacctaataatttgacccttggtcatgtttatttatttatcccgagacagagtctcaccccgtcacccaggccggagtgcaatggtgcaatcttatctcactgcaacctcagcctcccaagtagctgagattacaggcacacgcccagctaatttttgtatttttagaagagatggggtttcaccatgttggtcaaactggtcttaaacttctgacctcaggtgatccacccacctcagcctcccaaagtgctgggattataggcgtgagccactgcacccagccacatttattttttgagactgtcgcccaggctggagtggcggaatcactcttcactgcagcctcgacctccagggctcaagtcaatcctcctacctcaactttccaagtagttggggctacaggtgtgcaccaccacatctggctaatctggatcttgctgtgttgtccaggctggtcttgaactcctgggctcagtgatcctccagcctcagcctcctaaagtgctgggattacaggcatataggcatgagccacggtgaagccaacccttgatctctttcttgcagataggaactgccatttgttttagtttcctggagcctactgtaacaagttcatataaactaagcagaaaattactcttggcgctggaggcacttaagaatcctaccttgcctcttcctgtcttctggtggttgtcagtaatccttagtgttccttggcttgtagctgcattactccaatctgttgctgtcatctcatggtcctcttcgtgtctctctcatgatttgtcattggatctagagcccaccctaatcaaatataacgtcattttacctaattatttccgtaacgaccttatttccaaatagggccacattctgatgttctagttggacaaaatgaggggcagggctcagtattcagttcctccttcactctccaaatcactttggttcatgagttcagatggcatgggtgctagtgctggtgttgatgtgatgctaccaatgtaagcattagtttctttttataataacttgggcagtcagttctgggcactgacaaaattgagtttgtgatcttggaatactttgattatggggatacagtgatttgcctaaataattgtgacccttagagattctgaggaactgacagcccaataccttaatcaaagcctgtaactcataagaccctggtttactgcatcagcttggagtggcaggccccttgttctcctaaatgcaagaatcagaaggcacttagtgacaactacatatgctgagcaatgggggaaaaaaaagatactgcctgctttcaaagggttgtctgtaatactaaattctgtgttcatgattcagtcatacccctgaacaaagttacttttttctttttttgagacggggtctcactgtcgcccaggttagagtgtggttgcgtgatcttggcttgctgcaacctccacctcctaggttcaagctattctgctgcagcctcccaagtagctgggattacaggcacctgccaccatgctcagcaacttttcttgtatttttagtagagacagggtttcaccatgttggccaggctggttttgaactcctgccctcaatgtcatctgcccacttgggcctcccaaagtgctgggattacaggcgtgagccactgcgaccggcccaaagttaaccttctgtcgaacggtttatatctggaaaggtgggtgaggaaagggtgacctaggggattgcaaaatagattattgcagatcctacctttgtgagctttttgaatgaggctataaaggaatttaaaaatcagattcaacactaattccgaaacccctcacttcattcagggtgtgggccgaagatatgctcatgtggtgttgaggaaagcagacattgacctcaccaagagggcgggagaactcactgaggatgaggtgaggacaaggaagggggctgggggtggggtcagcctcagaaaggggtccatctagatctgaccttggtctgcctgccaggtggaacgtgtgatcaccattatgcagaatccacgccagtacaagatcccagactggttcttgaacagacagaaggatgtaaaggatggaaaatacagccaggtgtgtactgaaatgagggcaggattagaggaagggtggagggtcctaacagaattgggcataggaggtcaggggataaaacatcccttgccccctcctctgaatccaggtcctagccaatggtctggacaacaagctccgtgaagacctggagcgactgaagaagattcgggcccatagagggctgcgtcacttctgggggtgagtggggggtctcatctccctgcctacctcgactcagcattcctcctactcgctcttctttttccccaaccttttgtttctgctgtgcatgacctgtgactcttctctttttacctgcagccttcgtgtccgaggccagcacaccaagaccactggccgccgtggccgcaccgtgggtgtgtccaagaagaaataagtctgtaggccttgtctgttaataaatagtttatatacctatggcttcctgtcctttctgtccattctaatagggaatgttaaagtgctgggtcctttttccatttagagctgccctactcagttgcccacacagtgctattagttttagcagtggtgatgctgcagaccccccagtctccctatatgtagctagtgatgtccctctctgtaaagagaaatgtgagggtaaaacagttcagccttgaggggctgacccagaccagtttagagaccaacaccctggggttggtgtgcagcatcattgtggagtgggttagctgagcctagccagttgcagttaaggtgagtttgcaggtcttggtcactctgggtttttttgtttttgtttttgttttcttttaaggggtcatctagtcataagggaaaatccttcgggctgtgaccgaagcaacaaaggcaaaaacgcggacgttggttatgaagggtgtggtctccctggtggagtacgtcggtgggttgggatggggagcggctggacagaccggtctcactccgtttggtgccactccacccgcccgggtttccgcgccctgccgcgctgctccgacgccgcttccggcggggatgggagcgcgcaacgcggaagcgggcggcagaccggccgccggggcgaggcgggggaggggccgtgagtgccgcagtcggccagccatggagcggagcttgctggcggcgaggccgcggcgacaaggtagccacccccgcagcatgcctcgaccgcggtccgcagctgcaccgcctctccccgccccccagggtgcgctggtcccggtcgcgcgctcagacctccgcatcccgggcgtggtcggttaagtccccggccgtgacccaggcccggggagctagtctccgcccttcgctcttacggatcccctcggagtacgccgcaccatgcagctcaggctcttccggcgcctccttctcgccgctttgctgctggtgatcgtctggaccctcttcgggccttcggggttgggggaggagctgctgagcctctcactagcctccctgctcccagcccccgcctcaccggggccgcccctggccctgccccgcctcttgatccccaaccaggaagcttgcagtggtcccggggcccctcccttcctgctcatcctggtgtgcacggctccggagaacctgaaccagagaaacgccattcgggcttcgtggggcgggctgcgcgaggcccgggggctcagggtacagacgctattcttgctgggagagccgaacgcacagcaccccgtgtggggttcccaggggagtgacctggcctcggagtcagcagcccagggggatatcttgcaggccgccttccaggactcctaccgcaacctcaccctaaagaccctcagcgggctgaactgggctgagaaacactgccccatggcccgatacgtcctcaagacggacgatgatgtgtatgtcaacgtccctgaactggtatcagagctggtcttgcgagggggccgttgggggcaatgggagagaagcacggaaccccagagagaggctgagcaggaaggaggccaggttttgcacagcgaggaagtgcctcttctgtacttgggccgggtgcactggcgcgtgaacccctctcggacaccggggggcaggcaccgcgtatcagaggagcagtggcctcacacctggggcccctttccaccctatgcctcaggcacggggtatgtgctgtcagcgtctgctgtgcagctcattctcaaggtggccagccgggcaccccttctcccattagaggatgtctttgtgggggtaagtgcccgacgaggaggcctcgccccaacacagtgtgtcaagctggctggtg

SEQ ID NO: 11030 - DNA, 6000 bp, Homo sapiens
aaatatattgtgacccacagcacacataccacacaacagacaactttcaccctactagttacactgatgatgtgttacaaacattgatatttcctagtcgattttgagttttaaaaatgctgatcttggccgggcacggtggctcatgcctgtaatcctagcactttgggaggccaaggcaggcggatcacgagggcaggagatcgagactatcctggctaacatggtgaaaccccgtctctactaaaaatataaaaaattagccgggcatggtggcgggcgcgtgtagtcccagctactcgggaggctgaggcaggagaatggtgtgaaccagggaggtggagcttgcagtgagctgagatcgtgccactgcactccagcctgggcgacagagcgagactccatctaaaaaaaaataaaaaaaaaaagctgatcttcacccactaagttgatttcctaacacattaatgggcctcaatccatagtttgaacaacattgccctagagacacgcaggtctgtgcataaggagacaagaatgtttattgcaaaactgttgcaatagcaaaactttgataagtctttatctgagacctgtcaccagcaaaatggataaagcaattgtgatgtggtcaggaagtagactatcacacagtagctatgtgtcaaaggatgcacacagggtgataacatttatacaaaatataagaccctgcaatgtgatatcatacattgttttatggatacattgaaatgcgatacaaacataaaaagctgcatgaaatgaaacccacccaaatcaggatagtggctgtctctggagggagagaatgtagttggagaagggtgcataaggaacttcaactgatcttttttctttttaagacaggatctcactctgtcacccagactggagtgcggtggcataatcatggctcactgcagcctccttgatctccctgggctcaggtgattctcccacctcagcttcccaagtagctgggactacaggtgcacacgaccatgcctggctaatttttttttttttttttttttagagacagtgttttgccatgttgcccaggctggtcttgaactcccgggcaaaagtggtcctccagactcggcctcccaaagtgctgggattagatgtgagccaccttgcctggacacaactgaaattttttaagttttaattctttttttttttttgagattgaactgcactctgtcgcccaggctgcagtgcagtggcatgatctcggctcactgcaacctccacttcctgggttcaagtgattctcttgcctcagcctcccgagtagctgggactacaggcatatgccaccatgcctggctaatttttgtatttttggtagagatggggtttcactatgttggccaggctggccgtgaactactgacctcaggtgatctgcctgccttggcttcccaaagtgctgggattataggcatgagccaccgtgcccggcctaagttttaattcttaaaaaaaaaaaaaaaaagaaccaaatttggcaaaatacaaagatttgacaaagctagaggaaagatacaggcactcactgtatttttatctattacttcttaaaatatttcataatagtacttaaaagattagtgctccagtactttagggaagaagactttattctgaccatgggaacttgaaaaggtgaagtgctagagagagccacaggagcgcaggcacaggggtatgagtggatgaggtcctggggaaatgagaagggacacactgagtccttcctgcctgggatgctgtgctgatggctcacacttccttcacatgttggtatggtactctctccatttaacagatgagcaaacaggctgagagaatgcctgctagaaagtggcagagctgggactctaatccaggcctgtaagagtcagagtccgggccaggcgtggtggctcacacctgtaatcccagcactttgggaggccgcagtaggcggatcatgaggtcaagagattgagaccatcctggccaacatggtgaaaacttgtctctactaaaaatacaaaaattagccgggtgtggtggcgggcacctgtaatcccagctactcgggaggccgaagcaggagaattgcttgaacctgggaggtggaggttgcagtgggctgagattgcgccactgcactccagcctgggcgacagagtgagactccgtctaaaaaaaaaaaaaaaaaaaaaaagggagccagagtctgcactcttggccagtctacagcatggatcctccttgaggagcaattgtgttttctgcagagggtgggaggacagcaagacttgagggtccagtgtgctgggctcaggtctgtagacttctgtgggcagtgaggaggcataggaaggcttcaagcaggaagcaggggagggaactcattggagctgtaccatctgtttcttaaactttggtctttgttgttgttgtttaaccaacagaaactttcttgaaacaaattctaactcagaacgcaggtatataaaatagcttacagtggagctgatttggaagaagcaggtgacaggggcccagagccctcacctctgagacctcctggttggtggagagacagaggctctaagtattcctaggatggggaggggtggggagaaacaaggccatgtgctttagtccagagagacccaaagtggagtgacctccattcctggctgctacacctcggctgagttatggaaccatctatatggatgtcaggggaggaaggaggtggattcctgggtgtggctgtggcacaagttctgagtgtggccactggaggcaagttttcaacttgtccctcttcatcctcacggtctggggaagggaaaaaggcaattgggcccaggctgacagcttgatcagagcctggtgcccagcagaggcctgacatcacaggccttcaataaatgcttatggaatgaaggcatatttttcccttctaacttttggggatgatacaggaggcctgactcctgggagcaagtgaaactgtcccaggggctgccccttctcagtgaggttccagtgacccatcgctgtggctcagttggtgtggggtaataggagaatacccggctaaaaatcagaggcttggttggcttctgcctccagttgccaggaacctgccgtgtgcccttgatgggtggtgttccttctctgggctttggtcatctctttttggcacagtggactggatgaggttttttaaactgcagtttgcaacccatttgggacattaaaaaaaaccagttcagtgggttacaatcagcattaaagcaacaacaagaacacaactgaaatagaatagaaaatatcagcatgcatcaaaggtcataaaagtaagtattgtttggtgatctattgttttgcttatatatagacgaaggtgtggactggtctgctgtaaaacttgttactgtttgccatggtgaaaaaacaaaacaaaactgtaaaacacggtacttagcgatcctggaggtgtccttccctcccacatcgttcctgggggtcttcgtaaaacaaacaaacaaacaaacaaacaaaacaacaacaacaacaaaaaaaccactgcctggggctcttctcctcccagggtcagcagctgtctctttgcttttagctgtctccacccctcccctagcctctcttcttcctgcttcagtcaccgagtcccctcctccctctctcccagggacaaacgcccccccacaactcaggaagtggggttggggggtccgaagggagcaaaagtgatcggatggcggtggcaatgggcaccctatcttaggcgttcaaataaaggactaggaagcaaacacccaagcaccggggaacagaacagaaagtaagcgagcccgggacgcgaatttgagggcaggacttcgggagccagagcctggcggcgctgccgcagcgggtcactcccagggggccggcacccagacttggcatcgttagcgcttgggtgctctgtcaactagcgaaggtaattttcatccctgctttttttttttttttgaaaggaaagacggaaggagccaagagttttggagccaactcctggagagggagcggctgaactgattcggaagttggatctctttgtacacaggaatgcggagagaaaaaaaacaaaacccaccccattgcttcatttcccctccaagcctgagcactttctattgtgcaatgaaaaggcttttcacgttgagaaaaatgaatcccgaatttgctctgcaaagggatgagcgcgcctctgggcgccagcctgctctcagctgggcgcggagaccgcgcggtggccgcagggcggccgcggccagggcgctccagggcgcgccctccgcgagcggctccggggtgacgcccgccggagagctggactcccccttccgcgggcgcctgcactggctcttagccagccgagggcccgggtgcagatagtccgggaaccccgagggcggagagctccccactacgcctgggcctcccagggatggcagctccgagagccccctagacccggtgccttgcaggacgcctctggagatcaggagggctggcggcgcattcggcgtccgggaggccgggccccggacgcgcgaggagcgcggggcgcgggaaggcaggcgggtgcacatgggtgccggcgggcgagctgcggggggagggggggcggggtgtggcctccccgcctcccgggcgggatttgcatgtgtgtggtggccccagacttcctgctccttctacgctgcaggtacgcgcgggccgggcggggcgggcgggcggcgggcgcgccaagacgtgggcacctcctcacccggaccccgggccccgccgagccgcctcctggctcccgtggccgccagcccgccccggccgcaccgagcgtcgggatccgaggtgggagcgtacccctccccgctccccggacgcctcagtcctccgcactgagcttggccacgcgcccctaggcgccccccacgccctgggccccggagggccgcagccatgagtgaaatgtccagctttcttcacatcggggacatcgtctccctgtacgccgagggctccgtcaatggcttcatcagcactttggggtgagtgagccgagctcgagaggggcgcgggtaaagagggggcgccgtgggccctggtgccagctgcgtgcgtccagccgccgccccccgatagaggcctggacgtccccctagtctcaaggagcgggaacggctcgcctccttcttttacagaaaggaagtgaagtgtttgctcaggtaggactcgggctccctactggagttggcaggaggagcctccctcggcggcgcagcctctaccctcccgcgcacgcctttggagggggcggagggacggaggcttcctttgcaggtggtcccgggggcgggcaggtgggtggctggaggctgagttggggaagggcagccgggccgagacgtgcccggctctgagggtagggcggagctgtcgggagtgggcaggctcagcttggagcccgtaatcctctattaccgatcccgtggtgcctttgaggggtcgcaccttctcctcacagctctctccctgttcttcccagcttcagtaggagtgtcttctcagccctccccttccaggcttcaaggtcctggccagctgccccttctccccgcctctcccattcaatttcctgcgccggtcatctggcgcccttgggtccttggttctagcttctctccagcacttcacaaacattaattaattctggccgccacctcccagggtctgggctggatgaacagggaatcagttcacgtccctggagagggccaggcctgtagcagggagagggcaggagagaaattaggtagagaggatgggtttatcttcagaggagcagctggatgtgattcgctggatgggagcgtaggtggtttctccagccagacc

SEQ ID NO: 11031 - DNA, 6000 bp, Homo sapiens
cctccactgtatcctcaggattgaagactggggcagtacctgtttctcccatgtcctcactgaaagtgtgaataagaagcgggggttggcattgttctctttgcctaaagagccaacccagcagacaatgcaccagcctttttcaaccaggcatcctggagggcacacaggtgaatcagtgaattggcagtgtcccaaagctgatgggaagggggttggagcagcaagctaccgttgatgtcccatcatttcttttggttctttcacattagtaataattataattccaactgtaataacaatagctaacattcgcagagctttactcaatgccactgtgttaaagcactctccatggcttgtctcatctcatcctcacagcagccttaggagcgaggtgttatttttatctccatttcacagataaggaatccgagctttctccccacagtgaagatggatagggaattactaaacaactgaagacaggcaggaaggaggagcaaagacgaacaaggacttccagagataccccctttctctctccaccccttcttttccccaagtatcttcctttccttctctagaagaaataaagttggaagagaaagaagcaaaaatgaagtaaagacaaatagaaggacctaaatttacatcctcagttatgtggtaatacccaccccactacaccacacccccacctaccaaggtaccagtggcaggggatggaattgctaaagggatgaaaggaggggccccagctcgcttacacagcagtaaccttcctggggccaccaaagaccagagtccagatccccagtgaggtgcacctcactgggtggtgcagtagagtcccctggctcaacctccgaccctggagaagttggcatgcaccactcccaaagccccactgggcctctcccagggtgactgctcttccaggctgccctggccctcactgcatcctccctctggctccagaatggggaaaggtccggagtcttgctgaatggcaactatagcactgcagccattcgagtgtgacttggggcatcccaaccccatgcctggactcctcattacccactcctccagtctgtcttgctccagaccccagatcaccctgggtagcgggtccccgaaacgagagtcctttagaatgctgccatcacctgtccctaggcagttgcatcctccagcacaaagatccaaactcctgctgcaaagttctgctcataccctttaagaaaactctcaacctttcctccacctcactggttctccctgtgcctccccaacacctgatagatgtccagttactgcagaacataacaagtactgggatggatggtccaaacccaagtcatgaatggcatttgttagtatagtagacatttccgcaggacacagaatcatcccagtggtcctcatacccattggccaagtcccattttcctcccctcctccagcagagggtccctacactccagcaggcaggctaagctggcctggctcctcccccgaagctccaggtaaccccatcacaatgcccatcccctctccagctgccccaagggggtgctcaacttaccgtctaggagctcttagaggctgctggctggtccagttccttctccgagaaacaagggtcagccagattcagtcggcaggccagcagacaagtggaggtgggcggggaatccaggcaggagtggcctggcatttcctggcagagccctgcctcccagctgtctaaagaggggtgagggagagtgtccctgtctattggcaaagtccagcccaggtaagggattagctgaggatcccagaagtcagtgaactttccagtctaggtctggaaggaaggagggaggcagggagacaacctgggtgtaggtgctgcaccttgaaacccctccttacagtgccctctgctggtgagtggctgtccccagccagaggctattattaaaatagcagataggaggaggagggaaccttcatctgagtttcttaaactataatgtgcacaacagtcacctgggagatcttgttaaaatgcaggctctgattctgtaggtctagtatggggcctgagattctgcagctcaaagaagctcccagctgatgccaatgcaaccggtccaaggagcttagagagcatctagttccacccgctccccacacagagaagacagtggagccactgagacggttaatgactcaccagttgctggtggacctgagatgtacccatatttttccttacacaaggtgctttctacttcccccacccaaagttggcagagacactgccggttgggagacaactgaactttggggccatttgccattctgagttcttaaaactctgcctaggagcggtggcaccacaagaatgaaaactccttgtggaacttttcccatgttttcggctgtctcctcagctcctggtacagcctgatagatagaaggtgttcaataaacatgtcttgaatgaatgagtgaagcagttgagagggaaaaggatgcattttggctccaactggccaacactgagcccaggtgagccacacgttgggtatgtaatattgggcaagctacttaactcctctgaacctcaattcccttgtctgtcaaatgcagttaagaatatctaccttgtgtgagataataattgtcattattgagctaataaatgtcaaatgcccaccacagaatgggtggtcaatagatggtaaccgttgtcaccagggtctggcctcctgcagttgaggaggcatggtgaacgcccccccaggcccctagttatcatctcccatagaaaataagtaacttcctctgcttttgtctcagttaataattctctagcctcttgtctctgactgcaatgccctcccctctgcttccttccctggtggaggtgagagggtggaataaacctcccaggggagcccagtaccccaaagtgcagagatggtagagagcgggcaacctgggaagcagacctcatgcctaaagacaagccaggaaggggtgctcagaactttgatagggaatgaaaggagtggggtaggggtgtttgtctttgttgaacaaagctctgtctgagtcacacaggaggctggactttgccaacagacagggacactctcccctacccctctttagggcggctgggaggcaggactttctgccaggaagcgccaggtcactcctccttgactccccacccacctccacttgtcagctgccttctcctctgagtcataaagtcctaggggtttgtgaaagatctgtcaagctagggttctaagccaggaaggtcatgccaaccaggaggctataaccaggggctgtgttcatggattatgaactcacttcccaagctagttcttgccactcttggggacaatcccaattataaggaggctctgaagaaatgtgaaggctcctaccactcactcccatggccacagagctggttcatgggatgcaaagaccacaggcatcaacagcattataactgggggctgagctgtcacaggagggccagtgtcaaaccctcaccacaagccctcaaacattccatcaaggggtagcctccagaggccaggcaccaaggagggtctggcagaccagaggggctcctcctgagaggaactctttggggccatgaaacagcaacttggacttcccagccagtgtcaccacccttctcatctgagaaaggcagatcagcagggagcaccactccaccctcctcccagccccaccctcctcccagccccaccctcctctgccttccacacatcatatgtcatcaggccccccgcctgggaggtgtgctgccagaggtaaggggagcacaggcctaggaaccaggaggcactgggagaggcaggtgtcaggagaaaagaggatgggggcagggaggggcagggagggggcctccaccactggacagaaatgtagaaaaacaggaaggcagaagatgagcaaacggacagtcaggagcacagaaagacaagtagaaatatgcacaggtgggcatgctgctcagctctgtcccagaacctccaggaccagtgtccctgacccttgacagaaaaggatggattagggccaggcacagtggctcatgcctgtaatcccagcactttgggaggccaaggcgggtggatcacctgaggtcaggagttcgagaccagcctgaccaacatggcaaaaccccatctctactaaaaatacaaaattagccgggcatggtggcgcacgcctgtaatcccagctactagggaggctgagacaggagaatcacttgaactagggaggcagaggttgcagtgagccgagattgcaccactgcactccagcctggacaacaagagtgaaactctgtatgaaaagaaaaaaaaaaaaaggatggattagatagtcagtccagaatactgaaaataatcagattgttttctctccttcaaatctggttaatcatggggggaggctgaaatatcatgaacaaatgagaagaatgatatttgtggggccttggtggggccttggctggaggagggtctgtacattgtcccacatgcaaatgacatgcaaagcaacatgccaccttggcagctttttaatcaaagaccaggcagttgtttccttgaaaagtcaggccacaagaaacctggatgcttgtgcttacatcctgacactctgggaatggaaagatggagcaggaagctcataccccatggctccaggggtagaagagagctaaaagttcagaaaaaggaatccacggtgtcaacaggccaagtttgaatttgggcaggagatcagcctgggtgggccccatgagtgtgccagtctgatatggtgagataagcctgggacagatgtgctgccgcattcgtgactagaaaagagtccccaggaatttctggctcctgccttcagattgtgaactttccaggttggtagatcagcttaggtagaacagttctcggtgagggccagctacatacctggctaagcgctgcccactgcagaaaagctcatcacccgggacctgatctccaggactcagaagcacttggaggaaggcctattcacttagaagcagttaccagtgctgggcagtgtcctccaagtgccagaggagtgctgtggagaaaagaagtccatggaagccaggagatgggcaaggtgtggcctggggttggagagagctcagaggtacaggactggagctgggccagggagagaggaaggacctccgtgagtagaccttctctgaggggctcaggccaggaaatgagtcaggttaggaggcagagacagacgaggagccgcaggggaaggctcatcactagcatgttctctgcctccccagattttgcctcttcaaggtgaatgcggcttcaaggggctatctttgtgctcctgccccacctggggcccatcctggtctggctgttcactcgtgatcacatgtctggttggtgtgagggcccgaggatgctgtcctggtgcccattctacaaagtcttattgcttgtacagacagccatctactctgtcgtggggtgagtacttgtttctcacacatggccctggtacccaatggggtgggaacaagtcctctatatctgaattactcccatatattggcctccaaaggtaggcgctttgtcttgcctctcaccaccatagtgggtcctccagaaagtaagaaaccctctatgcctgcctggggttccagttagcccttcttccaccctctctaagtctccccagcccctcctccacctcaccatgcccagctcctcccaccaactccctccctggcccttacatgatgcctaaacccatctgcccccatttcagcccacaagggtatccaagagtccttatgccagagagcctcctccatttgccacggaacctcctcccactgaatgtttttgccaccatgtctccacagctatgcctcctacc

SEQ ID NO: 11032 - DNA, 6000 bp, Homo sapiens
ctgtaaatatctgatgaataaggagataagacattcttgcaaatatctctgagaatgtttatttcaattattgaaagttgctcatccatttcatgaattattgacattaattctaaattcaggtgttctgtgtgcttgtattgatggtttaccttcatgctattaatttttctcaaatgtatgagatacttgattgtcaaatagtattaatgcatagatgaattgagggaatattctcatgttggtattttgagctgttgaggcttctacttctgacattctaatttttcttattttgtttttaacactcggaaatcaaacgtatcggtggccacttttcttgtttaacttggatttatcttttttttatttatttattttcttccatttacaaagatagggggctggaagagagaatgccagggggtccagtgggccacaccgaccctttcttccctccatgttccccgttagaatctaagcacagaaggaagaaggcctacttttccagacagtagggccttctcttggcttgcagaagtgcatttgaaatggaggtggcagagatgggataccacaccgggccaggccttgtggaacctgcaatgcattccctgcagagtgatctccagtaggcttcggagagagtaagggctggggccctgtcaagatgctgcacagggagaattcccccaggagctgtccacaggagcccctgagaaggtggaggctgaagggaggagtcagctaagggcagatgtgcagatacgtgtttgagctgggcagcctgaacttggcagaacagagcggggacagaggggagccggagctggccgtggtggtgactgagtgatttagggaaattaaagcaagaggggagatcatggaggaggaagattctcaggttgggcaaagaggctgaactgggtttggtctcccctgtttggggcgttggatcagatgcacagggagtgttccagaggggctggggacagcaatgtgggagggtcccaccacagcagggatttaggtactggtaggtgtcttctgcaggcactggatggccccttccttactcattatctcagctgtcccagagtggcaagagctgagcatcgcccctcggcctgtgctgagctgaagccttcagagacctccatagctgctgcccccagggtgttcgtgaagtgtgtgcaccgcctggccctgctcctctccaggactgcccttctccagctctgtcaccccctaacttggggctggtttctatggagcagagtggtctgctgaaggagggagtgctgaaggagggagtgagtgtctgtgtgagtgtgggtgcacttgggtgagggcctgagagtttaaaggcaaggatcttgattggcctgtaataagcaaatgagcaaacagagatgacggccaaaggatattgaaatcgatgttaaacataattttctaaccctacccctgatttttgtctcatcttctgaggctgaccacctttaccagcacagctgtccccactgtgctccatttcgctcctcctctctggccccaggccaaacccagccatactccccctgctccagcctgcagctcgggagcacatgaagggctgacagcaccaggcagcacagagaccggggccctgggggcggctgaacggggtgagggggttggaggatggggttggttccatggagtaaggaaggagaagaagcagggagaacccagctggggagatggctgcttcctgcactccctgagcccaggcctcccgcagggtgcttagggtggaagcctggttctgtgcctgacccaccctgaacttcctgtgagggagctgtgcgcccagactgcagccttgtgtgggcagtagctcaggtccctctgacctctctggcagggaaaaagctgctctgagaccagatgctttgaacctggcatcctgggaccaggaagggccattgttatgggaccattgtcatgggagcaggaataaccctgtcagggcaattgatgactgaaggatcctgctggagctggggcagagagccattggggtcagaggtataagcagacttgttggggttcagggagaagactccttggatctgcaaaaggcaagcctggatgaagagtaaggaagtgcccatggagaatctctgagcccaggaggagcaccaggtcaggagagaggaggcctgggtgctagtcctggtttggccctgaaatagctgagtgactgtggaaaggctacttgccttctctggacctcatctccctcagttgtgaaatcagcactgagagaaattcccttttgtccctgctacttctggttctatcatgggggaaatttacagctaccccttcacccctgcccagcctagcttagccctgtgctgcgttttggggatcacctccagacctctacggctccctgctttccccatttctgcatcagaggccagccctcccttcccatggacctacccaggctcggagccactgttgcaggctagactgggccttgctagaaaagcaagtacatgaagtctccagctctcccagctccttctctgggttcctgtgagtgtgtgtgacaatgagtttgggagaggaggttgctgaggttcccaagttctctgagggaccttctcagagggtgggcagggaacccagaatcccccagaaccccaggctctttgacaggactttgctgtgccctgctctgatcgtgccaagggggaggcactatccctagctcttcaagagacttctgaaagggccccagatcccaccacagctacctgccccagtccctcctgcagaaattcaacttgtgacaagggctgttgtgggtccccagggagcagggccagtcccagcctggatgaggggctgcctaagcccaggcttccctgcccccaggtcccagatgccagaggaagctgagcgtgcagatggttccagcaggggcctccccctagggtgctcaaggccccaagtctatgtggagggtgcccaccccactcacacaggtggggaagccacaacacagagagaggggcagattccccgctttgagagctcctgtcccctggggagagacgacacactctgacacagcagagaacgatacagagctggctgcaggctgaagagacacacagctagtggcacatagcaaggggtgctcttgtaagctacaagaaggagctgtcacttagagtcagcaggggtcagagaaggggaaagtcagcatgggaacacagttgctgacacacacacacacacacacacacacacacacacacacacggtgacgtgcctcggtgccatctgaggacagggccgccttcctccccctcgggaggatgcccccaccctgatttggtatgtaattatgttcagggagaagctgggccccactgtcggcgaggaaaccccctaaaagctcacctccgcctgtgtgtgcaattcagtgggagcctctttctcacccctggtttcctgtcatgtctgtgggtcgcatttcaaccagaccagccggaaggctccagaccgaagtcaggaggcctgttctggtcctgtgtgactctgagcaggtggctgaccatatctgggcctcagttctcacatctgtgaaaaagagaagtaatgtctccctcgcgaacctgctgagggtcttgagaaagtgtgcatgagaatgctttgtaaataatgcttgtgtgagtgagtggcgggcatcgctccctgagctgtcttctagctctggagctccagcctgctttcccaccttgggcccttgggcgccaacatctgatagccctactgtgtcctccttttgcatacccctctgcctttcccattctcagtctctgcatactcctactgtaaggagaagggcagtgtactgagatggagtggagagcaggagtccaggggcaggcaaagcagtggacttggaatcgagtccacttgacaagttccaattcccgtctcagttattacctctgttcacagagctcccggcagcagatcgccagtccagcagagcccccagtggtgcaactgcaattacacacagtgtctctaccagtcctaagatatattagctcgttctctttgtaaattgcatcgtattttaaaactgaatcttcaaagtgctgacattaactaaagaaaaatatgctagagtctttcatctgtttatgttttaattaaacaatatttctccagggtccttaagtggcagaggtccaggatgcagagatgaggccaggtcctggttcctgggctccctctaccccaccccactgatgcatcccatgctccgtgtgctcttcccaccctcccctccccgacctttgccagggaccctccctagcctcccttgctggttttgaatctccacctcctctcccctctcctttcccgcacccacgaaactcccagagtggaagcacatcactgacccaccatggaggcctgggcatgacgtccctggccatcctgtgaccagtgaggcttggggcttgtgatcagggttccaagtgcccctgagtttgtcatccaccctcagcctgcctttccctggaaagggcggcaaagctagggccctgcaaagaagagaggcagcacacagagggagcaagggggaagcagtccataactcgcccacagtttcctcctggccttttcagctcctccctcaggggtaggtcatggtggggaggggcagctgggcacaggggagagcaggcatcttctacagaggcctgggaagctgtgtgccagacagcgccgagcccaccagacccagactcacctacagctggagatccccacttccctgtgcccacagaatctgccctttgcagtctcccatctccccaacccaggcctcagcctgtctcatttttctatcagacgtgctggaagagcagcagaatcaggcccagctcccaattccctctccccagtcttctccaggtgtcccctcccatgagcgcacaggaaaaggaccacatggcctggcgagccctacacccactgctactgctgctgctgctgttcccaggtgagggggaggaggagcccagggagcagaggagatgggtgtggtggggactgtcaggacagcagggtcagggagcaggtggctctgtggccagaggcctgctgtgaggcaggttgtgcgcgtggccttgacctatgcgttacttcatcattctccaggctctcaggcacaatccaaggctcaggtacttcaaagtgtggcagggcagacgctaaccgtgagatgccagtacccgcccacgggcagtctctacgagaagaaaggctggtgtaaggaggcttcagcacttgtgtgcatcaggttagtcaccagctccaagcccaggacgatggcttggacctctcgattcacaatctgggacgaccctgatgctggcttcttcactgtcaccatgactgatctgagagaggaagactcaggacattactggtgtagaatctaccgcccttctgacaactctgtctctaagtccgtcagattctatctggtggtatctccaggtgagctctttccctagggtcctcagaggggtgcccctcacccccttttggtgcctccatcacccctggtttcccaatcgtggaagccacccatgcccacgccccagtctcctgggaaggctgttgggaacaggtgcagggggaactcatatgtgcacaagagcagccatctcacagtctgcatgactcccaagcctgcagcctgggcctcctgagagatgctgaaacagacccggtgagcatgctgaccagtcagcctatatgaccctgctacaggagggcaggaccacccggcatctttggtacatagtaggtgcccaggaaaggtgcatccactggctgcccccaccatgtagagccagtggtatctgggtagtctagataccaagatactatgggtatccctcatagtccaga

SEQ ID NO: 11033 - DNA, 6000 bp, Homo sapiens
aagaaaagaaattcagaccaaaggtcgggggttaggccacagcggttcccagggggagccagaccccttcagtccagcctgtcagcctctgggtcctggctctccgacactgtctagctcccatctctaacctccccaccccatgtatcacccctagatgaccacaagcccatctggatgcatgcagaggagcgggaggaaatgagcaaagtgagtggggggaaggggggccagcctggggagctcaaggctaccggggtctctgtcttactccttgcattagcccaactctcacttcccatcccagcaccagccccagatgcatggtgtcctccccagcccagcctgcaccctagccccatgccaccttgcatctcagcatctctgtattcttatatttggctctccctgcccttctttctggcctctctctgtcctgcagagccggcaccatgagggtgggacaccctatgctgagtatggaggctggtacaaggcctgcaaagtgagcaggtgagctgacagtgaaaagccagcttggcctccgatgccctccatccagtccctgctcccagcctcccagaccttttcccttcctcccgtagactttccctcagctttagctctgttccctctcctattttcttattttttttcctcttgtcttgcttggaagacaaatgttttgttttctgaactcattctctcttccttctctggtctctttctcaccacagccccacagtgaacactactctgagaaacctgggagctctgtataggcgccagggaaagctggaggctgctgagaccctggaggaatgtgccctgcggtcccggagacaggtcagaagcccagaggggaaggaggtcctagagggaagggccctggggatgagagagtgccgaggtttcttgggagtctcctaagaataagcggaaaggctgatgaagccaggagggagaggaaagtgaggcagtgttgtgattgtggttgtttttaagcatgttcttaccccccacctgcattttgtggtcaggactctagtttcaagattcactaaatggggatatgaaggagaaaccctgccctttcataaggaggggacctgggtggtatgggtgagaggagtgaggttggggagagcctaaatcaagaatttcttagattgtgggtctcaatagtaggttgtgaaatcaattcagtatgggccatggggataaaaatatatacagatctatatatagcaatgcattgcaaatagaaaaggtaagtattattccagtaggtataaactgagacatcacaaggaaaaatgttttccttccagtggctgatggtgaaaaaaatttgaaagccccatcctgaggagttaaggagtaggaagtcccaggtccttccttttccttccagggcactgaccctatcagccagacgaaggtggcagagctgcttggggagagtgatggtagaaggacctcccaggagggccctggagacagtgtgaaattcgagggaggtgaagatgcttctgtggctgtggagtggtccggggtaagtctgatcattgccttttcatctctcctgcccactcctgctggtggtggtgagaggctcttggccatgctgtcccagtctaggtagtgtattccttcaggggtatctctgggagccagtttttgacaggacttttatttccagtcactgggccttgggggtgggggatgtgtgcagaataaatgctaggagtagactcagaaacccatctgtgtgggatccttgtagctttcattgctcactcctttctgccaggatggcagtgggaccctgcagaggagtggctctcttggcaagatccgggatgtgctccgcagaagcagtgaactcttggtgaggaagctccaggggactgagcctcggccctccaggtatacatggaagtcaagatacagtaaagtggccgggtgcagtggctcacgcctgtaatcccagcactttgggaggccgaggcgggtggatcacctgaggtcaggagtttgagaccagcctggccaacaaggtgaaactctctcctaaaaatacaaaaattagtcgggtgtggtggcaggtgcctgtaatctcagctacttgggaggctgaggcaggagaattgctggaacccaggaggcagaggttgcagggagccaagatcatgccattgcactccagcccaggcgacaacagcgagactccgtctcaaaaaaaaaaagaaaaaaaaaaaagatatggtaaagcaggcaagtaaagtaagcccttgcctccaactcctcttggctcctgatctctggagaagtatctcggagagaaacagggaggaagtcaacgggccagccatggagagagagtttgggtagaatgggtgccccagtgtggcagtgctcaagaggcccacagccttaaggccactcaggaggaagagaggaggcctcaattcttccgttttccattgtagcagcaacatgaagcgagcagcctccttgaactatctgaaccaacctagtgcagcacccctccaggtgagagcagtgcttgtgagcatattggtgggtgaggaaaaaaggacagccagtgagcaagcccagtggagtaagggaagagggaagggagaggagtcatctgggatgaagatgagccaggggattgcagtcattaaggaatcaggcagatagcttgtggtgagtgctgaccaccaagggacagtttcaggccagacatagtagcaaataagttaataaggagggaaataggaatattctgtaaactggtactttggaattatgaataatttaagaattatttggagatacgaattattttttcatcctgcagccgccttagtagtagatgagaatggaaaaagaaaagtattaaataatccccatctgagaaaacactagtgatattttaatggcaaatgacttcttgtatcaacacacaagtatatgccagtattcatgtggttcttccaggtagcttctccaccagattgtggccttctggaaaaccctagcagaggctaaacaaagtcccaggtccagagatagactggtccagagacagatgtgatcctaggtccagagatacactgtgaccatgggatggatggactctaggagccagtctttgggaggccgaggtccctgagctgatggggtagtgttgtctgtttcaggtctcccggggcctcagtgccagcaccatggacctctcttcaagcagctgacattcaacccggcccccaggtctgctgggtccccccacccccacagccctcacagcattccccattgctcctggctcttccccacccctaggtgggacagtgaaggggagcagtttaaccagaagattgctgctgcccttagggtctcagctccctcctcaggaatccctcttaggaaggaccctcaggacaccctctctgcaccctgtggtcctctagagtagctagctctgaggccccaaggtgggtacaaagcaggtatggccctcagagatgcagcctgctgctggcttttcagtcagagggttgggggctggccagccaagctgccttgccctggccgctcttactccctccctctgctgtctcacttcaggtccatgtatttcacttttcttaaataaaagaatcaggtaacctttctgtgacttgagtcctgattgaagagggtatgaagcagggcttgtgttggggcccttcacagaaggtgaggggcagtgatggatggagcagcaggaggagtgttgattcttggatctctcctctcttcctcccgttgtttgtatcatctccagcagggcctgtaggaaggcatctgggggatggggaagaaggaggctcacaacccaaggagaaggtgctgtggactgggttgtcagggacatgtggtggccatgtggcaggaccctggagtcctggcgccacttctcctggctgtgaggccctctgtggctgccattcctcctcccagctgcttgggggaagggaggtctaaacaggcctggggggccctccggaaccagaggggagacaaggcactatccatcccctctcagcatatcttggaggcctgagcagcagctggggcccatcttctaaagcttgactcctcctgacccgcctcctacaccccttgctgctttcacaacaaagaaagaatgtgggggtggtggcgctgggggtgggggtgcctggaacaagggttgtgctgggcctccccacagctggagacttggccataccctgacacagcccagactgcctggagatggacttgggatgaatttgtcagttagcagacttcagcctggctttcagagcccagcgtgtttctacctttgggttcagattggtctacagccaaaccagaccccagtcatgcacacttcagcccctctccgggctacacagcatcttcaggttacttggggacattaaggacaccctgctgttctgggtctgccgttaagattttgggttgctgaagagttggcggggcccgcctcttcccctgcccccacctggagaattctgggggaactgttggccagagcctccaggtatgcccagaatggaccattctccccagggtccacggaatcgcacaagtcacttaggttctcccggatccctgcagagtcggtggtgggtacagcaaatactcaggtcccctgcacttccctgagccttgctctctctattctccatccctctccagacccctccccctactgagctcctccccgcctcggcgaggagggggcgtcgagggggcggggcgccgtgcgggggccggaggggagggggcgtcgtggggcggggcttggcggcggcggcggcggcgcgcggggactcggaggtactgggcgcgcgcggctccggctcgggacgcctcgggacgcctcggggtcgggctccggctgcggctgctgctgcggcgcccgcgctccggtgcgctccgcctcctgtgcccgccgcggagcgcagtctgcgcgcccgccgtgcgccctcagctccttttcctgagcccgccgcgatgggagctgcgcggggatccccggccagaccccgccggttgcctctgctcagcgtcctgctgctgccgctgctgggcggtgagtacccgagagttgggggcacagagcttgggaagcgcgggagtcccgtgggcaaaaggctgcgcccggggcggtgggtttgggcggctggaacggccctggagtagtggagaggctcgctgggggtgcaggcttgcggcggaagggcgcaaggagcccgggtgtcgggaggctggcgaagcctccagggacgcggtcagggtacccctcccactcgcgccgcggggacgcatttccagcctccctgagtttttctggtctgagccgagagtttgctcgagaactgccgagagttgctggctctcgggcccagatggggagtttcttgtcgggggagaaaagaccatccgcacccaccgtggggagcgcgatggagaaaaaggaattccccaccccacccggcagggtcggcccaggtaagagttgctggtttggggcccgatgccggacagacctgcggcgcgcaaagcgcggagctttgttacctacgccgacccgacgttcccggcttccctcctccgagttcctgggcaaagctgagaccccagatggccctgcgggtgagggcggaagaagggaagagttaggggccgcccccatccatggcctctagctactggtctggaaccctgcgcccactccgtgccagggccgaatccggggatccgagggtcccaggctgtcgcggtgactaatgtgtgaaggccgctgccaaaatcgggcatggcctggctgcaaaggtgcggacggggtttgttctgctccttcctggatttccatcctgactgtcctcacagaggaaaggaagtatttctaagggaagaaaggcaaaaagagct

SEQ ID NO: 11034 - DNA, 6000 bp, Homo sapiens
gagacaggggtgggaatgtggagagtcttgtgtctctaatcatcagacgctggggcctgctgagattttcccatggcctactgatgagtcaaggccaggacaatagatgaggccaatgcaaggctaaaggacttagaaccatctttctaagttctcaggagtttcaggagcctgctcattgcctaaggtgatgaggtgatatggaaggagagtctttctggccatgggttagaggtcatatgacgtaagcccattttcagcagctccaggtggcatcttctgcatttctcctcacctttaaaccggcagtggtgtaacaccatccattaccactaccaccaattttaccacaatccgcacctctgtcttcattatccaccattactagcttcgtcttcactcagatcacagacatttttctcccaaactatcaccatcacctccactaggctttgaagacataatgattaacaaaagacaaggtccttgccatcagggagcttacacactgtcatcacctccttcaccatcaccatcacatcagcaacatcatcattaccattatcaccaccatcaccacatcaccaacattaccaccatcaccacatcaccaccagcatcattaccaccatcacatcaccaccaccatcactaccatcacatcaccacgatcattaccaacatcacatcaccaccaccatcattactaccatcacatcaccaccaccatcattactaccatcacatcaccaccaccatcattactaccatcacatcaccacatcaccaccaccatcactactaccatcacatcaccaccatcatcattatcaacatcacatcaccaccaccatcattactactatcacatcaccaccaccatcattattaccatcaccacatcaccaccagcatcattaccaccatcaccacatcaccaccaccatcattactaccatcaccacatcaccaccaccatcattactaccatcacatcaccaccaccattactaccatcacatcaccaccagcatcattaccaccatcacatcaccaccaccatcattactaccatcacatcaccatcatcattaccaacatcaccacatcaccaccaccatcattactaccatcaccacatcaccaccaccatcattactaccatcacatcaccaccaccatcattaccaccatcaccacaccactaccagcatcattaccaccatcacatcaccaccaccatcattatgaccatcacatcaccacgaccatcacatcaccaccaccaccattaccaccatcacatcaccatcattgccaccatcacatcaccatcgtcagcatcacatcaccaccagcaacattaccaccatcacatcaccactaccatcattaccatcacatcatcactaccatcaccagatcactgtcaccatcattaccacatctatcacataatcctcatcaccactgctaccctcatgaccacatcattactaccagcggccctagccccatcctctcatctctactccaatcacccctgtcaccatcacttccatcaccaggatcccacctcccttactattataccatccaccaccctacttaccactgcaattgattttgtcattgccaccatcaacagtgtaggaaatgactacatgggttgcagcaatggttaatggtcactgaagccccaattaagatgggtaggtcatctgaggtcactcagtggggcgggggcaaaagagtaaaaggcctaaagtgtaagaattccctattgcaagcaatctcaaattgtttattccaagaatgtatttttcctgaaccctccaataattctagtaataattccaattaaggagtttttttcttttttcttttttttttttttgagtcagagtcttactcttacactgtactcaggctggagtacagtggtgcaatctcagctcactgcaacctccacctcctgggtttaagcaattctcctgcctcagcctcccgagtagctgggattataggcacgaaccactacgcccagctaatttttgtatttttagtagagacggggtttcaccatgttggccaggctggtctcgaactcttgacctccagtgatccacccgcctttgcctcacaaagtgctgggattacaggcgtgagccaccatgcctggccaggagttattttccattgcacaaggctcctctccatccagtttggtataaatgaaggtctctaccttggcctctgagctcaggttagaattcccaggttggaggggtgggaggatggttaaaatataatcaaaaccagctcttaactggtgattcagagttgatctatccatcctctggttagactcagcatttcatacctgcctgtccagctccatcatcagccatcatggtcactgtcaccatcattcttcaatgacatcagagaagagagcttccctatgaggtagggccagggaataagatggagccagaggtaaaattaatgccaaattactctctggagaaaggggctgcagatttatttattttttatttttgagacagagttccactcctgttgcccaggctggagtgcagtcgcacgatctcggctcactacaacctccacctcccagattcaagcaattctcctgcctcagcctcctgagtagctgagattacaggcgcttgcccccatgtccagctaattttttgtatttttggtagagacagttttgccatgttggccaggctggtctcaaactcctgacctcaggtgacccacccgccttggcctcccaaagtgctgggattacaggcatgagccactgtgcctggccagggctgcagatttagatttgagtttcctaggagccaatgtcaggagggagaggtaaccactgcatgattatcagctatttctgatattaaagcaggagagaaattcccattgtgaaaactaagtcgtcacagccaatggctgaggttggcctcgttagctgtcttctctggctgtgaaaaaacttcagagtattaccctgtggagccactggatgggacatggagatggggtgaccacaaaacttacctctcaggagctgcaaagtgttatggtattttatacattttatattaataatatcattacatagtattaaatgagggaggaaccaacagtgtgaggtcacacgtgagtgaggatgagaagggtggaggtgtctccccttgagctggtcttcagggaggtttgggcatccacttggtgaatgaggaggaagccacattgtccaagggaccacactagggtgtgacatgccaatgagctggtgtgtgcagagaactagagggaagggagcatgttggagaggggtcaggggtggactgggggagaggatctagtcctagggaagtcataagggccaagctaaggagctagactttccccctcaggcagcagaagctggtgaagggttttaaacagggatgtgaccctcttagatttgtgtttaaatgttcactgtggccagtgtatggagaatgggttgaaaggggtgagactggagacagggagggttagcttattttaaccctcctgtaagctccctaagggtagggaccgtgtctgaggcatctatgtaccctctagaatggcgaggatgcactagagactcaaacatttcttctcattgtcaccccctgtcactgccaccaccattagctgcctcttgcttcactccatggctgtcagcacccccattaacacacgccatgccatcgatttagctcctttcccagcgctttctcagggatcccagcctggagcagactgggacatcaccagctcagcagcttaggtcaaaagtgagattcctggtctggagtcaggggacctggtcttttcttcagctctgctgctgagtcattgtgtgaccccagcaggtcccctccctgtctttagttttctgacctgttcaaagtaggagctggattaaaccagtgggtctgccagctaagtgtttggagaatcagatgagaataaaccagacattgctggtttctgctgtacttttgctgcagggaccatgattgagaattgagtgggagggtcagattgaacatttgagtcttaggtattgcatgtacctttgacaagaccttggtaactccccctcccccattccctacccctccaaaaggtaatcttaggcattgcaggtaccttggcaacatgtcccccgccattccctatccctccaaaaggtaatttaggaagctgctggaaataggggaatgggacaggcagttggaaccatatgtatggggagagtccctgagtgaagtgggaatgggatgagcctgggatcctcagagacatcaagttgcccggtgtgatcacaggtgtgtcttaggccagggcatcagctcccagcaggggagagggatgcgaggaggcctcatggctcagcagaaagaaacctggttaggatccagctttcagtcctgaatcctgggctgtcggccaggccatggctgtagctgcaaataggcaaggctgacctaaggtctcacaggacaaagggcaccctgggagagctggccccaggccccaggggcctcctcttcttagggatcctgggagctctgctgaccaaggggctaggggctcacctcctatgccatcacccagctacctcatcatggtagccttggtccctgaacactaatgggtaagccccagagccacgagccagtgacctctgaatggatggcttccccttcccccaggcaccaggcaagacaggtagaggtccctggagacctgatggctggggagggcccagtcctgggccagcccctgagggctggattctggctgcaggctctccagtccatccactcccacctccagagtccaagggtctatgtggtgggcagtttgagctggctggatactagagggaggctgcacctgaagcatttggtgggtgagcagcatgggctttgaggagctgctggagcaggtgggcggctttgggcccttccaactgcggaatgtggcactgctggccctgccccgagtgctgctaccactgcacttcctcctgcccatcttcctggctgccgtgcctgcccaccgatgtgccctgccgggtgcccctgccaacttcagccatcaggatgtgtggctggaggcccatcttccccgggagcctgatggcacgctcagctcctgcctccgctttgcctatccccaggctctccccaacaccacgttgggggaagaaaggcagagccgtggggagctggaggatgaacctgccacagtgccctgctctcagggctgggagtacgaccactcagaattctcctctaccattgcaactgaggtacttaagcccagaagttgagagacatgtgagagggatgggcctgccattgccttgggtggttactgtgtaggcattagatgtattactttacctcttaaagtctcagtttaccaatctgtagatgggggctatgaatataaggcacttttagttcatggcttgtagtaacaggatcctacacaagaactgttatcatcatcattaattgggaggtgattaaggcagggaagggctaaagtggcttcagggagttgagacaaagagctgagaaggcaatttctgcagcaagaggtggagaaacaatagaggccttcttttctcccttcctcttttccagtcccaggtcggtatttacataatccatctggaggtggaatgtcggtggaggcagtctccctgggaggcagcaggtcgaggccttccttgggaagaagctgaggctgcaggactggggagggacaaagtttcctattccccaagctggcgtgaatcgttgggaggtttattatctggcatggaggtaccagaatggcagagttcgcctcagaaggctccagggtctggagaggaggagctggtgcctgctggagaggggctgatgttca

SEQ ID NO: 11035 - DNA, 6000 bp, Homo sapiens
cctggatgaaacaacagattttgaaagtagatgaaacagctttctatcagaagaagatgccatctaagactttcatagctagagaggaaaagtcaatgcctagcttcaaagcttcaaaggacaggctgactctcttgttaggtgttaatgcaattggtgactttaagttgaaattaatgctcatttactattctgaaaatcctagggctcttaagaattatgttaaagctattttttttttttttggagatggtgtcttgctctgtcactcaggctgcagtgcagtagcataatcttggctcactgcaacctccacctcccgggttcaagcaattctcctgcctcagcctcccgagtagctgggattacaggcacgcaccaccacacccagctaatttttgtatttttagtagagacagggtttcgccatgttggccaggctgatctcaaattcctgatctcaagtgatctgcctgcctcggcctcccgaaatggtgggatttcaggcgtgagccaccacacacagccaaatctactttatctgtgccttataaatggaacaacaaagcctggatgacagcacatctgtttataacatggtctattgaatattttaagcccactttggaggactacttctcagaaaaaaagattcctttcaaaatgttaccgtttattgacaatgcatccagtcattcaggagctctgatggagatgtataaggagatgactgttgtttttatgcctgttaacacaacattcagactgggcatggtggctcatgcctgtaatcccagcactttgagaagccaagacggcagatcacttgaggtcaagagttctagaccagcctggccaaatggtgaaacccgtctctactaaaaatacaaaaattagccaggtgtggtggcccacacctgtaatcccagctacttgggaggctgaggcaggagaatcacttgaacctgggaggcagaggttgccgtgagccaagatcacgccactgcactctagccagggcagcagagtgagactccatctcaaaaacaaacaaaaaaagaaacgaaaaaaactacaacatccattctgcagtccacggatcaaggagtaatttcaactttagagtattttattattattattatttatttattttgagatgggagtcttgctctgtcacccaggctggagtgcagtggcatggtctcagctccctgaaacctctgcttcccaggttcaagcaattctcctgcctcagcctcccaagtagctgggattaaaggtacacaccatcatgcctggctaagttttgtagtttcagtagagctgggttttccccatatcggcaaggctggtcttgaactcctgacctcaggtgatctgcctgccttggcctcccaaagtgctaggattacaggcgtgagccactgcgcctggcctcaagtatcattttagagacagggtctcactctgttgcccaggctagagtacagtggcccaatcatagttcactgcaaccttaaactcttgggctcaacccatcctcccacctcagcctcctgagtagcagtgactacaggtgggcactgccatgcccggctaattttttatttttatttttgtagagatgaggtcttgctatgttgcccaggctggtctcaaacttctggccacaagcaatcctctcaccttggcctcccaaagtgctagcattagaagtgtgagccactgtgcttggcccaagtattatttaggaaatacattccataaggctatagctgtcatagacagtgattcctctgatggatctggacaaagtaaatttaaaaccctctggaaaacattcaccacactagatgccattaggaatatctgtgagccaggcatgttggctcatgtctgcaattccagcactttgggaggctgaggcaggaggatggcttgaggccaggagtttgagaccagcttaagcaacatagtgagaccctgcctccattaaaaaaaaaagcgctctctctcccccctccccctccctctccctctccccacggtctccctctccctctccccacggtctccctctccctctctttccacagtctccctctgatgccgagcagaagctggactgtactgccgctatctcggctcactgcaacctccctgcctgattctcctgcctcagcctgccgagtgcctgggattgcaggcgcgcgccgccacgcctgactggttttcatattttttttggtggagacggggtttcgctgtgttggccgggctggtctccagctcctaaccgtgagttatctgccagcctcggcctcccgaggtaccgggaatgcagacggagtctcattcactcagtgctcaatgttgcccaggctggagtgcagtggcgtgatctcggctggctacaacctccacctcccagccgcctgccttggcctcccaaagtgccgagattgcagcctctgcctggccgccatcccgtctaggaagtgaggagcgtctctgcccggccgcccatcgtctgagatgtggggagcgcctctgccccgccgccccgtctgggagatgaggagcgtctctgcccggccgccccgtctgagaagtgaggagcccctccgcccagcagccgccccgtctgagaagtgaggagcccctccgcccggcagctgccctgtctgggaagtgaggagcgtctccgcctggcagctgccccgtccgggaggtggggggcagcccccgcccggctagctgccccgtccaggaggtgggggggggcgcctccgcccggccagctgccctgtcctggaggtggggggcgcctctgtccggccgccccttctgggaagtgatgagcccctctgcccggccgccaccccatctgggaggtgtacccaacagctcattgagaacgggccatgatgacgatggtggttttgtcgaatagaaaagggggaaatgtggggaaaagatagagaaatcagattgttgctgtgtctgtgtagaaagaagtagacataggagactccattttgttctgtactaagaaaaattcttctgccttggaatgctgttaatatatgaccttacccccaaccccctgctctctgaaacatgtgctgtgtccgctgagggttaaatggattaagggcggtgcaagtgctttgttaaacagatgcttgatggcagcatgctcgttaagagtcatcaccactccctaatctcaagtacccagggacacaaacactgcggaaggccgcagggtcctctgcctaggaaaaccagagacctttgttcacttgtttatctgctgaccttccctccactattgtcttatgaccctgccaaatccccttctgcgagaaacacccaagaatgatcaataaaaataaataaataaataaataaaaaactgtgattcatgggattcatgggaggaggacaacgtatatcaacattaacagaagtttggaagaagctgattccaaccttcacggatggaccttcaagacatcagtggaggaagtaactgcagatgtgatggaaacagcaagtgaattagaattagaagtggagcctggccaggtgcagtggctcacacctataatcccagcactttgggaggccaaggcaagcgcatcacctgaggccaggagttcaagaccagcctgggccaggtagcaagactctgttaattaattactaaagattgtgaaatgcaaacctacatctcttagtttttaaaaataggaaaattaattcttgacgttgagggatatggggcttcttactgagattaagtgggataaccataattgtcatttgtttagcttttcttcttcaagcactgtacacacctatgtaaaggcggataccaacaccatgcctgacaaacataataaaataaagatgcagaagtaacctgcccaacatccctctgctaaaagcattcaaacccaggtccgtataattataaaggttatgttcttcccactgcttccttaaaagatttattggaggactaccctaggcaaagcacttgccctaagcactctaaattaattattcaactctctcaacagtactttagtattggtattgtccctgttgtacaaataaagaagttgaggctcggccggggtggtggctcacgcctgtaatcccggctcttcggaaggccaaggcggacggatcacgaggtcaggagatcgagaccatccttgccaacatggtgaaaccccgtctctactaaaaatacgaacaaaaaaattggctgggcgtggttgcgcgcgcctgtagtcccagctactcgggaggctgaggcaggagaatcgctttaacccgggaggcggaggttgcagtgaaccgagattgtgccactgcactccagcctggtgacagagcgagactccgtcccccccccaaaaaaaagttgaggctcaaaaaagttaggtaacttgtccaaggtcatgcagccctagaataataagggaaaacagtgtgtcccaaaatggcattatttgtccgtggggcaggtatgtttgaatttccatccatccatctatctatctgagactggggtctcgctatgctgcttggactgttctcgaactcctgggctcaggccatcctcctgggatctaccggcgcgcagagactacgggcgcgcagggactaccgaggcgcgcaaccgtgcccggctccccacctcttcaagaaatggagattgcaatgcttgtgccaactagtaagcttacacagttgtgagcgaatactccacgtgagaggttataaatgacgttgcactaagggagggatggatccttaacgcaagtcaggccacaaaagcgtaccaaaacgcaactgtgcgtctgcaccagcgcgcctgcgtgcaaaggccagccgaagcagagagcagtgcacatgcgtgcagctaccagcatatgggcgtggcgaatagcgccggctaggtcttccaacctctaggtggggtgccagccggggcgggcccagcaccccggccgggcagtactttttttttttttgcatacaccagttctcaggatatcggaatccggtgcacagcagcttcttcaggtttgaggttccggatgcctgggggcggagaaacgggaggggaaaaacagatggcaaggtgggtgaccagcgtccagaaatccactggggaaacctcctcccgtttttacccttggtaccgcgagaatgggcggggtctggcttcggggcggaagcgacgggcggtcccggttccagggcggggctggagacagggagacccggctgggaagtgcaggcaaagccggctgttaccctgcacagccgtcaccctcaactttcccttcaggtgaggcgtccatggaacgacttctggcccagctgtgcggcagcagcgcagcgtggccgctcccgctgtgggagggggacaccacaggccactgcttcacccagctggtgctcagcgccctgccccacgcgctcctcgccgtgctcagtgcctgttacttgggcaccccgaggtgggtagagacgggcgcaaggcatctgtccatgtgtgcctgcagatctcacccgcggcctacatcttccggcagtgtcaccagaatagcgaggtctctggagtagggcagaagtagaataaaatctaagcattgctacttagcagcaatgtggctgttcttgggcaagtacctgccttctctgagtctcattgttgggaggtttaaatgagataatgaatttaagcatatagtgcagcgcctggcatgtttttaaaggtccgatgagtatcagaaatcatcagaattgtccattttcagctacccggactcagctgtcatgaattggaggcagaattgggggaacaacgtttttagccaaaagcgatgatgtgtttaagttgtaggctcagtttctcaccactgcaacccatgaaaccttagtgtttccagattaagaaaagcatacctaggc

SEQ ID NO: 11036 - DNA, 6000 bp, Homo sapiens
tttcctcctccctagtgggaggcccctcaggggtcaaataagagcctcagaagagtcaacatgcttaaggaaacacagttagaaagtgcagtctgggcagggcgcggtggctcacgcctgtaatctcagcactttgggaggcagaggcaggaggatcacctgaggtcgggagaccagcctgaccaacatggagaaaccccgtctctactaaaaatacaaaattagccgggcgtggtggcgtatgcctgtaatcccagctcctacggaggctgaggcaggagaatcgcttgaatccgggaggcggaggttgcagtgagccgagatcgcgccattgctctccagcctggacaacaagagcgaaactccgtcttaaaaaaaaaaaaaaaaagagttagacacatttgcatcccagcctccggataatttgcttattgttcccaggcaataatcctctctctctgggtgactcttgggctctatctaggttcagacgaggacagtgaggagtacaggatccaattgggattccagtcccctccccacacccgtcagaaggcttggttgggaaagaagtgagccccaagctatccgccccacccccagccctgcggggctttctgcctgccacacgccgtccctgctcactaccccatcggtttccttcgggagtcttcaaagccagtgcacgtgctcccaggtctcagggaggcgacccagggggaggggcagagagaagggggtccgagcccttgggcccctaaccccgtccctttccggagcctcgggtgcccaaaggcgccggccgccagtcccaggcccgaagggcccctcccactgagtcggctctggtctccccgcccctgagccgcgaggactggacgcagctggctgcggagctctgggcgggcgctggggtcgcctgttgcagcctctcttccgcccggcggcccacaccggtcaggcccggcgcgggctgcgctctccagctgtggctatggccccagccccgagatgaggagggagagaactaggggcccgcaggcctgggaatttccgtcccccaccaagtccggatgctcactccaaagtctcagcaggtgcgcggggcggggccggggggcctggcggggcggggtggggtgggggcgaggtctgcgccgttctcacgctgccgggcgggacagggggccagtagggggacccgctgggctacagtgtctcaggggagtcagaatctttggtttctggatgcggggccacttttctgggccttcgaaggccattattagatgactgcctccccaaactccccagccacttacagatgtcccaggaacatagggtagggggaagaggtctggaaaattagcctagaagaccagcccagacctaactgaacaaagaatttagtcttctcgaaccccgagccagtacccacactgtgaacacacctgtctttacttaaaaaatcttgatgttttattcatcatggagtctttaaaaaaaaacaaaaaccgagtctcgctctgttgttcaggctggagggcagtggtgcgatcacagcctactgcagcctcgacctcatggactcaagccatcctcccacctcagcctcccaaaatgccaggaccacaggcatgcgtcaacatgctcagctaatttttttttttttttttttttaagagacagagtctccctgtgttgaccaggctggtcttgaactcctaagctcaagtgattcttctaccttggcctcccaaagtgctgggatgacagatgtgagccactgcacttggcatcatggagtcttgatttgtagacattgcattaaaacttattttggtaagggctgggtgtggtggctcacgcctgtcatcccagtgctttgggaggccaaggcgggcggatcacaaggtcaggagttcgagaccagcctgaccaacgtggtgaaaccccgtctctactaaaaaaaaaaaaaaaaatacaaaaattagctgggcgtggtggcacgtgcccgtaatcccagctactcaggaggctaaggcaggagactcgcttgaacccaggaggtggaggttgcagtgagccaagatcacgccactgcactccagcctgggtgacagagtgagactccatcttaaagaaaagaaaaaaaaaaacaaacttattttgattacattaaaatgtatctttgtttgtttgtttgtgttttcagacaaggtcttgctctgttgcccaggctggagtgcaatggcaggatgatggctcactgaagccttgtcctcccgggctctagtgaacctccggcctcagcctctggagtacctggaaccacaggctcgagccaccatgcctggctaatttattttaattttttttgtagagatggggtctcactgtgttgcccaggctagtcttgaattcctgggctcaagtgatcctcccacctcggcctccaaaagtgctgagatttcaggcatgagccaccactcctggcctaaaatttatcttgattcatgagttttttggctcccccttacattttacacccctggcaagtgcctcactggcctctccctagtcccagccctgtcacaaggccatggagatacagtcacaaacacaactgagaacacagacagtcatgagacatgtgctggttaccaacccccaggccaagcaaacacacttccagcaaacacacatgacttgttggtgacagctgagaggacacatgcctggggagagagaggactgtgtgtgaggtggtgaggcatgcatggggcctgccaagttggggagggagtctgggccaagccacggtcccatatagggtggtgaataaggtgtagagtagaggtgcagcaggaccaacccttcccaccccaccccttcgacagggacctgagggagctcagggagggagagaagccagaagaccaggcagagactgaagagagctggcaaggcctggctagaaaaactccaggcaaggcctgtgtaagttggggctcccaggctgtccagcagggggccctggcacccagcaacctctgcttgggaggtggctacagaggggtgtgggtgttggctaggggcccagcaggatggatgccagacggacttctctccaacaataacagccctggctgttgccatccaccgagctggcagggccccagtttgggtggggagaggaaccagcctttcccagtctggcctgagaccctcaccacttccctccagttttcttccacctccagccccctctgtacacaactgcagccactggccaccagccttgccatgcctggcagatcttctgaccactagccctgccacccccacagacccagagaccaggaaaggagggtggggagcgaggaagggggccaaggcagagggcagaggagggctaggagaggaagagagagagactggacaaacatgagggcaggaattagggggttgtggacagacatgaagccactctcaagtcatggggctgtgcctggaaaaataccacctaaacccatcttcctgccctctggttagggctggcggggatgtgggggatgggggtggggtgggggagggttgggaaggaatatgtgtgtcatctctgtggggcatggaaacagaaggctggggacacccattctggagtagcttggggagagccactgaccctaattagaaaagccacctctctccttagggccctgtctgtttctctggggacagggtaggactaccttatccctatgatgtgaggtactgccagttgttaatcagtgtctgtggcttctctaggggacaagcccttcgggtcagtgggcatggggtgggcagcgtgggttggattttctcctcaggacctttccagccttaggatcatcctctagcactgagtactgctggaagggcagggagtgccccccaccccaccccatttattgcccgaccaaagagagggcctccctccccctcccttggagggacttgctggaccacccctcagcacgcccacaccttcctccttagctagtgaaagacatactcagcaaggcttccgcctgtcaggatggctgggacaataggattcactgaggatataaggctgttcctagctttttctcttcccattcccacctgtgcctcagttttccaaagtgctggatttagaaagggtgaattatgagggagctggagggctttgccccacccccctccgcgcgcacacgcaagcacaggcagaggcacataccccctccaagtcaaagttgtgagtggggtggtgtttgcgcgtctgtggctgggactggatgtgtcagggatgggaaaacccatcatgctggtcacagaaaatgcgcggtggggacagaagcagttttgaaggaaaagaagaggagggggactgaaagaaagaagggggcgctgaaagggagggcgctgggaggaaaaaggtgcagtgtggaggaagcgcggcgtgggcagggcttgggaagggataacggaatatctgaggtggagtgggccgtggagcgtcggggccggtctgagcagcgggtgtgtaaatggaacagtcccgagatgaattttatgggagtctgcgcaggtccttaatgtgtggctgtaccctccagccccatgtaccccacacgatggacagacagccttggtgtggcagggcccaaagaggtcctatctaccgcaataacacgaccaggcggccctgggggcgcaggggctcggggtgggagcggcggagcgcgcggagtcgccgcggggtggcaggggtgggccgggggcggggccgcgggcgtcggggaggtggcagtgggcgcagggcggggcgagctcagcggagggcgggtttgaatgtgccccggcgggagagggaagctgcagcgagagcgcgcggatctcagcgcgggagcagtgcttctgcggcaggtgctgcccggggccggggactggggactggggactgccggggcggaagacgccgctgcccgcctgccacggagggcagggagggcgggcctgacggctccgcagcccggagaagggacgccgggtggggccccagtgcggagcgtgcggagccgcgcagcacgtggcgcgcacgggccagggagcctgaggaccctgcggggaccgggacccaagctgggcggggcggcctggctcccgggcctaaaacaggctgcggtcacgttgacctccgcaaggggcaggcgagtggacgggtgatccccatcgatctggtcggtatcagggaggggccgtgccgctgactgcgctggcggaggggtatggggatggggatggggatggaggctcgcgagcggaggtgcaggctcgcgagcggaggtgcggggctgtctctttaaccccggtcttttactggctaaactcgtatccctggcgtctccttcctgcgcacgtcttcatttactgatttactgtgagggtatatgagagggtgaagacaaacagtcctcggctttgcttaccaggagagagcagtcgtaggtcaaggctggctccaaccctgccctcacacctctaggggtctctctgcagccctgtggtagtccctttgcctactcctctcggtggcctccagaccctccaactttcctcctgcttgtgtaagctccccatgccaggatgtgtgtgatggggcggggctgagctgcctgacactcaagtcaggctgggaatgatcttggtctccacctcatttttccctttagttgaatcagagttccccccacctcccagtctacagggctaactgagaagcagcttttatacctctctccattccaaaaggagcttgaacatttaatatggattctagctcctccactcaccagctctgtgacttcaggcaagtgactcaacccctctgaacctcagctggccccatctattcagtgctagtactagcttatgggtggttgtgaagaaaagacaagagatctgcaggta

SEQ ID NO: 11037 - DNA, 6000 bp, Homo sapiens
cttaacccccttctcagaagaaattgtccaggttttagcactgaaagtcttacatcttgggaaactgaaccgtcccagttttaatgctaaaagtccctcatcctgggaaatcccttagctgtggttttagcactgacagtcctgcttcctaggaaactccttacttctggttttagccctgaaagtccccaaaccccttagtccttggcaaatctggatgattgatccacttacccttctgttggaacagatcctagagcagaaggagcacaggctgggctgccatagcatggacccccaaaaagccactgtcatgaagaaatatcctgtgaagaaaatctttgcagggcacctgaactcccaaagccactgaggagaaggtaagggagtactttggtgagtttggggaggtgaatttctccccaggatatggtttatgctccccaccagccaccagtggatgcttttttctgttttccttggctggtggagttgtcagtggagctgctctcacctcctttcttgcctttggagggccgccttttctgagttccctttagggcctgagccaggggaaggcattggccctgagctttgcctgtgtttccagatggaggccattgaactttcagtggatccaaagtctaacaaaagacaatgtcttgttttcgtcaccccccaaagaagaggaacctgtgagaaatattctggagaaatttaacaccatcagtggaagcaaggtgaggagtctctacctccatgtgcctcccctcctgcctctggagaggtagccctttggttaatggcaacccaatagggtaaccaaccatcccattttagcattgagagcattgtgtcctgggagacccttccctggaatgtaaataatcctggttttagcaacaaagtgtggaaggttggaggaaatgcacaaaacccgtaagttttagagggtctgaaagcaacattgtctatcaaatggatacggcacagattattcatctttacttgttgtcacccatttgaccactgatactggcaaccataatttgtagttcagaatggtcatccatccatcgttgcatcattcaaagtgatgtggcttaagtgtatataatgattattaatagttcatcttcgactttgcctgtggattaattggtgtgctttgtaacaagatagtgctagtttaattttttaacattgtgaatattgtgaccatgttttctaagaggtcagataatgagaatggttataataccaatgcaaccatgaccccatcactgaagaagaaggctaaacgactatgtaattttgatgatggatggaaggacacatactactgaactaggaaggtaaataaccaaaacagagcatactacataatatacagaaaaaaatttgagattggacatggtggagaaggggatgtgcaagcacatatggagggcaaatctcacaagtaagatgggacaggtgaatgcttctaaaccaatcaaaaatacctttgtttccccaaaagacaccaatgctcagtcaaaaatagcagctgctgaattagcatgggcataccaggcaaataagcctgcattgtcatagcgttcccttgattgctctatgaaactgagtaaagtttcatttcctgattcaagaattgcagctaaaatatcctctggacaaagaagaagggaaattttttgataacagatgtgttggctccttacagtataaagccaatttctgtcatatctcaccaacaatcctggtttctacagtacatcaattttaagtaatatgccaaatcatggcagcaaaaatatgttccctctagctgttaggtactttgacttgaaaacaggagtttcaaatcatcttcttcatttctgtgaggattttaatgaaactgctgaaatcataaaatattgttgatattttgtctaaatacaaactagacttagctcatctatctgtgtattcgtcagacagtatagatgtaaaattttggcaaattgcattcagtctacaaacttcttaccaaagaaaatgaaaagatcttatccattcaatgccttgtacatcttatatacaacactgctaaaaagggatgtgagttgcttaaatgtgacattgagactttcataatgaaagcttttggttacttttcaatttcctcaaaaagtgcaaaagcacttatggagatttttgacttcacagaaatggaaggtaacctctttagacgtgtgcctgcaagatggctgtcattgtaagtgagccatagaaacgatgctaaaatgttggcctgccataagatcatattttcaaaggacaagaataatgtcctttgacattgtttgaaatctgaaaggagaaaaaaatcaagaatctgaagtgggccttaaaaaaatcagtaagtcccttgtgactctgatttttatgaatctgtctctcaaaagccagggtgcccccagaagaactgagacaaactgagtttctgaacatttgaaaatgaggagcaggctcaggatccacagggtgtaaccatcccgtgaggccctgcctgagcagccagccagtcagtgaggctcttcaccttacttccatttctctgattccatctatgtacaacttacgaaaacttgcattattatagactgggagttcttaaattggaatctgtgaatctaaaggggccagaggatagaaatcaggaaatctgaaaacttcgatggaaaaaagtttttatttatttccatcaggaaaataggcaacaaaccacagcagtattagtacctgtgtctctgtcatcactaggaatcacagatatccacgttacagatatcttaaaatatttatgtacagcaccactctgaaattatggtaataattagatccaccccctaggtcttgtaatctttaatatgttaataaagaagcacatctattatgtgacagatttaaatgtttaagaatttgatttcaatgaaattgcatttcaataaaattggcttcctttgcaatcctgtgtattttattttgtgcatttctccagactgccaaagaggttggtgacacattgaaagttaagagtctctgctgtggatcatgcatagaaagctttacaaaacagttgaggggaataggctttcctgcatccttaccttgggctgcagcctttccattagctggagaaggcagcagctggtgcctatgagttgagagggcagtggtccctttgcctaagaaccatcctgttcccacatattcaagggtatggaattcccataatattcaaagagtttttctttagttttaggtgatacgccttgagtaggaatatcatgaggctgtttccagcttcgagtatgttggtgatagggtgtaagggatctcagagcatctagtcttgtccatatcttaaatccaggcactgaggtccagaggggagttatttacccaggtcacatcagatgaagataatgaagtattccaagaggattttagttttattccaaatagggtaagtgttctgagagtgtgaggagagaaggtgaggaggctggggtaaggatgggcatagaaggggatggaaaggagggctgagagaactcagaaccaaatttcaggctatcactttctccacgccacattccagtgccttgccatcaactcttctgtgaatcttcaggaattttattaattccccaggaccaacttagactttcataagttagatgtagttatattacttccctgaagcacttttatgcacaaagaatagatgtagcaaacaaacttcacaagatttaatttttgagtttccttttttattctgaggaattccgctgtaattctcagtgacacagaacctctagagctacttcactatgacaaccttcttcaaatctccaaagggctgttacataaggaagagggtcggagttctgtattcaatcaagaaggcagaagattgagatgataagttgctacagggaggcataatttaaagtcaatttaaactgtaatcccagcactttgggaggcagaggcgggaggattgctttgagctcaggaattcaagaccatcctgggcaacacagtgaaaccccgtctctacaaaaaaaaaatagtcgggtgaggtggcacacacctgtaatcccagctacttgggaggttgaggctggagaatcgcttgaacccaggaggcaggaggcagaggttgcagtgagacgggatggtgccactgcactccagcctgggcgaccgactgagatcctgtatttaaaaaaaaaataaggtcagtttaagtttcgttcctgggattgagcggattgccttgcattaggcaaggttttaagtgctttccaactctggaattctatacctttcccagtagatatctaaacccagcaaatcctgggcctgaagtttaaaactaggatcctcgtctcccaaccacatctagatgatcccatagtgtaatgaagggtgcttgggctttgacaccaggcaaacttggattttgacctgggacaactaagtcacttgacctcactgaaccttagctccctccactgacagtggggacagtctgctggagggtgtgtagaagacctcgggttgccttttggaggttctggaaatgtcccttgaaagatgaatggagttaatttaaaaatcttcgccttctgtaattttggcttcttgcaaacacgcttcctgccagtcctgctccgtcaggcgggaggcagcaaaccccagccctggctccaggacagggccgaaggcaggatagacggagcaacgggtccggctgccgccgggatgttgcagcacagggcctcctggctgcctggcctacaggccgcccggattcagccggagggcatggaccgggtggagtcctgcaaggcgagaagggacacagcgcatgcgcgcggcagggagggcgtttccaggagggagcggcctttgctcagcgcgagacggctgggcgccgagtgggacagcgctggtgcggagactgcttccggactccaggtaccgcgcttggcggcagctggccccagacttctgtcttttcagctgcagtgaaggctcggggctgcaggtgagctgtgcatcccgcaatggagaccttcctgctctgaattttcttacaaaactgcagaaatataaggggcgttgcttagcgggcatcccctcccccgcgccaaacctgtacagcaaacgatgatgcagaggaccttgaggggattttgcagggcatcggtcttacctccgcggtatcatttttctcctcctcccgagtttctgccttctggtatccctaaatatcccacctatcctgcctcctaccttcctggatctggggtggtggggtgggctcatggaccattgcaaaatgcttggcaggattttaaccttctcagcaccacccagaccccactcgaaaatgtgccttttgtgccctccaagagctcaagggtaggtaattgttatatctttagcatgtgaaaatgctttttatgtaacagttcaccgaaaatctcttaattctccgaattttggaggatttggggcgggcagcgaggctgtcccctgtcaccttgttttgtacctggtatggtaaatcgttttgctgcattgcatccaagatgcgttttagtccttccaaggcttgagcatcacatttgtgatgagagcgtgtgatgtgctgtgcacatcctctcccaccttatcccttccatgttaacacagcctctggctttaatgtgtgcttctggcctggccacatggctccgtcatggaataggtgattcttttgtctgaatattctctgtgagaacagaatcttcttgcaagcattgggagtagatttattttgcctctttagaacaacagtcagttcgctaaggagattaaggggctacctgtttcctggcaataaagctgtattgggtaggtcagttacagaatgtcttcaggcagaagctgttcctt

SEQ ID NO: 11038 - DNA, 6000 bp, Homo sapiens
taaacaaataggcgagggtgcaattgtcaatccctctcactatagagctcctattcttgtctcaaaacatagactatgtagatgtggatagcagagattgctcaaccaaggttgggggatgggcatatttatatgccaactcctttaggcattattcaaaggttgcttatgaaagctctgtgacatcagtcaaggcaacgatttttttgatatgaccccaaaagcacaggcagcaaaagcaaaaacaggcaagtgggattatataaactaaaaatcttctgcaacagcaaagaaaacaatcagcagtgtgacaagacaaccaatggattgggcaaacatatttacaaaccacacatctgataaggggttcaaatccaaatatatcaggaactcaaaacaattcgatagcaagaaaacagtcctattaagaaataggcaaaggacctggatcaacatttctcaaaagaagacactcaaatggccaacagatacatgaaaaaaatgtttaatatcactaatcatcaggataatgcaaattaacatcagaatgagatatcaccttacatgtattagaatggttattatcaaagaaacaaaagataacaagttttggcaagaatgtggagaaaagaggatgcctacacattattagtaggaatgtaaagtagttcagccattatggaaaacagcatggaagttcctcaaaaagttaaaaatagaactaacatatgatctagcagttctactacttgctatatttacaaaggatatgaaatcaatatattgaagagatatttgcactcccacattcattgcagtaacatagccaaaatgtggaatcgacttaagtgtttgttggtgaatgaatggataaagataatgtggtatatatacaaaatttagccttaaaaataaggaaatgttgtcattggtgacaacatgaatgaacctaaagaacatgataaaaaataaaataagccagacccataaagacaaacactaaatgatctcaaaaagttgaatctataaaagttgaactggtagaagcagagagtagaatggaggttaccagaggctgggggataagggaattggggaaatgttgatcaagggttgcaaaatttcagttaggaggagtaagtttcagagatctattgtaaattatggcaactatagataataataatatacagttggccctctgtagctgtgggttttgcgttgatggattcaaccaatctcaaattgaaaatatttttaagagctacaaacgatagcaataaaacagtaaaaaatttatacaaattaaaaaatacagtgtaacagttatttatgtaacatttacattgtaataggtattgtaagtaatttagagatgatttaaattatacaagaggatatacagcaggttatatgcagatattttgctatttaacataagagacttgagtacctgctgatttgggtatctgtagggggtcctggaaccaatcctccatggataacgagagacaactgtatacttgaaaattgttagaagagtaaattttagtgttctcaccaaaaaaaaagataagcatgtgccctactgtatattttaatcagcttgatttagcctttccacaatgtacacatacaaactacaaagcatcaaattgtatgccataaattatgcaattttaattttcaattaaaaataaaatcaagtttgattctgggttgggggagggttttaaatcctcaacatatctggcttgttattctgggagtaggggagggagaaggaggagtgggctttggccaataaatacttcacatagctgtagttctaactagcttgtactaaagtggtaagaatgttgagaatatgagtggggtgacaatggtgtctgctactgtcctgctaatggactgaaggaactggctgagagggaggttgatgatgtgtgggacctaaggggtaggggaagaaagagataaatggtgtcagactgaaaatcatagatggaagaattatctggaaaccctggtaccttatcttcagagtctggaaggaagaaaggaagatggttgcaagtgtagataggtttatggtttttatgacaggaaggtgtgggattaacatttgctgtttttgttttcttagtaacctgtgggagagggtcatctctagaaaatgagagagtgagttaggaaggcaaagagctttgtagtagtcactaagggaaagaagagacaaattaaagaaatatgagcagcatttaagagctctgctaagataaataacccaaaatttatggtgtcaccaattttatggtctagtagatcatctccagcagccctcagtagagaaggtagaggggaaaaatgcaaattgcaggatttatttgtttattgaataaatatttattgagcatctactatgtgttaggcactgtcttaggagcttgagataaaaccaagacagaatagacaaaattatctgatcttgtagatcttacattttggaggggaaatgcagaaaatacagccaatgaataaaattgtagtatactgtgataagtacagagaaagcgagagaggatgctgagacggaagacggtttgtcattttggacagggtgtgtgggaaagacctctctgagaggccgaaagagatacagctattcggttatctgggaaaacatgattcaggcagaggaaagagcaagtgcaaaggcgctaagacggaagtgtccgtggtatgtttgaggaatgggcaagaaacccagtgtaaggacgggaccaatgtgtgcaaggtgtaaaatgatataaattaagttcagagagagaaagttggaggtccaccttggatatgatcttgtggcccatagctgttaaactgattcatgttggaagtctgagggaatatgaggtatgaggactagaggtgggaatgttgagaatgtcagtgaaagtcaatttcaaatgatcattgagaagggaaggaagtgaatccaaaagtgggcaggtaaattgggagcattgtgaagaatgggaagagaaccaagaaagaatgaaagcatagaaagcaagggaggaagagtttctaggtagtgggtatgcttattaatgaaaattaacatttatttagcatgtgtgatgtgctaagtactttgtgttattatcgcatttaaatttcccacccatctgatgtagtaataaatattaatatccaaatgtgcagatgagcaaattgaagcatagagtaagccacatacccaaagacatgctgctagtcagtggcagaactaggatatgaattccattagtctaacttttatgctcccttcctctcttttccctgtagttttgctgaggtataattgacaaataaaaattgtatatatttaaaatgtacaaattgatgttttgatatgcatatacattgtaaaataatcaccccaatctagctcatgggcatctccatcacctcacatagtttccattttcttctttctctctctcttttccctccttccttctctctttcatcctttttttctttctttttttggtgagcacacttaacatctactctctttgaatgctgcataagacacctgtatgacaaggataaatgcagatccatgggggagtggctggtaggaggtcattggtgaaagcaggtgggaatggaggcagtactttgcagtaatttagtgattcagtagatggcaaggaagtggaggcagcaggtgttggattgaagagacaggggcattatggatagtgacatcaagattatgtagactttttttttttttttaaaaaaagagagactcacattggtttaaagcctgagaggaaggtgccagaagaaaacgacacaatgaagacaaaagtgtgagttgaataaaataaacagcaaggtcaaggaacaagtttgtagggttggagttatgaaatagtctgggaaaggaataccccatttcatagacaaataactgaggaccagagaagtaaatggtgaacccaaggttatagaaccaattaaacagtagctcagggaccagagtccgggttttctgattgccaggacaggtgctttccactagtccacccagcaactcttgctgaatcatcctctgctggttacttatccccaatccaaaggaagttgttgtagttaatgagtaaatacagtgtagccaaaaaccagtgaaaacacacagctctataaaaacacaatgacaccttgtccttccagtttccttcacaacaccctccccccatagttcattcacaccgagtactgacttttcttgactataagctgccttcaagatactgaaggttcccagtgtttgtgctaagcagggactcaggtggagagaactaaggtcaccctcagggaatttcttgctgaattaggttccactaagccttgaaatcaaaacgcttctggtaggtaaatggagtacagatgggaaatcaaaccagtgtgtgactgggcatgatttagagcaactgttattgatatgacagatcctagcaggcaacctcatgagagcctggatgttcgtttcaatgcaggcaggtgaaacgaataattgcatttttgacttttgaatttcctgcaccttgccagtggttattacagccataatctgggccatgtatattctaaggaggctttcgatttaagaacctagattttttgagaggcatgcaatagtcaatgtatctctatgcataagattttatgtagatattttgatgatgcataatttctacactatatgaaatataagttttttaactttgggggaataacaatagtttatttctaacatacattatcttggtcaaacattgaaattcttgattaatgtttaactatgagaagtatactcattcaagtaaaggatcagtttcagggttcaggctgaagtgtcttaatgactagaattcaggttccaaggagaagcccacaaggctaagggtattggatataacggaaagtggaagctatacctgacttccagagaatgtggaccggatataagatcttaatcttctcttatcttactacagaaatctggatggagaagcagtatttatctcaaagagaagtggacctagaggcttatttcactaggaatcacaccgttttgcaaggtactcgattcaaaagagccattttccaagggcaatactgtagaaattttggctgttgtgaagacagagatgatggctgtgtcactgagttctatgcggcgaatgcgttgtgctactgtgataaattctgtgacagagaaaattctgattgctgtcctgactacaagtccttttgccgtgaagagaaagaatggcctcctcacacacagccttggtatccagaaggtaggctttgggaatgtgtttcaacatcatcctcgttcataacaacaagatctgacaaacgttctctctttttcttctttctttttttccttctttcaatgaaatgaaaatgattattgtgattgagaaaatacatttctttggattgttaaagtgctttggtttggatgtggggttcctgtgtaatacaagcaccttcaggaaagttctgatctgacagtcctgcgtgctgatcggaatcctgatcagtgagttttgaacactcactcaacttgtataaggattactttaaactctttcttctgttctctctctctcttctttttattgacatcaggtttctcaagcctttttgtgtgcagcctcttagagagtctcaagaaagtcgcaagatttcctatccgtagattttagttgttatttaaaagggctaatggatgcactagcattagaaactgtggtattagtaatgctattaaaaccaggacaaaataagataaagtcagtcacccgctctgcctaagtaataccaaatgtattcttcacgtgtatttttgttttgcttcatttgtttttccagtctgggacttttacaattattaaaaagaaaggaagg

SEQ ID NO: 11039 - DNA, 6000 bp, Homo sapiens
ctgagaagagacataattaaaacagggcatgggaggtaatagaaagattggaggaaaaagagacagagagacagaaatgtttgtggtaatttgtgacaagtagctttgattgttcatggcctaatcttttagggcatgaggttatttcattctctgtagcccaccgagagtgcgtacagtgacacatgttatgtaagtccccttttccctttttataaatgtctagaccccctgtgatttgagacttttctagaagaatttagctgaagaccatattgttttttaaatgtagtatttggagcctagaggtgccagataacttcctgcaaagctaatgcatttattttgggaatatataagctcagtatcatcattaccaacagtgctcagacttgattttattttcattccaacagcaaaggaaagaaagcaacttctttcatgcttccatgccactctgcatctctctaccttcacagagtttctcaataatggcaacatttccagttcaccaatggactgagagatcattgaggctagactagtcttattaatccttataccccagctcctagccgaactcctggacacacaatagatactcagatacatttactgaaatgcatatagaaagttacacctgcaaaaaagatgatctctcaccaggaataagaaaatataatctgggacagcccatatatgagatctctaaacaacctacctataaccaccaagaaaaaaaaatacctgagtttgagatttatttttccgtctcatttttaatatattccagttagtgaaagagctaaaataaatgacaagaaaaatttaatctaggtatttaaacagaattattctgaatgttgtgagctacatttcttttttaccttttatttatacatagtatttgtatatacttatacaatatatttattttgtatatataaatatattgtatttatttatacatgtaaatgtataatatatttatttatacatagtatttatatatacatagtatttgtatatatttatagggtacatgtaatattttgttacacgcatagaatgtgtaatggtcaagccagaatatttagagtatccattaccttaagtatttattatttctctgtgctaggagcatgttaagtcctctcttttagctattttgaaatgtacattgatgttaactatcattaacacagagtaattgatatgtatagcaaataatatttgcagtaggatatcacatgtttacttatttatttatttatttatttttattatactttaagttctagggtacatgtgcacaacgtgcaggtttgttacatatgtatgcatgcgccatgttggtgtgctgcacccattaactcctcatttacattaggtatatctcctaatgctatccctcccccctcccccaccccacgacaggttccagtgtgtgatgttccccttcctgtgtccaggtgttctcattgtttaattcccacctatgagtgagaacatacggtgtttggttttttgtccttgcgatagtttgctgagaatcatggtttccagcttcatccatgtctctgcaaaggacatgaactcatcctttttttggctgcatagtattccatggtgtatatgtgccatattttcttaatccagtctatcattgttggacatttgggttggttccaagtctttgctattgtgaatagtgccgcaataaacatatgtgtgcatgtgtctttatagcagcatgatttataatcctttgtgtatatacccagtaatgggatggctgggtcaaatggtatttctagttctagatccttgaggaattgccacactctcttccacaatgattgaactagtttacactcccaccaacagtgcaaaagtgttcctatttctccacatcctctccagcacctgttgtttcctgactttttaatgatcgccattctaactggagtgaggcactggtctgaaaatatcaattcatttaattcttttaacaaccttaaggggatatcatggtacaaatttagagctttcttttgtgtttgtaaaatggattgattccttttccctacatccagcagaaatatttgaattgaagagaagagtaatacctaagaactagaaattcctttcttatgtttcaaaagatatcaaaagatctaaggaagatattcacatcaaaaatgagtattataatatttattatctatggtgcacttgcaaaaaagaaaacaagtaataatctgaagatttaagtgaatattttatgacattggagtaccacatatttagaagaaagcaccagagaaatcatagatagaaggaaatggaatatttgtaggatcaagataaatacagcttgtcataaaataaagcaggtatcaggataaaatcttgaaaatattttcatttctcgttatttataacttcaatttactgtgatgattaattgtaggtggaagatttacgaagagaagactgaagtatagacaagttgaagtgccacaaaatgaaagctaatgacactgactacttaggaaatagcagactgggtccatatttatagattgtcaatgacaaggaatttgcagatgttaatgaatatagatccgaacttaagttgcaacaacctttcccactttgagatgaatagtgcatggaagagtaaaatgcagatgttaataaatcagaggaagacatcgtgccagagtataaagttgacagatttatgccgatgaacttgaacaaagccacagaaggcctacttgtcaaatttactggtgacaacaggtctggagaaatggctaatgttttggataatagcattagaatttaaggtctgtttaaacttcaaattaacagaatgaaattaatatatgcacatatcaattgggtcttttgcttatatatcatctcttaatagagcctttttgaacaatcatttctaatgtgacctttgggattttctactcatcatcacctcatcctgtttggtttgcattatagcatctatcccttcctaacgttttccctatgtatttgttagtttgtttttttttaatctaactttactagaaagtaaaatgcatggaaacagcaacctgtttaactttgtatcactaagagtggaaaaataaccctcaggaaatatttggtaaaataataaaatgcccattgatgcccttctcttaaaaagaaatttaattagtgcagattggggaaatacaacaatatttctcataaaatgtgatatctatacaataacagaagtactatgtcccaaaaagtattctataaatagaagaaagaacagatggttttgctgctgattaatccatttatctttcgtaaatcatctaatttccccaggaacagcttcctcatctattaaagggggttagtaatagctaagccctcaggggtttaaaaatgcatatgaaataattttataaaccataaagcacaaaacaaatatgaaaaattatgattggaggagggggtggggtagttaactaaatctcagtgtaaaccaccaatgtcttgtgtgtgttgaaaaaataattacatataaaaactggttgcatccaaagaataatgtactttttgcactggcaagactcaaaccatattattgttacttcctcccagttacatattttgcaagatattgacaattgtctaaaggaagaccaaacagatgtaggtgggagctactgtcatttgaacaacattgaaaagaaaaatactaaaaaagaaacatgagggcatataaaggagcgctggggctgtgatgtttattttgaatctgtgaagcattgtcatgtggaagatttattctgtgtagcaccaagatgcaaactaggaattagaggtaaaagtctcaaaaagacaaatcgtggcttgagaccttggtttaatgtaagaaacagttttctcacccttagagcactcccataaggatggaagtagtgaattgtggtggtcacattcaagctagatggggacatgtcagcaatgttatcaggaggcttctactctgaagctgaagttcagacaagatttccaggctcttcccaagtgcaagattgtaattacttaaatgcaatatttttaccatgtttattaagaataaaaggatcatgaattcacattctgacaaatgctagaatacttattattagagacaaaaccagtgcatgagagaatggcaggtgacatcagccctgaatcaatgggaagaaagacccaatgggatgtggtatttaccagagagagcacttctgcttagattgctacatcctacagtgaatgtttaatatcattgagtatattggtggtctgtcatgcttgacaacattaactatgatcatatttatgacacttggcgtccttcaagaatttgtagctctatttcacatgacacttaactatcgcaaatacaaattccagctaaatagacccttcagtttaaaaacagtctcattctcaaattttaaggagaaagtgaagacggagatgtcttaaagactcggcaagtactaagttggcaaatgtcaaatgttaaaataagtttatattaaatgttaaagtgtttgcctggaatgacttttccattgtcctgcttgagaaacacagaggcacctccttattgcttttatatttgctttacaaagacaaatgtatcaacatgctctgtattaattgtatgttgacatttttgtcatatccacagactgatgcatgtctgtgcatggtttataataagtgcacgtaaaaatagagaaaataagtagaaaaagagagagatttaactctcaccccccaccccccaaaaaaacagattaaattagttttcattacttttttttttttcttcagcttcagctctccctcagcgagggaggaggctgtgggctgcggactgagtgctggaatgaggagtaattgagcttcagctgagccggacgtagctttctcctcctggtgtcattgctgcagcctccagtgccgggtccctagttcctcagctgcctatcttcccggtgcaacatcgcctgtaaagacagcaaagccaccgcagaagttgcccggcagaagactccggaggcattggctcagtaacttttcacgtcattttctgctcgggagccccttctagcctctccgcgcagcctttcccaccgcaaatcaccagtgctcatggggcaggcggagaggagcttgcagcattgagcggaaccggacttgagcccgtgatgtccggcaccaaattggaggactcccccccttgtcgcaactggtcatctgcttcggagctgaatgaaactcaagagccctttttaaaccccaccgactatgacgacgaggaattcctgcggtacctgtggagggaatacctgcacccgaaagaatatgagtgggtcctgatcgccgggtacatcatcgtgttcgtcgtggctctcattgggaacgtcctgggtgagtctcctcccgggcagccctcctaggggctatcaccccctctccgccccgggctgagaaggctctaaagagacccctccctcccccgggaagcaaacaaagaggtcgctgctctcggatggggttttctaataaaataataataataatagaaagttttctgattttccgaaccgggaccgagccctggaaaggttattccctgttttgcaggaataacggggaaaccgcgtttctttttcgagcacctagattacaagcgcagggagaggggccgcggcagggatctccaggtggattttgttgagtgtgtgtgtgtgtgggtgggtaggtgggggagtcagtcatccctttgtgtaacgtggctgggtgtttcaggggggttgggacgagacagagcttgcagaatacaaagctacatccctaaggagcaagctctctgtggctgtggaagtcacaaagcatttgtgagctaggtggcattgccctttggcgaggagg

SEQ ID NO: 11040 - DNA, 6000 bp, Homo sapiens; identical to SEQ ID NO: 2445

SEQ ID NO: 11041 - DNA, 6000 bp, Homo sapiens
aaatacctacctttcaggagctttgtgtatgtcatagtttctgactaatatcctaaaaataatgttactgttgaatttaagggcatttgatacatattttatgactagagatttaagatgtgtttctacagatatcattggttgaacaaggataatcacatccaaagtttcctgtttctttgattaatatctttgcatactaggcctgtaactcaaggtttttcccaaagcttgtctaaagcgtgtttcctccatcagggaagaacataattctatggtctaatccatttgggaaatgccaaaccaaaccaggtaagacagatttctttcctgcagtgaatacttgcttgttagcattgtttttatttattaaggtgtaagagagaggtattatgaacatttttccacactgattgagcattttcagaaactaatctgtgctacacactttggcacacctactttgggtatttgctcacttatctaagtgcagataagttctctttttctggaggtaaatctgtgaagacacttctcttgggttttagaaattggttctgaacccctctgtaatggatgagattcctgatagaagaggagacactgatgggctgaatcaaggctctactaatttactcatttactcattcatttatgcactcatttatttcacaaagacacatggagcccagggaaataactataaagatgactgagacatagatttctcttcattaagttatccagataatacacatcaatcatcatttcttacagtaattttaatgaatggaaaccacatattatggactgaattgtatccctctcaaattcatatgtctgagtcctatcctccagtaccttagcatgtgactgcatttggagatagggtccacattaaagagataattaaggttaaataaaggagggtccctaatccaataaaactagtgcccttataagtagagggagagacaccagggatgcatgtgcacagatgaaaggccatgtgaggacacagcaagaaggtggccaaaacaagcctaagtaagagagaggccttgggagaaatcaaacctgttgacacctagatcttggatttctagcctccagaactgggagagaataataatttctgttatttaagctacccggtctgtggtattttgtaatgacaattggagcaaattaaagcactgctgttacttgttcattaggtccttgacttcaagagctttcctcagctagttctaatgtctactgaagctttataattcctttacttgtattttagaagaattttattagaaccaactagattgtaaacctcttgagaacagggaatttgtccattgtatcgctgcatttcctgactgactgacagagagaaaagcatctggtagaacaaatatgtcatctacatttctacttccttctgtatattaataattgagggatgacctaatacatctcttggaaagagaaagaaataagaaaaagagaactacaaagtgttaagcccatagttagatgcttcacacgtcttcttatttaatacttttcttctattgtgagataaatatctttatccccattttgcagatgaagaaacagagttcagagaggttaagtgatttggccaagatcataaaatcataaaatgtcaatgattgcttaattataggaaaggggaaatctggctgtacagcagagcttatgaaaaataactgaaacttttagtggactacatgtttatttcagtgacattcttataagtgatatggccatcaaaaagttagagcaatattaagttacacaaataaaaataatgactatactgcgttattgggcattcactaaatgtcaggcactgttcttggttacacatattcttgatacatattctggaaggctagtgaaaaaaatttaagtgtcttcaaaggcagatgaccaaatgatcagtctttaaaatgaggctatactggttggataaactgtgaagatttactctggagaagattgaagaggacatgataactgtgtcaaatatttgaaaggtttccagtaagaagagggagttagatgtagcaatggaattcagaggaagtgaaccttccactactgaaagtattcaaatagatgtgtccatgtagaagcaactcctgcattttatgggaaatcaactaaagtcttaagttccttaaacttgaagattttaagattaataaatatcatcatcctagtcattttcttctccattaacaaagttaggcttggaggaaaaaaaatgagtgctgacttccttctggagctattctaaacagcaaaataaactatcatcaaggtgaacagacaacctacagaatgagagaaaatttttgcaatccatcctcctgacaaaggtctaatatccagaatctacaaggaacttaaataaatttacaagaaaaataacaaacaaccccactaaaaagtgggcaaaggacatgaatagacacttctcaaaagaagacatttatgcaggcaacaaacatatgaaaaaaagttcaacatcacatccttaaagaaatgcaaatcaaaatcacaatgagataccatctcatgccagtcagaatggctatcattaaaagtcaagatacaacaaatgctggtgaggctgtggagaaataggaacacttttacactgttggtgggaatgtaaattagttcagtcattgtggaagacagtgtggcgagtcctcaaagacctagaaccagaaataccatttaacccagcaatcccatcactgggtatatgcccaaaggaatataaatcattataaagatacatgcacatggatgttcattgcagcactattcacaatagcaaagacatggaatcaacccaaatgcctgtcaatgatagactggataaagaaaatgtagtacatatacacaccatggaacactattcagccataaaaaagaatgagatcatgtcctttgcagggacgtggtttgagctggaagccattattctcagcaaactaacacaggaacagaaaatcaaacaccatgttcccacttataaatgggagttcaacaatgagaacacccggacacagggagaggaacaccacacactggggcctgtggtggggcacagggagagaatcaggacaaatagctaatgtatatggggcttaatacctaggtgatgggttgataggtgcagcaaaccaccatgacacatgtttacctatgtaacaaccctccacatccagcacatgtactccagaactttaagttaaattaagttaaaaaaatagcctaggagagaaacatatcaattctctcatcatcattgctaaggagtcttgactaggaaattgttgttcaatttaaacccttttctatattgattcttttataattatatcaagaaaattcagtctccaggtttcaaagctgataacattacctattttgaaaagattgcctatttatttctgcctttatcagcaagagaagctcatccttaatgcctatcattgggctaggcattagcagaagcttcttaaatacaataggatatggttgagtgtttttcttatctgggatcagtgtttcttgggaagtacctacagagatactctgaactacatgtgagtgagtatgatgatagcgaacatcattagaggaattagagtagataactcatgtgtaagcaccagagagcagttatgtgatgtgatggggctacctagagccaaaaaacacaaattaaagatttaccgtgttgtggggcatcttgatacactgcagaacagtcctagcgaggacgggtcaagaaagacactgcattgatgagtacaatatacccagaaaatccaggctgttggaggatgtgtgtgtgtgtgtgtgtgtgtgtgtgtgtgtgtgtgtgtgtatcaaaagcatccaaaaaatcacattgttgtggctgtgaacacttaactagtaaataagaaagacacggtggcagggaggaaaaagaaaatgtatccacagggtgttccattctgctgttcagaacattgtggttgctcaaataatattaatgctctatgatgaagatggtagcgaggatgatgatgattaatgcgacccatgcaaaatagggctggggaggatgacataggcgagggaccagaagagggaggatgactcatgggtgaggggtacctggggatagagcgaggtgctgtgcacgttggcgactgtaggggtagcggccggggcacgcgtggctcggacccggggagtgggcgggtgggtgcccgtgggcggagcggcgccgggactgagtggctggcagctatgtctgcgagagcagcggcatcaccctggatggaagcctctgagactccgcctaactgacacccaaactctccctctccctcccgcagccccaaattggaggcagcagagcctgggagcagcctccacggcggcagcggccgccccagtcccagccccagccccagccccagccccgcccccgccccgcgccccgccggagacgcccggatcggcggagcctggcgcgagccctcgccccctcgcctctcccgccgcgcctccgcctgcccgcccccgccggccgaggctgggctgcgggaggcggccgggcggccccgagcttcgctagggcgaccaaaacaaaggcagcatccggggctgggtggatgcaaacaaccatgaaagactgggttctcgctctccccggctctgctgctgctgctgctgccgccgccgccgctgctcctcctcctgccgccgccgctagggctccgctgtgagggggaagcaggggcgcagctgctgggcgtgcatccgaaaggtgagagccagagagcgagcagagggggcgggcaggccacgaaaatgtcctcggccgtggggccccgcggtcctcgcccacccacggtgcctccccccatgcaagagctgcccgacctgagccacctgaccgaagaggagaggaacattatcatggcagtgatggaccggcagaaggaagaggaggaaaaagaagaagccatgctcaagtaagccagccccagccgcgccatccatgcctccgtgcctccatccgtccattcaccactcactcccctagtcctcgcggctgagtgtggggaaggggctgccagggtgctgggtgcggacggaggcgcccgccttgggccaggggcgcggggcttgagcagggaagaggtcaggggaccggaggagggaggggatatgccacagatccaggaacccaaaggccgggggaggatgacttgagactggggtgcagaggagggatgggtggacgggggccacgctcgtggtgggaagtgcagaagctgagaggtgctgatcccacccaagtggaaggtccctgggctgggagcaggttagggggcaggggatgagtagaaacaaggggaggcaggatgaagaggtgctgaggacagctcctcttctcttcttggagttgtttagctggtcggggttaccccagtgaaggctgcctatatttatataataaaaatgcttatttttagtgttcattttagtaatcattcatctcacagatcaaggttgggtctttttttgggcaattgccatctttggtaacctgcctccccagcttctctttaaccttttattcagagtcttctacacagcatacctgtgtgaagacagattctcttctccatatgtaatgccactggcaatacaaagtttttaatcatgggagaagctgacagggactctggcctgaataacatagaggttcctctttagtggtttccaagagacctctggggcctgttcagttcctggaggaaacagtccaataagggattgggaatttgcactcctcctcacttctttagagcgcatcaacccttcaagggatttctgtctgatgccccattttcctggtgatggggagaagatgggactacttgctggtggtgcaggagt

SEQ ID NO: 11042 - DNA, 6000 bp, Homo sapiens
tattttattttgagacacagtctcaccctctgttgcccaggctagagtgcagtggcaccatcttggctcactacaacctccacttcccaggttcaagcgattctcatgcctcagcctcctgagtagctgggattacaggcacctgccaccatgcccagctaatttttctattttttagtagagacggggtttcactgtgttggccaggatggtcttgaactcctgatctcaagtgatccacccactttggcctcccaaagtgctgggattacaggcatgagctaccacatccggcctgaaataattactgtaaaccacagtgcctaacacatacaaaacacatgataagtatttgctattattttgcttcaacaattgtgatcagcacaatatttcagtaattcctagaaacagtaattttgttagctgctggaataaaaatggtgagaacttgttgagccctttccgcactatttctctaccagcctctccttacagccacactcattcacacccacctcctttctgcatccctggggcagaggttgttctgaagaacactgtcccatttgccatgtgaggtaggcctgggactcctactgtgttatgactctcatgcagtctggtgaggctcatatgatctctgacgttgtcctgggttctctgattaatttctgcttgttgaagaaagagcgtgagaagtttgtatcataactcttagagataagaattgttgatgactgatcaaaacaaatggtatattatgctgatacatttaaaataatagcaggagataaatatgtttactgaaccaatggttatgatatctatgaaatgcaatatagctgttatgcttattggtttggttatggcctgattggaaggaaataaaagctaaggagaagggtggtagcttaaagggactcctattcaggagtctggagacttcagttctacccctaagcttacaaggcaaattgctgagccctgtgcacatcattaaacagcagccaatcatgaatttccatttctccattagtgcattttctttttgttgattattttctactttttaagttttatatttgccccttcattattttcccaagcagactcatgtcacatgcatttcctttttattatagggtttaagaattctatttatcattccctgtctgattagcccaggaatttcacaatggatcaatatgcacccatatcactaaagagtggctactaaagagcgtatcttgtagtaggagataggcgcaaatgagaaaatgggtaggcatgaagaagaaggaaagtgggagagtgagtcattgatgctttgtgaaactcgtccagatccagttattctgcccctcttatgagcattgaaagtcttttttttgtgcatctctagctcatgtatagaatttcaaatattattatttcagagtacctttcagaagaataatacaatgggatagaaaacacactgaggccaggagcagtggctcacgcctgtaatcccagcactttgagaggctgaggtggaagaattgcttgagttcaggagttggagaccagcctgggcaaaacagcaagaccccatctccaaaaaagaaaaagaaacacactaaaataaaatatctctagaaactatgttcagttgaaaccatatccatgtagacttcagaaaatgtttccaaggtcataaatttcaggcaagcatcttaagagaatgaatgagtaaaagcaaacacatctcaaaagatggggagggccaatcaactcacatactttacactagcagttaacatttgcctttacctcttcataatgctctaatgtaattataatgcatagaatatacactgttttactcactgctcagtatgcctatcctcttttctaaatttgaattttaatatttcagcaaaacgaactaataaaaggcagtttcctagcaacgtctgtattcaaaggaacaacaacaaagcttaatcgcaaacaccttattttctccaaagttaattcccgtcttttgagggaagttagcaggtagcaaataaagcaaggtgcaaacagaggctcttgtaggagaggttggcacagactcacttggctttttctttctgggcattgaaaggtaggaaggttagaacttcagctaagccagtctttcccaatggttgcagtcagagattgatacaaaaccccagaactgtttgctattttatccattctctgctggagatgcagattgattggtggaaggaacagtgaactaggaagccaggttgttggattcctagtaactctcacactacccgcgaaaacttgagcaggccctctttttctgggctgtgtatccaaatggcggttactctagaagacataagtgaaaggtccttctcagcagctcaaaacggctaccagtaaccgggtcttttttattttttaattaagcttaaatggcatttgcttaatcaataatacagtttcactagaactaatgctgcatccccagaaaagcatcacttagaaattaaacagctggctgtcttccagggaaacgtgtccctgtgtcctgccttcctgagacttcttgcctgcacgcggggcccagccgcgccagagagatggaagtgactttacctacccagcgaaagtagcagtctgcaacaaggaaaacagctaagttaagaggaagtggttttcattttactgcttgcagaaaggccaagattttgacgtttaaagcgggcacacgagtcattttaagtctctagatctttcaccctgaaagtccctgcacagaaactccatagggagtctaaatatagcaacagcaccccctcccgccccctccgccttcagtcagggtcccgcgcagctctaggattggagagcttactccagggcgctctctgcatctgcctcgaatagcaccgcacggagcaacctctctcgcacctccacagtgcgtgggtgtgaagtgtattaggggaaagctagagagtgactctgggtgatggtgctcggctcacagtcacatggcgtcgccgccagctgcacagagctcccagctagcttctgctgcccagaggcttggggggaaggagggagggaagcaggctcctgctggtgaccaggagcaggcgagagggcttcacacaaataatagtgataataaagagtaaaagcaaagcatttaaatcgagctattgcagaagacagaaatcagctgccgcgggcgtgggtgtgtgtacagggtgggggagaattgggaaagtatttatctcggaggggcggagacagctgcaagaagacttttgtcttagcattgttttagccttaggaaaggaaaaggcccgaaggaatccaccttgcaactatctgctatgtctttgtggtggaagcttagttttgccttcaatttaatttgatgattttctttcatatttggggaagagccactctgttggaagaagtccccgagcctggcacccttcagttttccctatgctgaatgtgagatttaaactgccttttctttgtaatacactgtttctgaaggccagaggctgcggccagtggcaccgtggcctctctctccgccaagggcgcataggctttgggccacccgggtgccaggggtggtggaagacccagtcagttgttccttgcaacaggtctctaagcttgtatgttacaacataaggtgggtggggtcggaaccccgaaaagccggcgtcctggacaccccatcctccaggtgttctttcccagacactgggtcctcgccgccgctgctgaacttctcaatcatatgactttctcggacttaaatggaaatttcttgacggagggaactgggtttgttctcccaggcttcgcgctgcagtcaggcagagccccggggcagctcgctcaccgcggaggagccactttggagttttacgccctttccacaccccacccatggactggaaaggatgttcagttactcgcgagcttgtctgatactgggatggaaagtcacagtccgcaggctggagtgaggcgcgggaagatgcctggtccttgcctcgcggacttggcagccgcgtcctgcgggtctgtccactgaactgctgaggactcgcccgtgtgcggggacccgagtgccacttcccggagcgttaccttgcgctccagcctccaggctagataatacctggaaggcagggcagggctgttcccgctctcaccccttgcggaaggatggcaggatccggcgcagcgacgtagcagcgggagggcacagcgacctgcatctccagtttctcctcaggacacaaggctgacttcaccttccggacagctgcaaagcccctgccagaaccaaaccgaactcgcgcctcggagaggggcttctggggccgtttcgctgcagggcgtggggagtggagagagggaaggggaagcctggggctgggtgtgcgcgcgtgggagcgcgcctcggagcgccccgcactcccccactctatccccgggggcagtttgggaaggagggagtggtagtcgcgggaatgagggagcaagagaaaccctctcaaagtgacgccccaaacaggtccggatttagaattcgaagctaaaggctgttagaaattgggactcctcggcctcctctgcagcccctcctttcccgccccgaagcccgggcggtttgctggctgcctgcttccccgcccccggctcagaggtctctggctggcgggcgccccgtcggccgccggcttcctccttgaaacccgccggcgcacatgaggccgctgcccccgccgcaggcgctggcggccccctcgcggtgcccgtggtgatgccatgccccgccaccacgcgggaggagaggagggcggcgccgccgggctctgggtgaagagcggcgcagcggcggcggcggcgggcggggggcgcttgggcagcggcatgaaggatgtggagtccggccggggcagggtgctgctgaactcggcagccgccaggggcgacggcctgctactgctgggcacccgcgcggccacgctcggtggcggcggcggtggcctgagggagagccgccggggcaagcagggggcccggatgagcctgctggggaagccgctctcttacacgagtagccagagctgccggcgcaacgtcaagtaccggcgggtgcagaactacctgtacaacgtgctggagagaccccgcggctgggcgttcatctaccacgctttcgtgtgagtacccgcgccccctgctatgcccgctgcaggggaccactgtccctggccccctggggcgtgctccgcgctcgcgcccttgggcccccgcgcgcgtgcacacgtggtggcttttatttcttcgcacgtgttcgtggtcttccttctggagcctctcccctcccccagccccacttctctcatctctacagcttgaaccttttccccgaggacacccaatgaactgcccggtagcttcaggctcccggggcgagagccaggcagacgcgggacttaggctgcgcggataattgggagcaattaggtcccaagatacgtaaacttcaaccgaacggggcgcccgggagctagggaatgcaaagggaggacaggcgcccgtgtgaggcttgagagtatactggagaggttaggaggtgatggcggggtaggacggggagaagtgagggggcatcgagggctaggtcctcagtcctaggggcggagtaggggaagctgctacttggagagagctgctaggttttaagcgcgcccggaaacacgcctcgccaccacccagccaccaccaacggaaaatctgtcagtgcatgtagcccttcctgccacggagaaggtggccaaggtctagaggaggccagcaggccaggcgaagcaacgctcccgcgctgcagggggcggggaggcagcggggaacctggggcgcaggaacgcgggcggaggtgcgatagcagaagcgcaaatgggt

SEQ ID NO: 11043 - DNA, 6000 bp, Homo sapiens
tacctaatacaatgtaaatgttatgtaaatagtttttatgctgtatttttttgtggttttttttattaacattttatgtttatttatctcatttttatataagggcttgtttgaactgcaataacattggttttggctgtaagagaaattacatatcattagataactttatttcattaggggaagaggtttttctccttaatttctcaagtgaaagttcagtggaattctgacatatgtttattctgccctgaaaacctcagtgtcttccaaagaaacaactactgaatctgaaatagtgaatgggtccagggatagcctgccatattggaaataaagtaggagaacagagtttaaaccacaggctggccacttactaggtaatctggaccaagtggttctctaagtctcagtgttattatgtgtaaaatagaggtaatggagagttgagaaggaaaatgaaatcatgcatatgaaaatatgtaaatggttaaagcactatacaaatagaaactcttaataaccattattaatggtggaggaaggctggaccaccacattctggaccatcaaccctgcccctcagaaaggagtgttaattcaccaaaaggtttgttttgtttttgaggtggagtcttgctctgtcatccagtctggagtgtagtggcatgatctcagctcactgcaatctctgcctcccaggttcaagtgattctcttgcctcagcctccccagtagctgggattacaggtgtgcaccaccacacttggctaacttttgtatttttagtagagacagggtttcaccatgttggctaggctggtctcaaactcctgatctcaagtgatttgcccacctcggcctcccacagtgctgggattacaggcatgagccaccgcgccctgctgtattgcttaggaaataatgataattttttaaaaagtctgtacatgtttggttcagatgtaaccacccatttattttcttttgattattttctatctgtggtttggttgaatccagggatatagaacccacagatatagagggctatatttttcttttactagccgcagcacttattgtactgactgatgagacaaatacattccttttgacccattccttaatttacattttactttagtttacacatctcagaagtttacacacttcaagtacttaaagtgacttgaagttttctttttaatcactgacaattttaaaaaattatttcttcatgaatatacacatatacatgtacaatttctggtgggttttttttttttttttttgtcaaattgaccctcaagttgatggttttagttttaagtgttggttcatggttttttgacatatgtgcttgttgttcaccaacacttgactttgttttagttacttttcagatctgacagttttcacgtgtattcaattcctttgctaatttgagacagagatcaaaatgaactagtcttaaataatcttggtgtttgtccatgctggaccacgcggcttctctctgctagttaccataagggtggtcataaccactcatcattctttttatacctatttattccttgcctaatcaggatttagaagcaatatttcaataatttactactgactttcctttgggtcattagaagaaaaatggtccctgtagaaacaatcttgtaaataaatgatagtgtagaaacgtttcctgcaggctacaaagtgacctcttgaaatacactaaattggttcttatctgtcgggacattcagatccttcctttatttcactttggaatagaagaataaattgggaaaaatgtgctctgcaatcctctgccctgccttagagtatgtaaatagcatcatgcacaaaaaattttcaagctgtcaggagtaaagtaagtatgataatttgggataattaaatgcttaagacaatcaaaatagaactgatcctagtaagcttttctcacttggaggaaacttctttaaaaagtatttactgatctaaatgtctttcaataaggctgttaaataaattgtggtacaacaatctacagtttgaaatatttcagtctttaaaaaaggagaagcatacctatatgtatgcacacagaaaaatagatggttgtttttaaaaaagaaaaaatgcgaataattcatatactatgatcccattcacataaaaaatagcagaaacaattgaaatatttataaagagagagggcattgactggaaagatacacacaccaaaccgtactcaattctgcattgagagcttttgcttccgtgtctatgtctttcgtttaccagattatcaactgctgtattgccagatcaaatacaggatactcaattaaagttgaatttcaactataagcaacaaaattttgggtgcatttcccaaatattgcatgggacacacttaaaaggtattcattgttttgttcattaaaaggtattcattgttttgccagatttgttaaatctggcaactctaccttaaagagactttaaattatttatccttgtattcctattactaacatagttacagagatatagtggattacaataaataacatgaggggggtaatttaggagagaactatcaaaacagatgattttgctaagtatgtgacatatttatctcaattttcatggaaatatcttcaaatttcattagtggtcctattatagaagacacacagcaggcaagtgtcagagctagaaatgaccctaaatttctgggtccctattcagcagccataagcaattgccagctgcaggaaggtggaggcagaagaagtaaaaagggaacaagaggtgaggtttacgttctgcctaagtggaacagagtagaactttgcacaaactccttaatcttgcctagaggcagaatgtgggatgtactatatgggaggcaggcaaatctgggcctggttcccacctccatcactcatttgaacaagttatgtaatttatttttgcgtcaattttcttgtctgtaaaactggagtgagaggacctaacttgagtaccgaagtgaagagtcaatgagataatatctgtgatcagcacagtgcttggcaagtggaagacactcagtcaagctaacttaaagccccagttttttcatttgtacaacagaacaacaacaataatagcaacaagcaataatactaacaatatttatcttgcctctgagttgtcttgaaaatcagatgagtatatatattatgtttctaaattctaaagtgtatctcactctcctaacaaagcagttggtcttcagatcaggaccagagttaataccatgccagagcattattacaggttttttccaatgagtaattaattttatttttaaacttatcatacagtaaaattgactcttttggtttacaaagttctatgagttataacacgttgtataggtttatgtaaccaccaccacaatccggatacagaacatgactacagctttagagattctttttcaaagtgttttacattcatgttgcaaaacacttttaaaaataagaaaagagatgtagataaacgtgctgaagatgcaaattaatgaaaccagcttttgtgcacaaatctctgcagtttccagtgttttcagcttttgtctgagccatttttgctgtcggctttgcagactatctctttctataaaagtaatcaggcgtccgttggagagttggggtctttcttcacactaaaggcacatgtcccaggcacaagcctcaggatccttatttgatcttttttaatacgaccaggtcttaaatttccgaaccatgttttccctaattgccattttctctctaaaatgaagaagcctggaagaaccttcttatcccttcggggaaattatttaattgggacaaaggggatgtggagttacagagagcaacgatagggctttcagaacccaaaacctgtctggtataataacagatccttccggtaaccaaccattcaatttgtccctctccccaaccccatcctctccatcaccatctgccagatgccccctgggacaatcgactttgaaaccaaacttctctcccaggtcagctcctgcaatccccactcctcatccttggagctttctccacagaagtgacttgacacaccgcgctacatctggggaggggggcgggtccgctttccgggagactcaagtctttgctatttgccttttgtttctgggatgcctttggctgcctttctcttccatctgcttttaattttggtaagagaaaagctaatgaatcaggaatgaatctcctctccactaatcttttttttttctttctctctctctctctcttaaagttggcgcgctctcttcacaagttccatcactacccaagaagtgagggggcgggggggacaggcgggaaggcattaattacacctaaatctgaagtttgcggcctcaagtaccactttgatggggagagcttctgaagcttccatacaacctgccgtgcctttgctgctgccgcagtagattttcagctcatttctttctgctgctgcttcgcgctgctctgtcatgcctaaatctatctcgtcactgccaaaggtgcctgaatcagggtgaattccacgagattcaccagcggttttgctccagtccaaggtaaatacagtatgcaaaatgaggaaccacccaaggatgtcggggaggggggagagaaagggattccctcaccttttccggcacattcctcgttaatttccaccaggaggaggcgcgcagcccagctcccctagtctctcttcttaaatccccctacctacggctgccgaggttggccgcgcgtcgggaatctccccgacagtcctggccctcccccgccccccgggttggtttttcccagctgcggaggttgggaggttgggccaggggctggggtgcgaagagagtcggcgcccgcaacgcggagccgggaagtcgtcgctactctggtggaactcagagttggttctggaggcggcggacgcggaggtgagcagtgggagcccgcggcctgggagagacccgggaggcgtcgttggggcccctccccatcctcgggtggagagtagggttggttcgggttgccactgtaccccgagtcccactgctgctttgttcccagactctcccctcctctttggagatgacttgaacccctttgagatccgaggggctggcggggcgcgggctggggggcgacagttgtagctccacttcctgctaatgcgagaaggtacaaaaagagatcaaaaagtcctgtaacctgaaacttccctcgcatcctaaccgggacctggtggagaggtctgggcgggggcggagacacccggaggccgaccttccgccgaggcggtgcaggaaggaacgggagagggagaagtttggtagggaaggaattggggattaagcggtaagttagacgcgggagacgagtctcctcgggaaaggcggagggcgggaggccggtcgggtttatttagtgtgggccagggaagaaggaagactttgcggtctgggtgtcggatgcgcgtccccctccggagtaaaagtgaccggaggggttggggaggcgaggccggggcgggcttttggaaggaggtctctgggacagactggagacgactagactcgaaaaggccggtttttgcactccggaagccgcggcagccaccgctgttcacgcctctctcctgcttgtcccaggtccctcagaggatccagcgaggggcgccaacaagaggcgaagaggtggcaccagggcggcggcaggaagaggagcgggagcaggagcgcggagcggagcgtcccgacccgccgtgcgtactttctggagggaaggggcgggggaatcggcccctgagggaagcgcccggtggcgagggggttagccaagttccggctgcggcgccactccctcggttccacgagaggaaagttttttttttccagacgcttccgcc

SEQ ID NO: 11044 - DNA, 6000 bp, Homo sapiens
ctttttgctttatacagaaagacataagaaaggttaaaaaggtagaaaggacacactatgcaaacagtatagtcaactgatttctcatgaagactgagttattttaatgggagaaatgatggccttttcaactgatggtgatagaataaatgaatatccttataccaaaaaaagaactttgatccctacttcactgcaaacacaaaaatgaattcaacatgatcacagatcaaaatgtgaaagctaaaacgatataactcctagaaaataaacctgccaaaacatcttcacagccttaaggtaggcaaagatttaagacaccaaaaaaactaacccttaaggaataaaaaaacgatagagtggacttcattaaaattaaaatttctgttcatcaaaggacactatcaaaaaaacgaggcagggcatggtggctcatacctgtaatcccagcactttgggagtccaaagtgggtggatcgcttgagtccaggagttcaagaccagcatgggcaatatggtgaaaccctatctctacaaaaaaatacaaaaattagctgggcatggtggcatgcaacttgtatcccagctactccagaggctgaggtgggaggattgcttgagcccaggaggttgaggctgcagtgagccatgatcacaccactgcactgtagcctgggcagtagagcaagacgctgtctaaaaaaaaaaaaaaaaaaaaaaaaagaaaagaaaatgaaaagttaagtcacagataagaatagtcatatattcacaaggcatttatgtgagaaagctcttgttttgagacagtataaagaactctcaattaaacaagacaaataatctgattatgggcaaaaaaaattagaagatacttttaaaaagaacatatatgaattgctaaaaagcaagtgaaaaggcactcaacattattagtcatcggtaaaatgaaaattaaaaccacaagatactattttacacacactagaatggttcaaactaaaaggactgataatactaaatgtaagtcaaaatgtaaagtagttgaaactcattttttttctggttgaacgtgcaaactggtacaatcactttggagaactgtttggcaatttctcacaaagtaacatgcacatctatcctatgacccagaaatttcactcttaggtacttacctaaaaagaaatgaaaatgtatgtccaaaaaaagatttatacaacagtgttatgacagctgtattcataataagcaaactccagaaacaagaaaaacatccagcaataggagaacagataaatgaattgtggtatattcatacaatggaaaacttagcaagaaaaaggaatggactactgatatatgcagccacatagatggaacgtgaatctgaaaaatattatggaaggaatgcagccagaaacaaaaaagtatatattgtatgaatccatttataagtagttcaagaaatggcaaaactaagtccagcaaagttaggtttctttttttttctttttattttttattttttgagacggagtctctttctgttgccaggctgaactgcagtggcgcgatctcagctcactgcaacctccgcctcccgggttcactccattctcctgcctcagcctcctgagtagctgggactgactaaaggtgcgcgccaccacacccagctaatttttgtatttttagtagagacagggtttcaccatgttggccaggatggtcttgatctcttgacctcgtgatccgcccgcctcagcctcccaatgtgctgggattacaggcatgagccacccgggtaccttgcctaaacaaaggagagtagtccaagggaactgtgaaaggcccctgcatgagaggaagggagggtttgttgtgtgtgtgtggtttttgttttattttggtagggtttgggttcctaattactctacaaggtgcaccagaattggagatatttgtccaaattcataaattttgaaagagaaaaagaaatacattcagagtactattattcccatttcaagattgaagaaattcagattaaattattctaatttcgtgaggaagctagcatttgaactcagttctcacgccatattccaaattgccacaccagatatctggcagatttagggaagaggaaaaaattaagcatcaatctacctgtggcaccgtgtaataccattctcaggattttaacttctaacttactctctttgaaacagcgatcacaaaggaatagacaaggggaccacaaatcattaaaactgctgtcaaacaaaatagagaacatttttcctaaaagttatttgtgtagcgaataacaagtttgacgttctcactggaaggaagaatatgaataaatgaacgagctccagtaagaagtctacaacctgtcttagtggttcactaaactcacgtttattgaatgattgtgtggtttctctgcaaagagcagttttggacgaaaagacccgaggttatttacaaaacaagaagctcacataggaactgatccagtaaggaggatcccgaagagagacagacaaatcattttttgcattgttttgttggaaacgccgggcactgccaacagtgttttacatcactgttcctcaaattttaatgtgcatttgattcctggaaatcttgttaaaatataagttttgattccataagtctggtgtggagctgagaccctgaatttctaaaaagctccccaaagatacccacactgtcagtaggggtgggagtggcggagccgactacaggggaaagcttcactttgagtgatcgagaggctctacgcaactggaaagaagaaactcaaaatccctcgtacagagagagactcaccagcccccgacccccgggcagcagtaaagcgagctgggcactgcgcctagaatcccagttcttaccccaggatcagaagcgcgctctgcagctgtccccgcacctccagaaacacgcgcgtctccgccgcagaagccgccatggcaggcttccagtcccagaccggaccaagctggaggttccgaggggcccgggtcaacaggaccaggagaggttccacgtgcggaccaaccagcggcagccccgctgcggcgcaggcgcctgtgccagatcgcagggctggcgccgcctaccagctcacagcgccacctgccggccggagagtgcaccaccgagaaggcgcgtgaccccggaggccggggcggggcgcgcattttcaaaaccaggctttggcccagagtgctgagaaaggtgggcggcgagaggctagctatcgccccactctgcttcttatgagcgtgacttggcgcgttagcatccctggaaatgaccataaaaatcagacccagggttcacacctttggctagctcgaagggagggagatgatggaggcaagtgttacaggtgggctttgtccccaggagatgcaagaacagaattcccggccccaaacccactttatcttggtctctttatgaacaagggtcgtttgttagcctctatctaaagcgacaaaattttcaagaattgacttgccattgcttctcaacttagacaggatagctccaaaattgaaacaggtgcaaaaatataaggaagttctttgttacctaatgcagaagagtgtggctgaagtctatcaggactaaccattttttagggggtaaaaaaggaagatgagaatgattacgtatgtacagctccactattcactttcacaaaagtaaaaactaagagaagttggagaagtttactaccagaagatagttttgaaaagtttgacacagtaaagaacctggtataatgtaaatacttataatgaagaactattaaaatataagaccgggtagaattacaatagggcttcttaaaaacaaggagctgcttttatttatttattttttttcggagtctcgctctgtcgccaaggctggagtgcagtggcgcgatctcggctcactgcaacctctgcctcctgggttcaagcgattctcctgcttcagcctcccgagtagctgggattacaggcgcacgcgccaccatgcccggctaatttttctgtttttggtagatccgcccaccttggcctcccaaagtgctgagattacaggtgtgagccaccatgcccagcctaaaccataaataaattctaaataaataaatcctgtcatatattttaagataatagcttgacaatttttctaaaatcagtatttggggtgattaaagtttattatgttgatgcacaaattattatatctatcacaataatttgaagttatagatggaagcaacaactcacttaaaaaaataaagtttactattatttggtctcaaataattcatctatttgaaggatgatgatttcaactcttcatatcttccacctttagtacccgaggctattgaatgcttaaatattgacacattatattgaaatatacaacttccgtagcacaacttactctttataattgttttgttagcttaaaagatttttatatatttagttacgtatttgtaaaaactttcatttttttacggtatggtgttggcaaaacggtgcaatttaccttggagtaactagatatgattgatagagctctagactcaaaatagttccaaatctgacaccaactacttgtctcctaacttcacaagtctcctaacctctctgggatgcaggttactcatatgaaatattgagaaactattcaaataatatttaaaagctgttttcagttcctattatctcttcaaatgaaaacatctgctaaccccctttctagccactcctgaaattggtagccatggccgcttcccgcgacagtccacttgagggcgctgtggcaacagctagcgccgggaggcaggaagccgatcgggggcggggatcgaaggcctcagacgtcgacgccggcgtgggcgcgagcacggtgcactctgggagctgtcactaggcccttcggctcccggtctcggtgtagctgccgtggttgccaggagagctgcgccggcgagaagcggccgagccagcagcaggtaaaagcgtccctgcccccagtgcggccgctaggctggtagccggctccgagcatccttctcggcccggctaggtcctgagccgcggggacgccttgcgagtctgactgctgtggcgtcgggggtgttgccgctccggccccgccaggagctgcgaagctggtcggccgccctctggtttacggggagtcgggagctgcgcggggactggagggccagggctggggccggggcctgggccgggcagaggcgcgagggcggccccaggtgagggaggccggaggcggggccggggagccggggacaggtcccgagcctcccctgctggggcggagcggtgcgcaaggctggggcagaggtcgcacctgtgcgatggaggcgtgcggagtaccctctttgttgaaggaatcgaggcgttgtgccttctcggctggtgggttcttttagcattgaggagacacgtaggcccgcgatggttcatgttctccgtggggcttagaaaggagtaccgaagtttattaagaggaagtcagaagagtcaaacgggtgttgttaacaattatcacctttgattcctaagccttttaaagttgcaacataacaatagtcacttgttcgggcctcctccattcctgtaccctgaggggggcggggaatggcacacaactatttttcttaagctaagtaaattgtgtttgaacatttttacactatcttagagttctatggcgtttgagaaatgtaaagattgggaaaatgacttcgactccagctaaagcagtcaaaaaaaatgataattaccaaaaatgtaggaaactgtttgcctgacaaataggccctgaactgtagagagagaaaaatctgttttgatgttgttggccattgtctatgcagacataagttctcacattttaattttgtttgtgggtattaat

SEQ ID NO: 11045 - DNA, 6000 bp, Homo sapiens
tgctgcctatgggaaggaagcatcccacatggaggagagagactcagactccatgttgcttctgggaatctggtgggagggaggaagtccactgcgtgaagggaccaagttctaatggggaaggggagaaagattctgcttgtacttctgctgtgagcagctgagtagtagattgtgacagagaagccgcacattgaacctctgtcgtcccagagtgctggagaaagaggcatgtctgagcttagatgtcagagtcagtgactgtgcaagaggccagtttcctcatcccctgtgcattctatgtgcagcctctgaaaacatacattctgtgtcctggattgactcgaatctaaaccactcttattatttgtggcttattaaagaggccaatatagactgatggtcctcctatggccacaaagagatcacggcaaagttgcaagaaaggattctgagcttttgtagccttctcagaagtccccagaccaagaactactccttgggcataacaggtggcagacagcaagaggtaaaccttttgagtggacagagagcctttatgtgaaatagagttacaaatataaaaagacaaaaaaaaatcctgcccacttgtggaactttgagcaattaatttaacatgttgaagctccattttattacccataaaaggagaatgatattgcagcattatcacaatagtcaagctttggaatccacctaactgtccatcaatggatgaatggataaagcaaaaatgtggagagtagaatggtggttaccaggggctgcctgaagggttactggagaggctgatcaaagaatataaaatttcagctagataggaagaatagattcaagagatctactgtataatttggtgactatagttaataacaatgtattgcatacttgaaaatcactatgtgagtagattttaagcgttctcaccacagaaaaagtgggggtggggagcagataataatatttacccttcatgcttttgtgaagacttaacaatgtaacctgagtattggaattcaattgtgctcaaaacctgactgccacttacttggacatgaatgatcttaagcaaattattcagccaggttaaatatcacattaagttttcttaccaataagatgaaatattaatagtcatttaacagcataatccaaatgtgccaggatgcctatgacaaggtccctctgttttctttcttttttttcttttttgagacagagttttgctcttgttgcccaggctggagtgcaacggcgtgatctcagctcactgcaacctctgcctccaagggttcaagagattctcctgcctcagcctcccaagtagctaggactccaggcgcccgccaccacacctggctaattttgtgtatttttagtagacatggggtttcaccatattggccaggctggtttcaaactcctgacttcaggtcatccacccgcctcggcctcccgaagtgctgggattacaggtgtgagccaccgcgcctggccggtccctgttttcaccccgcattcacctaaaagcaggtctcagatttttaattcagcccacctaaataaatctatctcagcaaatttaaagaaaaattgatattttattaaagactttgtgataagatataaaataggttctcatcacaaaagaaacttaaatatatattatccattagatagctccagtggtgtgctggtaaatgttcaacaactgactcttaaagaaaaacgcatgcatttatatacatacatatttattataaatttttctgatataaaagattgttacacacaatttactatttgtaaattttactattggttcctacagactgctttcattgatttttgcagaacttttgcaatccatagccaacctatggttccggctgaactgatttgacaaatggagttatatacccatttattttctaataaatcaataacgtattgttattggatgtaatatgtaatctattattaaagtatttgtcaccctattatataatgagtgtagtacaggctatagtcattaaattaaaacctagttttagcactagatatattgttcatcaatgatgtgagtgagatttttcctgagtcagaaaatagttttctaatatgtactgaaataatattttctcaatttggggggctattcccaatgtaatggatattagcaccacacacttttaagtttattctgcattattttgacattttcttcattactttcttaagtctaatcaactgatgaaacaataaataaagccctgatttgtatgtaaatttttgcctgtatatttttctttcctcatggacttgggaaattttctatgatcctcatggctttgcagctacttactgtatgcaccctcaccttgtttgcagcattatcagctccaggacagccgaaatccttcttggttctttcatactatcgcccactgtgtctaaagtagattttaagttagtgttacttgaattgcaagtactactaccactgaagcagcaactctgtttccattgcttggggagaagaccaaaaacacacattaaacacctggagaaaaaaagtaaaaccacattaaagtgagattgtaggaactgaccagaaatttagaaaagagaaaaactcactgctgtgtgaagaagtcaaaggaacttcatgttgacttgaacaagaaattaaaggaaccccgggccttggcctaaggacagactggaaatggtggtttggagagaagaaatgaggacaaagggaatgtgtgaggaacagtggaaggtaaagttggctggataaaatgagacttcaaaatgccagtttgcgaagcttgaacttggtgcaataaacaatcaaaggccattttagatgtatatgaaaacaaatggcatggaaatgatattgaagcagaaatctggtagcatccccagaacaggaatttcagaaactattgcagtggcttaggtttaaaagacaagaaacaacaaatgatcagttccccagtgatcagtgataggtcatgttgataccgtgtacccacagataccaggcaatgagaaaggcacataatctctgtagcattcttcctaaacatccacagcttcagtccaatcatgagaaaacatcagacaaacccaaactgagggatagtatacagaaaccagtactgttcaaaagtgtcaaggtttttgaagacaactgactgagaaactgtcacagattagaggaggctaagaacacaggaaaactaactgcaatatggtatcctgaattgggtcctggaatagaaaacggacattagtggaacagttggtgaaattaaaataaaatcagtaacacagttaatagtttcgtatcactgttaagtttttagtttcattggttatataagctgttaacataaggcaatatgggtgatgggtatgtgggaactccctttattacctttgcaacttttctgtaagtctaaaatcattctttttttaagttaaaacagcaaaactaccagttcttttacctgcttctagcaggtgctcaaagagggacagagcaaaaccttgcaaagcatgacattagagggtgtcccagaagcaagggtcttctgtagccccaggcactgctgctcccaaactgcatggcctttcttggcaaatgatttacaatctccgaacctcaggtcaatgtcttaaaaacgggcacagaatgtcttttcaacaaatggtactaagaaaactggatatccacatgaaaaagagtaaatgtggactcataccacatatgaaaattaactcaaaatggattaaaggtctaagagtttaaattataaaactcttaggagaaaacatagaggaaaatcttcctaacattgtatttggctatgacttcactgcgacaccgaaagcacacgcgacaaaataaaaataaaataaaataaaataagaccagaaaagcaaagaagggcagcatcccttcccgtcctgatagctgccggattttaccccaatcgtgtttctgcttccaggagctgtccgcgcgtcgcctctgttttatcactaaggttttaattgtgaataaacaaggaactggattcgaatgatttcttagtttctgagatttttttgtctaagcatcgtagacttcgtgcgttctcaacccaacaggaagcgtcacatctcagtgagcttcggctctcacagcccgaaactgcaaggagctcctctgcccggcctctctttactcctcctctctgcccctcagctcgctcatctttcttcccgccccctctcttttccttctttggttctttgaagtgatgagctagcgcaaccacaaaccatacattccttttgtagaaaaacccgtgcctcgaatgaggcgagactcagagaggacccaggcgcggggcggacccctccaattccttcctcgcgcccccgaaagagcggcgcaccagcagccgaactgccggcgcccaggctccctggtccggccgggatgcggccggtacccgctccccgccgggaacaacctctccactcttcctgcagggagctggtgccagccgacagccgcgccagggccgctccgggtaccagggtcggatcgggtgacgtcgcgaacttgcgcctggccgccaagccggcctccaggctgaagaaggacccgccccggccttgacccgggccccgcccctccagccggggcaccgagccccggccctagctgctcgcccctactcgccggcactcgcccggctcgcccgctttcgcacccagttcacgcgccacagctatgtgtccccgagccgcgcgggcgcccgcgacgctactcctcgccctgggcgcggtgctgtggcctgcggctggcgcctgggagcttacgattttgcacaccaacgacgtgcacagccggctggagcagaccagcgaggactccagcaagtgcgtcaacgccagccgctgcatgggtggcgtggctcggctcttcaccaaggttcagcagatccgccgcgccgaacccaacgtgctgctgctggacgccggcgaccagtaccagggcactatctggttcaccgtgtacaagggcgccgaggtggcgcacttcatgaacgccctgcgctacgatgccatggtaagacccgagcccgcgcccgggatagtagtcccggactgagagaggagccgggctggaaaagcagcggatggcagagtgtggcaagcctaggtccagggcgcggagagatgtggggataaagtgagactccggccagtgtgccagctggatgcatagaagtcccttggacgattcgtcttaaacggacgttattgcgcccccactatgagatgggagtatttagaggagcaggacccagtcctgcctgcgaggggcttaaggtggggtgcgtagaagcactgacagttatccagagctagggactgaatcggatccctcacgcagctctcatttactgctagatctttcaaagaatgctttatctcaatctagatctttcgaaaaatgctttatctcaatcttattgaaagggaaaccgcgtcgaagaagctgaataaattaacaggcaccatccccgcaaaaagggagacgtgataagaatggacaccagatctctttgaccccggagcttgagagtaattaagctcacagctttggggtagattctctgttcaattaccttctatgtgaccttgagcaagttatttactctttcttgcctcagttctatcctgtataaaaataaggattataattgtacatagtgcacatagtgtggtctctatattattaccagacacatagtgtggtgtctatatatgttgttattaccagacactataatatagggttaagaaaaggaaagaaagaaagaaagagaaagaaagaaagaaacttcagagagagccaaaatgtggaaagacttgggtttcaaaggatttcaataaagtaggtttggcggc

SEQ ID NO: 11046 - DNA, 6000 bp, Homo sapiens
aaatgccacctatgaacacataacaaggactgacagctttgactaggactcaagagtggcagaaacaaaggagttctccattacaagaatgcctatgcatgaatagatgtgtcactttcaaaagcagccacccctgtccttcacaccagttaccaaaccttgatctacacactgcttgttttttgtgtcttcatggtttccacttgtaagttatttatttaataatacaggaacttgggtacaaaaaaacagaaagagtgaataagacctactatttgatagaacaacagggttactatagtcaataatacttaattgtacattttaaaataaagagtataatttaattgtttgtaattcaaaggataaatgcttgaggggatggataccccattctccatgatttgcttatttcacatggcatgcttgtagtactcatgtactccaaaaatatatatacctcctatatacccacaaaaataaaaaattcataaaactgaaaaataaaaaagaacacaggggcaaagggacataattgtttagcccacatggtcataacacagggcttctggcctgtccatttgagaaaagggttaggctggtgagtccccagatgcacatgcatggcacatagtgatagctccctggagcaaagagaagcatgcactggagggcaggaagacagaaaaattagccctacaccaagagggcctactcagactctacacatctttccaaagccccaattcctccgtagaggcttctctgctccttcagctctttcatgtagtcattcatgtaaatgccttctcctaccttgggtttttagttcctttagagaagggaccaagtcctatatctctttcaaacttccaggttggaggtgttcaagaaatagttatcgaaaatgtatcaactatttctactcatgagtaagtgagctgcttctcatgattacttttgatgaaaaaaaatgtgttgatcatgaaccactgtcaagaccactagagcttgaggttttattctaccaagtctgccttaattatttcctcctgggaacaaatattagcacatgccaacaaggagtacgagccagttttcggccagagagtagagctttttctcagtgcaaggccaccttgccaactgttccctgaacagtttagatctagatgatgtattctaaccaattaagctatattctagttgattaagctaataaacctaaattcattattttgctccctgtatcgtgaggtcggtgaacacagcgaatagtatcaacaaataaaacattttatagtgaaaatgccttcattcaaaagcattgctggagattgttgtcaatttaataatttattcacaaaatattgtgactcccaggcccatctttacagaagccctccctggaatccttcctagtggaggaaacctgctttttattcagttgacatctggcttagccatatgatttgggttagccaatggaatgtaagcataagtgatttatcttataattcagctgaagctttaagaaccattgtgatgttcccccgttactcttccctctaccataaaaatggcctggcttcatcagtctggatccccaaatggagctgcagacaatccacagctaatacttttattagcaagccactaacttctaccatagcaagccactgagatttgggggttatgcttggttactatagcataacttcctgaaagctgacaaatgttgaaacctacctataaacatttcattctctccctctagcctctgtcacaccacagacataaaatgcaatttgaagctcagtctttgaaatcaacagtaaaatgagagaaccatgtcacagggttgttgaaattgtttagtggaatcatgtatggagagcacctaggatggtgtgagctcagaaatgtgagctccctcgccaccataatgccttcccttcatgtttcattcccacttccgtggtggaggtaggaaatgacagacaatgtcaaccagaatcttgattcttctctgtaatcgtgtgatgaacaagttataaacagctcctgcctcacaaaacttgtagtcttacttctagcagaaaaatgtaccatgtgcatgcttgcttcctcatctattaatgtgaagttccagcatccaagtgaaaaattaacaaatgtaattaggattgtcttggagatagagggaatccattgttcatgatttttccctctcccaaccactatcaaccaccccaccatctatacacatcaccactgtcagtaccacttccagaaattactccctggtcctaaaacctggattagattgccctcctctgtgctcccataacatcctgtacttaccccttctccaaactgttactctggaatggatttactagtttgggaattagtcttcccactgagagaataaactgttccttcattattttagtcctagaagttgccccatgcctcaaacgtggtagatatttaccaacattttttgaattaatgaatgagtggatttgataagttaatttcttcatagtgacttttgagttcccgctgcaagttgatgacttttttatgccagatgcccagggctccaggcaatccttatagtttttctaactgacaaggaattctctattatgaaatggggatgtgatttacatatacctgcaatcttaaagcactcatagaggccactggaaactcaaatgggtaatacaaattgaattagcagctcttgattaagagagcattgattttattaaaactggtagaatatatgccagaagttaattaatagcttgaaaataatcagacacttcataaagctgaacatctgccaaaaagcgggtattctgaggtatgttcaggaaagtttccaagtgtataatatttgtttccatagttccttatgttgtaataaccaaaaaataggtaaatcaattttaaataaagcaatttaacaaactcatatttcctttatattttggaggaactccaaacttgcaagagtagaacaatgtccttacttactctcttgggatatctaaaatatcttcagtcctataagattcttttttaaaatgaggaatgattcttgttctgcttatttttacataacacctttatcatcaaacaaacttcaagatgtgtcatctttagtaggaaaacatatttccacctcatcctcctgttagacttcagtctacttaagcctattctcagtttaatgggattaacagaagcaaatcacaatttaagactatagtttaccaaccttcctttctcttgttcagtgaaattcccctgataatccatcagtcaacccctgctggccttgagaggcgctctagaaggcaggagaagggcacacaggctcgctttttgaactgaagaagggtttcatttggtttagaattgtcaaacttcaaaaaataaataaataacttaaagtgtttttcaaatcagccataaggctacaaaccagaaagaaaagtgtgaggcaggtgtttggggcagctacccaagttgcctacatggtttccaaggtcctttcaactctaaggtttgtgtatcaggctgtctacagatcatactgtctccataagattgtctagttcattttatggctagtttgaacaatctgattttcttttttacaatggcaggggctcaatccatgttaggcttcaatgttgagtcacccaagttctccacagagaataaccaaccagccgtaaggaagcttcttttagcaatgccaggattctgcaaagtccctcccagcttaacttttctgaccttgcggcagcagaacaacaaaaagaacagcccctggcaccctcagaagagcacaaagccctctgacaacctgagatggcgcccaggtagacttccctcaaaaaaaaaaaaaatggcaaggctgcttcagcaggtctttcagccccaaccactccactctccgtctccttttcttcactgctttccccacctctcttccccccttccactttgacccaccccaattttcgtccacttctccctcaccccttccttgtaatctctctccttgaggcatcctgtggatgttgactgtaatctcccctggaggagggctaagaaatgcacctccagagggtctgtttgccattggaaccgcgtagagaaagcgtgcaaacccgtcaactgctcccgccgttcctctccctcctcaacccaggctcgctacagaagaagggagtagggtctgcccccttgttgtatctattttccccttctccgccagggctgtggccggcaaggggctcaggaggtgagtcccttgcccacacctccaaccccgctggcccggtttataacatggacagccctgccctctagtgtctgcaaccgggagccctaaggcgccatcagctccagaatttctcttttataacctaagcaagacctggagtacctcggagctgcgacctccagttcacaataccacctgcctcacacccgggctcatcttttcatcccacacccaccacccccctctccgttcacggtgtcccgggaggctgcgacctgcgtagatgatttagcagactgcccctgcccatgctcctgctcctgctcctcctcctcctcttccccgctctctccctctcgcctcctcttccagtccaggcgcccagactcggcgaagcgcagcgcctgccaccagcggtgcctcgggctgcccggcgcgccgcgctcccaggttctgtctcgccgcaccccggcgggcactggcgcgggcaaggacgctggcggggagaacgccctgggctcaacgtactccagaatcgaatgttgagagaagcagtgctctgatccagctcaggagaaaaaggagcgggttccgagtgagacttctggagccagctggacgtgccggtttgcccagtgcggcgcggctgcacgcaccgtccacaaggtgaggggcgcacaccttccgggacgaccttggcttcccttcttacccccacccactccaggtactccagctctggcttggggatgtttgccagctttgaggcgcaaaggcggcgggagttgggatgcggggtgtcggagggagactgagggtcgcccgggcaccgtgcctgcaccctggattatagtacagagagcatttcttgttcaaacaattcctcaaatgtgtgaacctgagaatcaacattgtgtataactgtggtttgagcatttcatcctgcttccttgcaaaaggattagaggcagcttaaagattaaataggtatggaacgggtgctggggggggccagggaaaacttgagtagaaatcacagggaggtggtgtgctccagggaccccggaagaactgtgtgatttcaaagccagctgattaaaaaacctttgattagaaaggactgcactgttgctccagccctcagaaaataatactgtgctcagtcctgataaacaaaatgcccaggtgtggaggtaatgaggcaggctcattttttttaaaatacaaaataaatcttggaagtaagagttaagatgagaagtttggtcttaagccatctccacccaatactgcaaggtgagaggctgaccccctacctaacgaaaaggaaaggaaattgagtctaaagggaagtgattccagctcctatcacaggatcatagtggttttgcatctatatgtatatttctgcctgtgcccagttttggaagaaaggaccttgtattcaacccaacgctgcttgtccttgagttagaaggataaggcagatggtgtcagcatcccaaggtgtttcttcctaacctttcttattgtccttccttgcctcctgcaccaaatctcttggggagggagcagcccaggaggaaataatagatcgtcaaatgggttgggggagcagtgttttttccaaaataatttaggctcattttatcattcttatgttttccctcaaagctctaagcagtacatcg

SEQ ID NO: 11047 - DNA, 6000 bp, Homo sapiens
tagtagaaatggggtttcatcattttagccaggctggtcttgaactcctgacctcaggtgatctgcccgcctcagcctcccaaagtgctgggattacaggcgtgagccatggtggccagcctccctcactaatctttaagagttttaagggcaaagattatgtcttaatcatctttgaattcctggtgcccaggaaagcatgtggcacactgaatgcaccaaaaattttcctgctaacctgagcctaactacactgataataaacttatgcttttttcaaaagaagaacagttagaattaaaatgttttcatctcatatcacttttaaggtactttaagactttaaataatatagaataaattattattatttctaatatttcaaaatgtgagagaagtaaatacaaaatgacctgacatgaaaagtattaaaaacagttctgctaaaattatatggaagaaaaagagtaatgaattgtgatcctctaataatatcagttccccattctatttttttttttttttactaatttatatatcacaccatttgatagatttcattttcttcccaggtcagacattcctgtgatgccagacagctatacagttttcaaaaatagcaagatgtttgtccttcttacaagcaccactagaaaacagactgctccttaagctatcaggcaaatactctttgatcccagggaatttacaatggagggcatattatcagtttctattggcaccataattctgcacaacaacgaactgaacctcaatgtggcaaacaaaaatacacatatttaagttcatgaatctgcagagttcagctgatctgggcaggcttgactgacctcactcaaggcttgcacacctgtctggtcaatctacagtggcttcagttggaatgactaggatgacttggctttgctctgtatgtttttcatctccagcaggctagctggagtatgtttaccagttcaggtgtttttccagcttattttgtgtgacatttgctaatatcatattagcaaaaataaatcacaagggtgaccccccagagtcagagtgggagagcatggataaaggtggggacacagggaggggtgaagaattaggaagattttttcaaattaccaaaacgtgtaattttttcatttgtcagctaataattcattcaagggagtcagatatccttggctcacattgatcatatcaactactttggcttggctttctggtaggaaaagaaataagtgccagcatttatgttattattttttaaaaaaagacctggctttgacaaaataccagtaatgtatgatttttattaaatattgtcaaccaactattcttgcctgaattttaaaaagcgctagtggcatcagtggtcccttgagaaggctcccagaccaccagtgttgttcccagagcacactttgggaaccccagattaaaatagatatcattggtccctttgaatgtgttttcatacagattaatctttgctttatgcaatcccatcaaatacaaaatctcctggaaatattattaaatattgatggccctgctcaaaatgaagattacaaaagccgaatcagattggcatcactcttcaaagtaatttcttaaaagcagcataaaatggaatgaattataaacaaaaatgactaaacacgtcctatcattcacattgtattcatatccatgaaatgggcaaggccttcaggcttttctctgttatctttacctacagcttgtgctcttttcttacacatgcttatgtttcttgtattctttcatctgatcactttctattgatcatgacagtaaaagtactttgtttccatagtgatatttgacatgttacagatcactgagaaccctaagggataagaaaaaagtttgggtctgcttaggatgcaacataataatattttatagccttccaattgtttttagctactgcagtaacagctttttaattgaaatttaacttattttgtcagaagattgccttgtaataccagttgtcaatgaacttttaaaaattaaacctcaagccaggtatatacctaaaagaaaggaaatcaacacatcaaaaagatatctgctctcccatgtttactgcagcactattcacaataacccaatttagatgcaatctaagtgtccatcgacagataaatggataaagaaaatgtggtacatatacacaacagagtactattcagccataaaaaacaatttgcaaccacatagatggaaccggaggacattattttcagtgaaataagccaggcacaggaagacaaactttgcatgttctcacttatttgtgggagatacaaattaaaacaaaagaactcatgaaaatagagtagaatgatggttaccagaggctgggaagggtagtggggatggggggagtgggaaatggggatttttagcgggtacaaaagtatagtcagataaaatgaataagatctagtatttgatagcacaacacggtgactacagtcagcaatagttgattgtacatttaaaaataactaagggtataattggaatgtttgtaacataaatgataaatcctcgatgtggtggataccccatttaccctgatgtgattattattcattgtatgcttgtaccaaaatatctcatgtaccccataaatacatacacataaatattaaaaatttttaaaaattaaacctcaaatcaaatgtgaagttaatttggcttgggagaaaaagttttaaattcgaaacatatttaccaaagctttacataaacccatgccaaaatattggtaccttctattccaactattctgttcattttaatataacttgtgtaaaccagaaagtctatgagataggtctcaatcaatttagaggtttatttcaccaatgttaaggaccatggcctgtgacacagcctcaggcagtcctgagaacatgtgcccaaggtggtcgggctacagcttgattttatacattttagagaaatggaagttacaggcaaagacatgtatcaatacatgtaaggtatacattggtttggcccatctcaaagcagcgtgggggtgggcttccaggtcaaagatgaattcaaagatttttcacattttcaattagttgaaagagttaagctctgcctgaagatgtgaagccagctggagttaaggtaagcgggggtgttgtggcagccaaggttctccttatgtagataaagcctccgggtagctggcttcaaagaatagatgtgaatgtctcttatcagaccttaaaagatgtcagactctctggaaaagacctagtaaggggccaggcacagtggctcacgcctgtaatcccagcactttgggaggccgaggtgggtggattgcctgaggtcaggagttcgagaccagcctgaccaatatggtgaaactctgtctctattaaaaatgcaaaaattagctaggcttggtggcatacacctgtagtcccagctactcgggaggatgaggcaggagaattgcttgaacccaggaggtggaggttgcagtgagccgagatcatgccactgcactccagcctgggtgacagagtgacactccgacactccatctcaaaaaaaaaaaaaaaaaagatctagtaagggaaagagattttctatagaatgtaagttttccccaacaagagacagctttgcgaggccatttcaaaatagtcaaataaatatattttggggtaacatatttttatttctttcaggtcccactatgtgtcacgtgatgttattccagagtcaggttggaattttcttattgctacagtatattttaccagtcttacgatctccgttttaatgttaatgctggtcagttgtgtctaacctccaacgggaggaaggtataatgaggcatatccaaccgcccaccccttcccatcagggcctgaactcatttttcagggtttttttgagattaccttggccaagacagaggtccattcctttcaggggtgggttggtgatggtggtgcttagaattttatttttggtttttgtattagtctcttctcacactgctagaaagaaccacctgaggctgggtaacttataaagaaaagaggtttcattagctcacagttccacaggctgtacaggaggtatggctccagaggcctcaggaaacttacaatcatggtggaagaggaaacaagcacgtcttaccgtggtgcaggagagagagagaaagagagagagtgtgaagggggaagtgctacactcttataaacaaacatcttctgagaactccatcatgggaatggcaagggggaagtcggccccatgattcagtgacctctcaccaggcccctccttcaacacaagggggctattattccatatgagatttgggtggggacacagagccaaaccacatcagttttcacgtgtatcccaacaaacttaaacatcagcaaagtatgtgcaaaccagcatccctatatctattcttgtctcaactgcacctgcatacatcctgcatcttggactctcaaggccctaacgtaatggcagagtattaactctacacttaaatgactgttcccctaaagtaggggtaggaagaaatcagatctagctttctttcccaaatcagaatgctttccactttcatgaaataaacatacttctaggagatgtctccttttatttatacaaacatacacaccgaactggaacgtaatttgaagttgggaggtggaaaactaaaggtcaaaaagggaagaaagcaaaaacgtcccttgcacacttcagcccgcagaccccaaggaggggcgcgaggtcctcagaaccggaaaggctagcactggatgggtccccgcagccccgcgccgctgcgccgcagcctccggaagacaggggacgctgtggcgccgggcggggcgccctccgccgctctctctagcaggcggggcggcgaagcggggcggggcgtctcgggcgaggagaggaggtgaccccgcgaaaggtaagcggcggcttcggtggtgttgagtggctgggcgccggcctggaggggccagggcggccgcaccatcacgctcccgtctctgcccttcccagctgccctgccggtctccctcccagggagggagcgtcctctcggatagcccaaatctttgcctctccgtggactccctgtacccgcaccccaagtcggtgaagctctctggccccacagagcccatttcccgtactcaccttgcgggctccagtttgttcggtgcttcatccatggacacccccaccccgagaactctctcgtttcctgcagtttcttagtgtcttggctcaccagactcataggggaacatggtggtgttttgaggagacgccgcttttcttttgtcatagtgcggacactcgtgctttttcagccctgcaacacaatgtgtagaacttaacggaatgaagttttcttttggaggcttccaatgcgtctgtctttgagtaagccttcggcaccgaacagtagtccatgacattgggggaagccagatgagactcagattgtcagtactcaggctgtcgccagcaaagcctttccccttttttcagagacagtactacatccaagaggtggaaagatacttttgttttgttttgtttatttatttatttgttattattataagttttagggtacatgtgcacaatgtgcaggttagttacatatgtatacatgtgccatgctggtgcgatgcacccaccaactggacatctaacattaggtatatctcccaatgctatccctcccccctccccccaccccacaacagacctcagagtgtgatgttccccttcctgtgtccatgtgttcccattgttcaattcccacctatgagtgagaatatgtgatgtttgcttttttgttcttgcgatagtttactgagaatgatgatttccaatttcatccatgtccctacaaaggacatgaactcatca

SEQ ID NO: 11048 - DNA, 6000 bp, Homo sapiens
aagagatgacaaggatagtaaagcagaggtgataggaatttgggctgcacaaagataatttgggaggtcatccccatgagaataggggttacatgaggaggaagagaagacaaaataagacagagtagcagtcagaagaatagaaaaaagatgtaaagtaagctctgtgatcatggaagaaaagtctagctcttctacttaccagctgtaccacttaacacctctctgctgcagtttctgtatcataaaaatgagataataatagttccaaattcattgattgggttgtcataaggattaaataagttaacacataaaaagcacttacctggtaagtgccatgtcaatcttagctaagagaatagagattctccaatgtttcaggtctattgtacccccttgcccatttttctgcactttttgttttctagccctcagttaatgcctagaataatgcttggcacattatgactttcaaaaaatggtgaataacaaaagaggatgatggattagagttatcagtggagtaggcaattgtcaaactctcttttcctagagttggcttgagtggaaataccattgatgcaaagcaagcataaaatggtagaaataggtacaaaccatcagtgactggcaggaaaaggaaagagggattacggtaatgaaaaaagaaaagagaggcaagggatagttaagctcaaatatgaaatgtctggatacacatgattattactcatgtttaattcctaatccagacattgaattttacattatctccctgtatccttttatcaattataaaatgtgacaattattggctttttagtcatattatactgtaggaaataattgctttaaaataacaataacttgggaggctgaggcagcagatcaggaagtcaggagtttgagaccagtttggccaatatagtgaaaccccgtccctactaaaaatacaaaaaattagctgggtgtggtggtgtgtgcctgtaatcccagctactcaggaagctgaggcaggagaattgcatgaaccctggaggcggaggttgcagtgagccaagattgtgccattagactccagcccaggcaacaatgcaagactctgtctcaaaaaataaaaataaataaaataaaaacaataacttagcaaataggttttggatgcttaatagcacaatgaaagaaatatgcttaaactgtcagggaaataattttcttttggtatctatatctatatatgttctttatggttaactgcttactattctttaaacattaccacatttaataatctattatatagctaccatatttgaattcaattataacctccttaagccttttggtatttgcttcctcacagcctttttatttaattaagttcatacttttactttattaccaatggatacagtactgggcttctttttatatacatcattgagactagggtagctctgatacatgagcaggaaatggaagagagcaggggattgaggcaaatactgtagttttctagtgacaatcagaaatcattagggactcaagtggcattagcaatggctgcttgaagcactgtaaggttatcttatcaggcacaggggcttgtatctcatatgttaaggattgctgctgctttctctaaccagagttgtaaggaaaactaggcacacatgaaagaaagacattaaatcaatatttttttcctccaagactgaggataattcagagtgagaaagtaaaaattagttcagagtaagactgtaaatagctgcttggtcattaattgagctgggataacaaacccaggtaaaccctgctgcaaagttaatgggaaataactaagtatatgctgacactataaagtataatagcaaggcccttctttgagtgtttgctttctaattcactgaaaaactttgttctctaaaatcatatactctaggaaaacttgctgcttgaaattacatcagtaagaatgaaacaccctacttttgcttggggggatctacatcattttcatacaaagaagcagcctcaattaaggggctcctgaatacaacattccacatctatggtaactttgtagttttcaagaaacaggatcctgagactgttctacagtccctattggatacatatagtcctgctttgagtttatcaaacactgcttcctttaaatttcacctaatcccatccttccctaaaattctataaatttatcttttttgtttcctgagatacctctggtgttcagtttccctcattggaatgtgttttaggtggttcttgcagtgctataaagaaatacctgagcctgagtaatgcataagaaaataggtttaattggctcatgattctgcagcctgtacaggaaacacagtgctggcatatgcttctgggtaggcctcaggtagcttttactcatggtggaaggcgaagtgggagcaggcacatcacatggccagagcaggagagagagagaaagagagagagagacttttaaaacaccagatcacctgtgaactcagagcaagagctcacttatcaccaaggcgatggcccaagccattcttgagggttctgtcctcatgatccagagctcccaccaggccccacctccaacattgaggattacaattcaacatcacatctgggcagggacaaatacccactttatatcagaaggcatcagtaagctcaactttgtcagactatagtttggcagatttgtcctgttggtattgggctaactgggttaggacaaagaggcatgaaaatctagttaagtttgatgccagtgaagtataatagtcttttgaggcaatgaaaatgtataagaaaagtaggattcaacagcatgatgttatgtgaaccagaaatgccacaaaaatggctcagcaacatttgacccaccactttaattgggatctctgtgtgtgtgtgtgtgtgcgtgtgcgtgtgtgtgcatgtgtgtgtgtgtaaaatgcgcttcctcaccagaaggaatgatagttcctagttgattctaccacctaggacaggaaaaaacaaaacctcttgttgccagaaattaaaacatgcttcaaaaagctagtgcaggccaggtgtggtggttcacacctgtaatcccagaactttggggggctgaggtgggaggattgttttaggtggggagttcgagaactagcctgggcaacaaagtgagacgcccccacccacaatctctacaagaagaaaaaaagacaaaaaaaaaaaaaaagtaaaaacagctggtgcagacttgaaaacagaggcaggcttacaagtgccttttggaacaaattgagcatttagaaattatacttaattgatgtaagctgacactataatgatagtccaaaatgggacaagataaaccatacaaagcagtagctgtaaaacgaaggactatatgatataatatttttaatttttaaaattaatttcacgtacatatatgaatattgtttaaatgtatgcataagtacatacacagtagagaactgaataattctactagtggaaactgtatcaattacaataagggaagattagcaccagtgagcacacttactaccaggtagaggaaaagtccaacactattgcaaaatgagattaatcaaatgtctgcctctacaaagtcaactctggtctcctgggagcccctcccaatattaatatgatgctaataaggcatgcaaaatgttccaacaatgttaacagaccagatatatctatatgtatatttaacaagacaatggtatacaaccaaccctctaaaaggacaattttggggaaagaacatgctgcagaaggtgtgggctgctgggcagctcagaatcttgcatccctattcctgtaagtgctgaggtattttcatattattttaaaccaatccacatatcttgaacatcatttatttcaccaatgaattatttctaatatcaattatgatagctaattaacatcccctagtgaaagtggagattatagtggttaaaatgcctgttgatatatctaattttttttgttttttgagacgaagtctcgctgtgtcgcccaggctggagtgcaggggcgcaatctcggctcactgcaatctcccgggttcaagtgattctcccgcttcggcctcctgagtagctgggattaccggtgcgcgccaccacgcccggctaattttttgtatttttagtaaagacggggtttcgccatattggccaggctggtctcgaactcctgaccttaggtgatccatctgcctcgacttcccaaagtgctgggattacaggcgtgagccaccacgcccggccgatacatctgattttttaaaggccgttttgttgtgcgaagatcattagttagaatgcctggctgggtaaatacaaccgatgactgctgacgatatggaacaggcacaagacttctgaacgatatgtagaataaattataacttatctagaacacaaggtaacagtggaagataatgagccaggtggaagttacaaatgttgccgcaagtagtttctgttactttacgagttctgggagcttctctaacagctttgacaggagtgaatccccaaggctaaacccaaatccttatttgccgcctactcacgcctttgtgaggactacgattcccagacggcaacgctcccttcactcaacttccttagctggcggggagacgcagtttacagaactacctccccaaccgaatttcacacacctgtcacctaggacgcggccgggaaggcctcccttcgatccgcgttctccccattttggggtgtagcttggattcctgagcccagttttagtgcgtggccgaccgggaggccggcgaggcgctctaggccgagcggcttcgtctctatgaccacaaggggcggtccccggtgtcctgcgcgggggcgcggagggggcgggcgtcagttccgcggggggctgtcggggaaccatggctgccccgagaggtgagaactgggtctgctgggagtggggagtccgcggggggcggcggcgggcgagcatctgcgctggtcagcccctgtcgggcagcggagcaccctggttgcccagtgcctctggggcctggctgaggcgtcaggagtttgcgtggagccgctcccggcagtcagggcagcctgccttccgctgcggctgcagtctccgcggctgactccgcgctgggcaggtcggagtcagagaccgcactgacctccactagctgggagtgggtgggaaccgaattctgacaggccggggctgcggcggacccggagagaggccagggcgtgggtccggggctggaccgcattacccagcgaggcaggacagttcttcaccctggccccgcggctccggtctcctctgcgcctcctaccctgtggatgctcagaggcttaaaggcaggctccgggcgcagatcccatgcggcggctgggccatgcaacaaccactaaagacatcactggggcgtcaaaacagcactgaaatcgtaacgaaaggaagataacagtcgttaacagttcccacctgtatgctgtgtgtaattatagagaatgctgtatgctgctatttggggtggaagctgagatccacctccctcctcctgagggatggcacattcgggtgaaggcgtatttgttgactaattgacatttaaggagggcgagtctaattgactccgcaccactttttgctgagcagtgtgtgtaagttgggaccagaggtggattctttgactgtggtgcattaaccaggagaagttgggcaacacccggattcttgctccacccttcctccatagagcacttggcttcacccttgaataaatattgaacgaatacataaggaatatcttcttgcgtgggtttcaagttattttccctgttgcggggtccatgtttctcatcaggccctgcccaggggcattgtctttagttgcatatgcttctcttatgtcttctt

SEQ ID NO: 11049 - DNA, 6000 bp, Homo sapiens
acattgtagatcagtagataaatacactgaatgtattaacttgaaaatcagtccttgattcagcatgtctcttttatttatttattagaaagctgaatttcattcattattctagtgatttcctgaaggtggtttcataagaataatagtccctgagttcttgcatcttcaccattgtttgtctattcccattgtacttgaaaaaccatttagctaaaaagaaaaagaaaaccttagttttattttattttctttggtttcttgtaagctttgttgcactgatattgaatggctcgattccactaaagttgcagtgaagacttctgaggccagtatcagtatttttctttataagctactgattgctttgcctgcatgcctaaaaaaattcttttttaaatttaaattctagttactgtactaggacacatctcaatgtcaatgattctggggcaatttttcctggtaatcattgtttcttttcaaagtgaaatatcaagtcatctttcatttgaagaatgtttctttctttaataatatattgacatatttattttcccatcacttatttcttttctctaattatgtatctattggattaccattccctatcttctccatcttttgtattctctctaatcctgtctattttttctttacttgcatttcattttgttagccttccttatttctgtctcttcttttccttgctgtgtctatctcagtgtccattttatcttgtaattcttccatttatagtcttaattcgtgaaggtattttttttcctcacttcttttctgagttcccccagctatgtgtcaccagctcctattgtctctcatcatcccttcccaagttcttgcatttgtaccttgtagttttcatttataaaagcaattccttcattgtgccttcttgaaaatttctgctgtaatgttagaacaaatttctcaacttcttcatgacatcattgctatggtgtgtgttcttcaacaattgatatattttactactcctttggaagtcttttcctatactacttttgtgttgacagtgtgtccattcttttttcaattactcatatataactgagttaaatttttcttatgtaggttcttgggaaaaggagaggaaaataactcctggggttttcaaagggtttctcttcactgctgctacagagatagattcactcctctgcctaatttttgtgtatcactccattacttcctgcaagacacatccaagtgggcttctttcactatccacactgtaggaaattccagttcctatactgattggtgcaaacaagaaataaaggtttcgtaagtgacagtaagaacttaccttcaggaatcacatttttgtaggttttctgagattagccacaactgagtcccctgcatttgtcaggtttctttctttcctccttttgcagctataccccaactctatttcctgaatccattgttgtaaccagtggaaattgattttgttcttctgagtgaaagtctcactttcaagaagtttttttttttttttttttttttttttggtgtattctcaaattaggtatcattgggcccactctctgcccttctttctttcacttctgagacttctggttgatctcagcagttctgggatctcacatacaaattttggaaactgcagattacctgtcttttgattttactgaaaaaaagttgtgagtgatttttttccttttgattctttggtacattctttgggaagaaagaaggaaacctgctaatttttgccactgtcttcataatagattcagtccatgtattcagcagtgctaatcatatgtatgatatagtacatatgtaatttttagaagtgtctgcaacctcagaaacatttattattctccatttttctcactttgaataaaaacagatgcttattttttaaagttaaggctcaccaaaattttctcttgcctaaaaagtacccactgtattctgttactacaacaaatgtgactctcttaactaacccgtcattctcctcttttcttcagcagctcacataaggactggttatagcagaggctcataatctgtctttctttactcctaatctttttaatgcctataattaaattattaaatatttcttctttaagcttgaaatttatcatgatcatcattattactagaacgtctttcttagtgataaaactttttttattgtatcactggactcttaagcctcacaagggcacagttagcaattttcttaactgtgatatccctggggcctaacatattgctgcctacagggagtgctaattgaatatgtgttcaataaatagagcaatgatatttcctttgctaaccaatatctggcactcatgcagtatcagttcaaagacagggttttgaatctttctgattttagaaaatttcagcatgagaatttgttttcaattaaataagttcaaagagtcagggttttaaaattaagcttttattgtattaattgattaattttcccatggtgtaatgcataacatagtgcaacagtaatagagatgtagaaggggaaagaaatataaatgggtgagaatgctgtagtaaaggtgacagagaagttttcacccagcctcagaatctacattgaaatgcaagtccttcagcaggagagttcaatgccattccattgcttatcatcctgttcttgtctctggtgggccaagcggctggggatgtaagctggagggaggagttagaagcttgctttctctactccaaacatcacccctttcctttgcttggctgtaaggcattatagcttgcgtatttgtctttgccactttagaaccataaaatgagactataagctattgcgttatagtttcataattacaggaggaaaatagtaaaaattctcaaaggtaaattactttaataaggaagggatgagaaatattataaacagaaatgagaaaacagagatttaattaattcttggtaaccatcctctgcccaagtagccgctggcatttgcaaaatttattgttcacctctgtagtataggcaccactgagaagacttagggagctgaatgaattgtaagtctttgccaaccttttatttctatggtctttattgaaagaataacagtgggtgaatttgcatggtacacctctggatctctgaagacagtaacacatgccttttaaaagggaggtgtattcgaataattagatattttttccctaaataaggaggtggttctctcagtcaggtcattaggtaaatgttgaaccaaatattttcattagcagatatactcaacaggacagagtctagcaagttgataccgcccagcccatcaagtaatactttatctccaacattgttttttccttcatgtgaatgtatacaggaaaatctagaggtttttcatcaatatttaggtatggcctattgcattgaaaatgtttttccacattgcatttacagtcaagagagcactttttaaaatatgagaacatttgttatataagacacacttatgtaaaatgaaatgcctaccttatttattctagagactatgatcctttaggcttttaaaaaaacgaatccaccaactgaaagattacttcatttttttttaaagcaacacaaccagccagccaaacaaaatcagaatctctttccctcctgggaatgtctgggaataattagctcactttatgtgttatgttatttgaggagagttttaccagacttttttttctagtcatatcttttagacacataatctacttgctccctgtctatccccaattaccacgtgaaaattataaaataaaattacggctcacagaaatcagttaataatgttccacttgtttttatatttactgaatgtgtgttaactcaccctctggatctcgcgcgtgtatctgccctcagtacagtatctatttgcatgcgcctctttgtagtttgcgaatatacaggattgatttagagtcaagtagaggaaacgaaaatccacactacgaaagcgggaccaaccctaggaaaatgcagggggaaatgaaaagctctgtgataaagagattcagagatctttcaatccctaggtttttagaatgttgagaaaagggaggaaggaagccaagacagaaggtaatgggctgtcactatgcccttcacacttacaaccttcctagatcattgagaacacggtccgaggcaattgggttaaaacgatatatgtataaatttctttttttacctcgttagctggtcaaccccggcggtaaacaaccaaggccacccctgcccaggcaacagctccaaggggcaggcgatggttgccggcattgagctccctgctggcgccttctggcgggacagccagtgccaaagagcgcccagggaaacaaacaccaatgggggactatacagatgtcatggatgcacatgtaggatcataatctgcccagaaagaggagagaaggagggcgacaggctgcggatcctggtccaggagccgccgcaatggagcgggcggcagtgtgcgcgcacaggtgccacaggccggtggcggggagagctgtagaggctgcctcccggactcagcactcgcaccagcgcgctgaagccgcggctgctgccaagcttgggtaacccccagcctgagccacgagaggaagagcccaaggaaagggcgcgaagggggaaggagggtagggtagaaggagggcgggggagagacccatcgcctcatcttacatttcccctcccaagctcatttagtgggaacctctgctgggctcctgcgcgcctccctccccaccccctcaactctgggcgaccatctccccctcttcccttgctcaccccccacccttcctgctcttccgtccctccctaccgcgtgcctcctcccctccccctcgcctccctcccctccagcggcagtagctgtagcagcttcagcgaagccggagatgggcagagagcgcgcgcggcgcagcagctccagattcactgctctcccctgcagctccccgcgcccccgccgctgtcgctgcctcggtgtcccccagccccagtcgcgctcttaggacagcgccgccaccgccgcctggccctgcctgcctcctgcgccgcgcagccctcgcgagcgccccggatggcgctttacccctaggaccggtgagtaggcgggagagtgcagggggtcgggcgtcaaagcttggcgcggagagaacatcttttggtttgggaggcaccccaaaccagctgctgtgattccccgtcctccaggcagagggtccagggagggtgttgctctgtggtccccaaggggatgtttgatttcaactccacctgctggcaacctgaacccctctccgtcttggggacagctgcctgcagctcgcagtcccgcctcaccttccagcccccaggctcccacactagcagcagtagatggccccgaccctctggtcaccccaaacagggtcatctctactgttactgtccctgcgttcccaccttatgccagtgcacaaacgcccctatctgccacccttcacccgatctcgcgctgacaaagccttctccacaaagtcctccctgacccaccttctctcctttcccaaagcctggctctcgagcccgactgtcccgtcctattccttcccagggtgaatggtccttagtgaattctgacctcattccctctacacaatggtgcctgtccagattttctgacagtcacctcaggaaattgacacagacacgctgtgatcctggtttctgtacagttactttgtgtgttactcagcacctgggctgttaagggtattatcaagcgtgaaaaaataaagacaaaaaccaaaccctttggaaacaaactttttgttattgttgttttaaagcgcagaactatttgcattgcttaggtttgttctgttcattgagaggcgtcttagctgagtacaggaa

SEQ ID NO: 11050 - DNA, 6000 bp, Homo sapiens
atctagttacactaaaattactctttcagtttttccaaaacaatgcataaataattcaggcaaaacttggcttgttgtctatatcccccacaccccaaatatcctttaccctttttttctcctgtagatattgatgccatgcaaattcttgaagaggaactaatataggatcttcaaatttggatggatgattattcttcagattctggatttcgaaatagaataattattttagagttagttctcttttaaagtcaaaatcatgttccccaatttttacggggtttccagaagttttatacaacacaagcccaggccatgcagtccgactgagatattccttgctcgctgtcagaggcccttgtgttcacctccaagttgctccccagtccagggagcttatttgtataagtgcctcgaagccaagaactatgtcttagaggctgggcgcagtggctcacacctgtaatctcagcactttgggaggctgaggtgggcagatcacctgaggtcaggagattgagaccagcctggccaacatggcaaaaacgtgtctctactaaaaatacaaaaaaattagccaggcatggtgggtgtgtgcctgtaatcccagctacttgggaggctgaggcaagagaatcacttgaacctgggaggcagaggttgcagtgagcagagatcacgccactgcactccagcctgggtgacagagtgggactctatttcaaaaaacaaaaaacaaaaaaacaaaacaaaacaaaaaaaactctgtcttagtattcctatattcccacctgccacaatctctggcacacagcagctgaataaagagaggaatacataaatgggttaacgccaatagctttgtgatatgctatgttctttaagactagtttttccctaagtacaactcttgctaaacctcggtggatctacagatactttacttataactaaaataaataaataaatgttcttgctttaattcactgatgaatgggggatgaccaaaaagataataacgttgtggttataccccttaggaaaaagagaagtacgaaatcagtttaggtttagatacggaatatgttctagtttgacatagattgtctgcaggaatcagagaaaattcttattggttagcaatccaggcttggttcttgatattcgttatactttgtctccctctaaagcaagagaacacaggtgaagcagtaacaggcctcttttctgagtgggtttgggaagtagatggaccaaagggaaaagtgacagctgctgcaggtggcacttccctgctagggacagtgcttggaggtcctgtcatggtccaaaagagggtgctggcctagcacaggtcatcaggggtgagtattccaaggggagaaaaccaggatgtgagtgtggcctactttgggaatactcatgaagagggcaacaataattaggccatttccttctgtccccaagcaatagctgacgcatcttgtttctcagttccagtgtctgtgctcagtttgaggcaatactgcaggttgactactatttcttttcttttttttttttttttttttttttgagacggagtctcgctctgttgcccaggatggagtgcagcggtgtgacctcagctcactgcaacctccgtctcctgggttcaagcaattctcctacctcagcctcccaagtagctgggattacaggcacccgccaccacgcccagctaatttttgcatttttagcagagacgaggtttcaccatgttggccaggctggtcttggccaggctggtcttgaactcctgaccttaggcgatctgcctgcctcagcctcccgaagtgctgggattacaggcgtgagccaccgcacctggcccggttgactgctatttctaaccatctggaataaactataaatccagcagttttcaaatgaaacacatgtctttttagtaatttagtatttgttgtagaacggactatatccaaatgaaaatgtatgcaatatttgttcctattctctacaaatttcaatcttttgtgtgtttggtttttacattttgttttttatttttcaattgacatataataattgcacatatttatggggtagtgatgtctcaatacatataatgtatacttatcattagcatatccatcatctcaaacatttattatttctttgtgttgggaacattcaacacaaatctaaatctttgtcagttaatcaggcatctgggatcgctcacaaattatcatgttaggaatacattcagatatcctttattaagacagaactagaggctgggcatcaccgtggcccatgcctataatcccagcacttcgggaggtcgaggaggattgcttgagcccaggagttcaagaccagcctaggcaacacagtgagacccccatctcttccaaaaaaagaaaaaaaaaactagctgaattttcatatttgaatataactacagtaggtaaaagtttaagaaagggaaaattgacattattaatacaataaagatattgttttctcgacctactgtcttctacatcaggggttggagaggaataatttttagatttgtaaacagttttttgtttttttttttaagacagagtctcactcttgttgcccaggctggagcacagtggcacgatctcagctcaccgaaacctccacctcccgggttcaagcgattctccagcctcagcttcccgagtagctgggattacaggcgcccgccaccatgcctggataatttttgtatttttagtagagatggggtttcaccatgttggccaggctggtcttgaactcccgatttcgtgatctgcccgcctcagcctcccaaagtgctgggattataggcaagagccaccgcgctcggcctgtaaacaattctaaaaaatcaaaagaattgtatttcacgttatgtgaaaattatacgcaagtcaaatttcgtgtccataatatggttttactggaatactgtcattcatttccatctctgtgtctgcttttgcaacacaggaaaaagctaaacaggtgtgactgagaccctattgccaagaaggcctaacatatttactatctggactttacagaaaaaaacttgtcaacactttctttacaatgtggagtcggcacagaaaatatgtgccttcagaaaaagagcgaaaaaaaagagaaaaaaaatctctgaaactcattaatacattaactttgtaattaacttcatggccattaactttggtaataaaaggttgctgatcccgtctgcccaagcaacacagaccacaatttctacttttgatgattcatgtattattttcacagacttctgatcacttgttttctttttattatttatttattttgagacggggtctggctctgtcgcccaggctggagggcaatggcgcgatctcagctctctgcaaactccgcctcccgggttcaagcgattcttgtgcctcagcctcctgagtagctgggattacagagaccgccaccacgcccggctaattttttgtatttttagtagaaacggggtttcaccatgttggccaggctggtctagaactccgcctctgcctcccaaagtgctgagattataggcgtgagtcaccgcgccaagatatcttctatttgggaacattttgttgtcaagtatccagctgggtacttcgggagttaaaaacattaattaaggcatggtcctggagtcaagtgagcttcggcgagaagtttgccatggacagcatttctggagcaaaccctgtaagaagggctgaattctacatgccgacatttcatacatttctcctgcatttcaggttgtaagtgtgctgcagcatgactgatctggccaaattcttccagtttcctcaagtgcttttcctttagtatcgttctgagtgtttacaaagaaatgattttccaaagcacttgtgaagcatctagttcgattggaacgcagtgacggctctataaaattcaaagaaaagaatctccccgcatgaatagttaacaaaaatcgcttgggccgaggtggcggggttgtaaaaattagctagttatatagtaatcatttttccataaatttaaatatctctaattaaagaaaaaattgacgtagaacaaaatctgcgggtgtgtgtgtgtgtgtctcggaggggattaccttatctcccagcgcggttctgaacccttccttcgctcagttctccctttaaaagtcgccaagtggaacgcccgcccccggacccgcacttgcccccctatactctcctcccggtcctccagacggagcccgcccggccaggacacgccagccccttcctcggccggtggggcctcgacccccgccgcctcgaggaggcgcggcgcctgcagtccacgcggccgagagcgggtagcggggagggccgcccacgacggaggtttctctgtggttacctcagcggcgctcttcgcaatctgaaagttggggcagctgaagagccccaccaccttcacctgcagcggccgctccggcagcgacggcgagccgcacctagcgtgcgggggcccgcacggctgcggccttgccatggccgcgcccggggacgcccggtgaccccaaacactgcgcgtcgctccggcaaccgcgcggccccgcctccgccgctcgcaggaggcggggcccaggggcgggtcgagggcggcccgtggcggctgggcctttcctcaactttgcgcctgttgctgggccgccggcgcgcgggcggccgcgaccgccggggacgagcttggaggaaaaggaaccgggagccgcccacccgggggcgctctccggacccccagggtcctagcgcgcggcccttaccgagcctgggcgcccggatttcggcagcggatcgcctttccgggttggcggcccgcctgattgggaacagccggccggttgccgggggaacgcgggagtcgggcccgacctgagccacgcgggcttggtgcccacctgtgcgcgccgcctgcgaagaaggaacggtctggggagaaggcgccgccggccgcccccgtccccaccgcggccgtcgctggagagttcgagccgcctagcgcccctggagctccccaaccatgaagcccaacttctccctgcgactgcggatcttcaacctcaactgctggtgagtgcgtctgcggagtgcggtctgggggccaccttccgttcgcacccatgcagccttcctccccctatcccgccccacgatctcagggtgtagggaaaacccgaacctccaaagtccacatctggccccagcgccggtggtcccagcagtcgcctcccctgccccgctcttcccttccttaggggcattccgtacttgagcaagcaccgggccgaccgcatgaggcgcctgggagactttctgaaccaggagagcttcgacctggctttgctggaggaggtgagattgtgcagcacggtgcggaacccaggctgggaggagggacagaccgtcccactggggaaagaccaagcaggcatcctcaccgcttccctcaggtgtggagtgagcaggacttccagtacctgagacagaagctgtcacctacctacccagctgcacaccacttccggaggtgagaagcccactggcctgaagcctgttgtcatcccaggaggctcttggccctgccagcccttccctatcctgcctgcactctccagtctcctccagcctcctctccctctggatgtgagagaaggagaagggtgaaccaagaaggtcctatgacttcagcccatttcagctttgttttctggctgccctatactcctccaaaggctgtcgccttggttctagggctagtcccagcagtagaaaaagaaaaaaatagctgatcagagctggaagacaagggaggggaagaaggctgggtgtctctccctgtttttctggttattaagcagggcttggctttcagcggaatcattggcagtggcct

SEQ ID NO: 11051 - DNA, 6000 bp, Homo sapiens
tgcctgctaattttttgtatttttagtagagatggggtttcaccatgttagccaggctggtctcaaactcctgacctcaaataatctgcccacctcagcctcccaaagtgctgggattacagatgtgagccaccttgccaggctctgtattacttctacaactaaaaaaagaaacacatgatttaaacatatttaaaagttttcacctgaaaatacggaatcttctcaattacacactttgtggttctttaaattatttttgaattctattcaatttggttcaataaatatttgttgtgcactaacactacttggtgctgtggttcaaagatttgtgaaagactatctgacctgtctgaaaattcctacactagccaaggagattgaaaaccattctactgaccataaaaactgctataaataaaatatggaagcctagcggaaggatcagtaaaggcttcagagaagtgaattccattttagagtggagccttgaagattgagtgagatttcaccattaggaaaaggggagaggtggtcatttcagaagcagggtctgcagggaggaatagaggtgttcatacttgttcctgaaatgaggagcaggccttaagactgcagaacagagtttcagcaggtataggttagaggatgaattggtgcaggcagaatttgttggcagcaagactaattagtaggtcattatgatggtccttgagaaatgataaggaatcattaaggaatcagcagcaaggatggagagtagggaaccaggcaaaagaccttctggagctagagttgacaggattgcgtttgagagaaccaggggagaagtatattaggaagcagacccaggtttcagcttggatttgggaggattaggagtaataccaaaggagaatcaggttgaggggacttctgaaagagaggtaaaaaagtggagatgagagaattagttcagtctcatttttaaagtgcattttttggccctgcgtggtggctcacgcctgtaatctcagcactgtgggaagctgaggtgggcaaatcacttgagatgaggagttcgagaccagcttggcccaacatggtgaaaccttgtctctactgaaaatacaaaaaatagctgggcgtggtggcacgtgcttgtaatcccagctacttgggaggctgaggcaggagaatcacttgaactcaggaggcagaggttgcagtgagctgagattgtgccactgccctccagcctcggggacagagagagactctgtctcaaaaaaaaaaaaaaaaaaaagggccaggcacagtggcttacacctgtaatcccagcactttgggaggcagaggcaggcggatcatgaggtcaggagatcaagaccatcctgggaggctgaggcaggagaatcacttgaacctaggaggtggagttgcagtgaaccgagatcttaccactgcacttcagcctgggtgacagagcgagactctgtctcaaaaataaaataaaacaaaataaaaataaataaataagactgtcctaaataggaaaggttggtcttttgaaatagaataaggaatcaagtggattgttttgtttaataaataagtttaacataaactgctgatgaaaaggcctacataaagcactgttggcatttagatttaatgaactattacaccttttaaaattttataaatctttttatctgatctcaaagcacttaataaataggaactcattaaaaacataccatcactgcgctgagcatggtggctcatgcctgtaatcccagcactttgggaggccaaggcaggcagattacgaagtcaagagatcgagaccaccctggccaacatggtaaaaccccatctctactaaaaatacaaaaattagctgggtgtggtggtgcacgcctgtagtcccagctactcaggaggctgaggcaggagaatcgcttgaacccgggaggtggaagttgaagtgagccgagattgggccactgtactccagcctggtgacagagtgagactccatctcaggaaaaaaaaaaaataccatcactatgtcactatgctgtagttataagtaaacaggttcatattttcaggtggagaagatgaggtcaatccaataacacaatgtgagttgttgattagtgtggacatagaaatagaaggtagttttcctggacacctaaaactctgctccattcaatagcctattggtagttagaagtaaacactctttttttaaagagatggattattacttatgttgcttgaggccaggagttcgagaccagcctggttgctggtctcagcaatgttgctcaggctgatctcgaattcctggcctcaagccatcctcccacctgagcctcccaaagtgctgggattacaggcttgagccaccacaccttgcctcatttgttacaattaatgacccaatgttgatacattattattaactaaagccgacattttgttcatatttctttacttttaatctaatgtcctttttctgttccagtatccatccaggatatcacattacatttagttatcatgtctcttaggcttttttttttttttttgagttggaatctcactgtcacccaggctggggtacagtggcgcgatctcagctcactgcaacctctgccttctgggttcaagcgattctcctgcctcagccacctgagtatctgggattacaggcccacgccactatgcctggctaatttttgtatttttggtagagatggggtttcgccatattggccaggctggtctcgaactcctgacctcaagtgatccgcccgcctcggcctcccaaagtgctgggattaccagcatgagccacgacacccagccctcttagactcttttttactgtgacagtttctcagactttccttgtttttgatgacttttacagtaatgaaagtacttaatgggtattttgtagactgtccttgattgggatttgtctaatgtttttctgatggttagccagggattatgggttttggcaggaagaccacagaggtaaagtaccattttcatcacatcatatcggggatacattatcatctagttgaggtactgtgtgccattttttgcaccctaaagttatttcttccccccactccccctttccatcctatactctttggaagaaagttactacgcatacccacacttaaagagtaaaccattgtacttcacctccatgagggagggagtatgttcataaagtatttacatttcctgcaggagagatttgtctattctctcctcattatttatttaatcatttacttacatcagtactgactcgtggataattcttacatatgtgtttgtttgtgtgcatgcaaatatataatcgatgtgctttctttgcccaataatatgttgtggacaactttcaaagtcaataaatacagatgaccttcagaacttttagaggttttaaagtaagtatctaatcagtcttctaccaatgtacattatacttccaaattttccttatttccaacaatactggggtatcatcttcatacatacatttttgtgcacttatgtgcctattcctttgtttactattttaccctcatttctaaggcagattacacttgagctatgttccccattccacaaccaagcacggcttgctttccttagtttatgctattttctctacctggaatgctcttttcctgtcttgacccactgaagtcgtatgtatgaatcagggcttcggccaaaggctgtttgctgtagaggctcttctacagtgtttggagagaatttaagggactatctcatctctctcttttgtacatgtattataacacatcatctgagcctcctagtctctcccaggactcttttttcctaccagtttatcaactgataagaggcagaaacgagatcaatcgcactcatctgtgtactctatcacagtggtgggcacatcaagtaactagcatattttgactttgattgaagtgaagaatacgaataacagaaattaagaagcatcctcaatattgcatagcaggttactcttcttttcttttacataggatggcactccatgcttcagggagacagaggagttgaatacaggttttagtttttgtttaaagtgaaaacgactctgatgtagttgaaaagtaatgctttctagctgtctgttaaaaatgtttgttggttgaagacttcggaattgcagtccagtgaggactgaaaataagcatctttggtgtgccaaatattcataaggaaattgtatacgaatgcaagagaatggaactgaagtaataaaataagggctctgatccttcagatgacttatttaagaagccaggtggcataacgaatcttacatattataattagtactgagaggtgaatgccaaaacataaaacaaacacaatcgagacaatgttagtgtgactgtgacgctgtgtcggtgagttgaggctaacgatccagtgtggctctcctgaaggcccaccgcgcccgcacctaggagacgcgccccttctgctcatgctttgaggcggggtgacccacacatctgtgcccctctctgagcaggaggaggccccgtcgcagacgcgcgcgcagacagcgtctgccgcgggcacctggggccgcgcgccgcggggcgccccgcctccgctctccgaggcccaatcatctggaggctgtgggggcacgtcccgctcccggccacgcccccagccggcggggcggggggtgcttttaagaaccggcggctggcagtgggctcagtcgggggtgcggggctgtgacctagaggcttcagtgtcgatccccgaggtgttcgcgcgcgccagctgtcctcgcggccgcctgcgcgctggccgcctgcgcgctgccagcccgcccgcccgccaggggctccgccgccctcgcctcggcctcgttagcccgccaggagccccgcagctcctccgggagcccgctggtaactcgcgtccctcgcgcttctccggcgcctgaggggcccgcctcgggccatggtgctctcccaggaggagccggactccgcgcggggcacgagcgaggcgcagccgctcggccccgcgcccacgggggccgctccgccgcccggcccgggaccctcggacagccccgaggcggctgtcgagaaggtggaggtggagctggcggggccggcgaccgcggagccccatgagccccccgaaccccccgagggcggctggggctggctggtgatgctggcggccatgtggtgcaacgggtcggtgttcggcatccagaacgcttgcggggtgctcttcgtgtccatgctggaaaccttcggctccaaagacgatgacaagatggtctttaagacaggtgaggcgcggcgcccgccgaggccagcctgggcgacccgcgtggggcccccgagcgcatcccgcgtgtgggctgtgtctgcctccgagtgtgcatgtcggtgggtccctgtgccagagggtgcgagcaggggggtctttcgagttgcagacagagcctgccgcttctggggcctcggggtgcccgtctttatatggaatccagctgcagagctgtgtgtttgcaagcaggtcgcagaacttacttgccgagatcgtcctcctttcccctcagcagagcagacgctaacagtccacaggagcccttccttttattgtttgaaaacaaacagaaccccagaaccttcaaccccagtcatcgccctgtcatttttgtggtctctttcgtgactatgccagttatgtagttcttcacctgcctccctgggccgcagaggggtgtgcgtatgttggcggggcggggggtggagtttggaggaatgaaagagatttgtacgaaggtcactggagttccaaagggggccctgcaagagtcacggttccgtgcgttcccgtccccccgcctttttttgccctctgggttaaatgtagaaaacacgggaggcagccgga

SEQ ID NO: 11052 - DNA, 6000 bp, Homo sapiens
cttggcaggtattttatatacaacgtttggtttgctccttccagaaactgtatgagaaaagtttgcatatcaaaatcctactgatgagaaagtggaactcaacaatgttaaatgacttgcctgcctaaggtcacacagttagtgacagagtctagatttcagcctagttttgttcaacttcaaagtccttgctcttatttgatggacacattaaattatccaccatggtatctagactgggacacagccacaatctgaaaattgaattctaatttaataaacgtgccctctgccaggaaatatgaggaatggctatagaaatgaagaagagtctctaccatgaaggagcttataatactaaatgttacactccttttggtctattaagtctaaggaaaagaataaacatctaatttcattcattcatgtaacaaatatcagtaatttttgtaatttcagagaacaatattataatttggaaggtgtttaggacaccttaggtagtttataataagaggtgatataaaatcatccatttcaaaagtcaattgtcaatgaatggagaatagctttcaactgaggccaggatacgcaaactgtaaatgaggctttagacacaaaaagttagtctaggccaagtggtttagtggaaggatcctagattttatgtcagaaaacataattgttatgtggtctgaaccatttatggtttgggaaattcactttaactttcagagcctctgtttcctcatcagtcagtgcctgtgaggataaaaggagacacgtatggacgtgcctggtacatttcatgacctattagaagattgtgaggccaggaagtatgtacctgcagaaatctcaaattgtgacttgcagtggaggtggaattcaattattattaagaatgtaggtcaatgtttcattttttttaaagatgaaaactaagcccacgaagcttgagtcatctggagatgaagcagtcgcagcggagcagtcttggtaatggagaagatcatgtcagcgctgagaaaggcagggagggaggcctgagcaaggaagcttggagaagcctctggaggatgcctggccagggctgaatgctcagaaatggaagggaaagctcaggagattatcactgaatcagtaagtacaagtacagggcagtatggcttgagcaaaccaaaatgatcttacttcttctgtgatctgaagatgagagaatctataggtgcagggtaaggcagttttacaaatagaataattttggcctgaggaagaaaaacaaaaagcatttcaagaatggaagcagatgtatagtcatggaccagactgattagtaaaacataaaaggcagattaaaatttagtttaatgaattaaactcaagaggagaacagaagccgcatacctgtaacagccctgtaatattgttactctgttattttaggctaaagccaagaataaactaaggacgacaacaacaaaaaataacattttgttttgttcagacaagaagaacatggaagggatgcctctgcttgagataaaatggatgactaaacaaaactaattcccttttttttgtcttctctattatgtaaaaataaaccattaaatgtaagggataaaataagctttcaaagagttaactgaaaagataggtgaagaagcttgtaagaaaatatgtcctagctgtctaaagcttaacttcttcttgcctagtaaatttccatctcagcaaggagagtttaccaataaggactctcagctagaatcagcagagggagatgaacactaaaaaactggaggtggacagatggagttccagtttttgccttagtctgaaaccgaggcaagaaacttttcacagatactgaacaaaatgaataaacctattattaaaatgacatctggatacttagaaaaggaagacacaattttgtagacatgaaccacaattcactaagtagtcatttcctttgttttttgacaatattacagtagagcaaagacatccaatagacaaagctcatctgctgtctgtttggagctgcatctaggcgtaaggggtcactttttcctaatccttcagctaaggtgagagtggggatacctttttctaattcttacaaaagtgccacgtacccatgtacacaggctgctaccctgggacaacagacaaaaataggacaaggtaacatgtgggtcctcaactgataagaatgttcatcagtagcattcaaatccagtgtcggttggcagaggaaggtacctgagaatgagaacttaaatgatggcatggcatacagaccggatttacagaggtcatgaaattgagaggtggaattactcagttatatcaatgatacccaatatgtcaacaagctaagaggcctaatttaacacaataaaattcagtagaatcacaggtaaagtgctgaacactgcattgagtgtagttgtttagttcagtgattctccaactaaacttttaacactttaaggttttatttggtagattgtaatatggagtcagctgggtaatattgctgccatggaagctccaaggatatacttagggaaatacagtaattacaacaaagccattaaacatctttctagtttgtcacttgggtgaaaccttgaattcaattcttggcatcagggtttgagagagatgttggcaaagtaaatctcctcctgagagctttcctaatggatgaagaaaagctgatggagttaatatgtacccaggtaaattgaagtattctcctgtggaatcaaggctaggtgtatcctgtagattccagagagcagaatagcagatctgttgagacttactgtaatggggtgggcgggggcggggggacggggggggctttgcacaaagtgaatgtcatccagaggccaattcgcaggtcactcaaaagcaaaattgtggggggtgtgagggtaaaggggagcaaatgacagtcagtactacctcctttgaagaattctcaatcctggttgtacattgtgatcatctaggaagagattttaaaatgcagatgctgatgcttagaccctaacctcagagattctgatttgttgttcttgcgtgggggtccccattggaaagaatttattatagctcccctgctgattctaaagttctaggttggagaatcactgaactagactactacttgctgagaggttacgtaaattaaaccagatgttttttctaaagtctctttcaaatttgagaagataaatggaaattaacacttacggattacataatacagctagacactttcacaatttattctaataattgaattagtatatgtaaatctcttagcacagtgaccgtctgatatggtgtagtaaactctcaataaacattagctatttttattatatcctctccataactgttcaaacaaggtattatattgttacactatagatgaggaaactgaggttctgatgttagttttccaaggcccacagtagtaaaagcaaagtttggatttgaaccaaagattagttccagtttccagagccctcttctctcctcgacaggccttccctaaagcatcaagaagtttatgcaaattagtggttcacctgagtgaacatttaaaaaatttaatagtaccacttcctcttgacctgtttgtaaggagttcctcttaaatgcaatttctgaaaaagagaagcataaactgagacatccacattttttccttatttggccaaatagaagtgagaacctctgaggatagaggaattggatggaggtgcccttcagaactcatggagaaaagcactgctcccagtaaaatatctctcattctaatgaatgggtaagtatcctacaaatctttcacttctgtacaatctaggtctggtaggttacttgcacacactgggtggaggtggaaggggcaaagtattcctgaggtgatggccctgatcctacctcacatctccttggggcctggttggacctggctgagcgtgtttgagcagtggctgatttttggaaaacaggaggactcttctccaggaggctgtgactaccaaggttgcaaatgctccacctgaacttgggtgcatgagggatctctctctctcacacacacacacccccccaccgcgtaagataaatttctgtttgtgagctgcctacattaaatgctttgctcctgaccttctgtgattaaaatctgttccgtttgcagggttcggtgcgcttggatttagtgtattttgttggtacagtaaaaaagagaactgcttctctataggtgacccccgccccaaagtcccccctcccactaacttctctttgagaagagagtaaaaccgaattcgagagaaaagaggcagtaactattcgggaggaggcagactggagtgggcaccagtcccggtagtaagagtcttaacgtcttcctcgctttcctctcgcagagtagtatggaagcatcagctcctccccctgggcctccaaaagttacctttcctttgggtgtgattctcgaacccgaagcgtttgagtcctaagaaactagaacaagttagagccaaagaggcctggcgggcgggggtgcgggtggagtccgggccgggtggcgtggaaggccgagcacagctgcgagcggcgagtcccgggagaggaggagcgggagaaagcggggcgggcctgcggtcggggttcggccgggggagggggtccccgtttccctctcctcatcctcgtctcctctggctctggtgacgttgcggtttcctcccccctccagcggagcctcagcgcccgccgcgtccctccctccgcccctttcgcccacacctacccgcccccgccggcccggctctcagtagcgtcgcccgaggctgcagcagcgcatcccggggcatggcgcggcgggggcgcggagggctcggttcggagggggccgggagcccgggcgccctggagtgaggaggaccgggagctggctctggaggctgcggaggcgacgccggagagaacgaagcctcggctgggagcggtaagtggaggggcgcgcaagggacgagctggggcgcgcggcgcaactttcttcgggagtttcgggcgggtagccttcggggctgtcccggcgcgggcgggagacggagagccacgtccccggctgagagcggagcgccgcgggttgcgcgcccgggcccggctcggctggactccgagagagcgcctgacgcgtgaagcctgagccacgggcttccccggcggcggagcagcctcgaggggcagcttttcgatcctccccacccccttgaacgccgagcaccgagccgggaacacgatgagaacctggagatcgcattccgtgcgtcggatctggccggcccagccgcgatttcctcgacggtccttggggcctcggcttcactctgcggggttgggtggcacaccctcgcgtcctcctttccctccgtaccccagccatttgggggcaggggaggtggcggcggcttgtgtgcagatcctggcgctggcaaccctactttgcggctgcagaagccgaggaagagctccccaagcctctcccagacgctggattccagcgctcctgggctccgccggcactcggagaaattgttagtaaacctcatccccgaggcagtcccggggaggggaggaggcgggggcttgactcacagactgggaagctctgaaagcgatgccacatgggctcaagatctgtcggggctggaatctgagctaagtttgtgacctgagaactttttcgtttatatcgctcctttaaagcagcagcctcctcttaagccggctggcattcagatggaaaccgaagcctttggttaaaatcaggaggtgaacctcacttacctgaaattctttaggtcaggcaatgacgcttttagttctaggaatcttcgtgtaataaagttctttttaaaaattttttcgttggtcatggtttagaaagtcatggtt

SEQ ID NO: 11053 - DNA, 6000 bp, Homo sapiens
taaaaaaggaagagttcatgtcatttgcagggacatggatgaagctggaaaccgtcattctcaacaagatatcataaggacagagaaccaaacactgtacgttctcactcctaagtgggagttgaacaatgagaacacatggacacaggtaggggagcatcacacaccgggacctgtcaggctggggggctgggggagggatagctttaggagaaatacctaatgtaaatgtcgaggtgattggtgcaccaaaccatcatggcacatgtatacctatgtaacaaacctgcacgttgtgcacatgtaccctagaacttaaagtataaaaataaataaataagtaaataaaaataaatactatttttaatgtatagaatattgtaagaggataattttctgtggagataatatggtttgtaaaaaattaaatcattattttcaaaatctttttaaaagatatatatcctttaggggagtaagaaattaaaatattattaatcatcaacatatcagctgatatttgtcacactgatactagcaaagtataaaaccctggactagaagggacccaggacacatttgccacaacagtgtggtgacagtcaaagcagaggatgctaggggcagattagacccaagaatacattttgggaagtgaagggaaaaattttggagtagctggccattatctgtggtctcagttacctgtggtcaagataatttgaaaatgttagatagaaaattctagaagtatataattcataagtttaaaattgtgcttctgagcagtgtgatgaaacctctcactgtccgtactccatactgcccagaacgtgaatcatccctttgttcagtgtattacacactgtttatgctatgacctgcccatgggtcacttgttaactgcctcagttggcagatttaaaaaaaacataatatatacgggtttggtactgtctgcagtttgggggtcttggttgcaggtatcccctgtgggtcttggttgcaggtatcccctgtgggtaacaggggactacactactatcaaagacaagtctctaaggaacaagtggtagtggtgggaggcgcataaatgaattataaagtaacttcgcaaaaacatctgctgttttacagtgcttgaagaattttacaatgtggaaatggaagaaatcttgcagactgtgtcttttaaggccttagtttcaaaaataagtaaactggtgttcagagaagtcaaatgacactgccaagaccatgctataacttaattccttggctcctagtccaaggcaatttcttttcacaaaatacacaggcctggactttgaagtttattaatgaaattttgtcagcttgatatgttgccatctttcaagtgcagaaattaattaatttttaaaattaagagctgtgtaggagagaaatggaagcaattttcttaaattacttataatcagaaggactaggagattccttattcattcttcatttattcaacagaaatttcttgagcactgccagtctggcacagtacctggcacacagtgggagttcaatagccatttgcaagacaaattatagaatgggcatctattgactgaatgtttgccaggtagacaagactaggggtctggaggtaagtgacaaagacattctaggtagtgggaacatgtcatgagcataaaataccatgatggggttcagggaatctctacatctatcaacttgtgagcagttgtgagccccaaaggtgtgaactggctaatgcagaattcaatttcagttttagaaggatccttttcttgtcagcatagagaatggatttagggttatggatgggagtgagcatgaggtcaagggctgagatactaatcaaaaggttactattatagtaagcctaggaaagaaatgatgaggactcttctcattttgactttccttcaaaactcaaactctccctaaactttcccatgtaaaatgcacatatcccaaatcctaaaatttgatctctaacactagccagtttaggaagataaaaaatgaaagggggaaagttgaaggcatttcccctaagaagtggaacaagacagggatgcctactttcaccacttctattcaacacagtgctattaatagaaatcccatccatagcaatcaggcaagagaaagaaataaagggcatccaaattagaaaagaggaagtcaaactatctccatttgtcaggataatcatatatctagaaaaacctaaagactcctccaaaagactactagatttgataaatgaatttagtaaagtcttagtttacaaaactaatgtacccaaatcagtagccctgctatacaccaacaacaaccaagctgagagccaaatcaagaactcaatcccttttataagagttgtaaaaaaaaaaaaaaaaaaaaacccaccgatgaatatacttaatcgaagaggtggaagatctctataaggagaactataaaatgcagctgaaagaagtcatagatgacacaaacacagggaaatatatgccatgctcctggattggaagaatcaatattgtgaaaataaccatacttcccaaagcaatctacagattcagtgcaattcctatcaaaataccaacataatttttcacagaattagaaaaaacaatcctaaaatttatatggaaccaaaaaaagagccccaacagccaaagcaatactaagtaaaaagaataaatctggaggcatcacattacctgacttcaaattatactacaaaggtatagttatcaaaacagcatagcactggtacaaaagtagatacatagaccaatggaacagaatagagaactcagaaccaattgatctttgacaaagcatacaaaaacataaactggggaaaggacactgtatccattaaaaggtgcttggaaaacaggatagcaacatgtacaggaatgaaactggatccctgtcactcaccatatacaaaaataaactcaagatggatcaaacgcttatatctaagatgtgaaaccataaaatttctagaagaaaacgtaataaaaactcttctggacattggcctaggcaaggaatttatgactaagacccaaaaagcaaatgcaacaaaaccaaaaataaataaatgggacctaattaaactaaaaagcttctgcacagcaaaagaaataaacatcagagtaaacaggcaacccacaaaatgggagaagatatttgtaaactatgcatctgacaaaggactaatatccagtatctataaggaactcaaacaaatcagcaagaagaaaacaaataatcccatcaaaaagtgagcaaatgacatcaatagacatttctcaaaagaagatatacaaatggacaacaaacatatgaaaaaatgctcaacatactaatcattagggaaatgtaaactaaaaccacaatgagataccaccttattccagtaataatggctattactaaaaaggcaataacaatagatattggtatgaattttgtgaaaacagaatgcttgtagaatgctggtaggaatgtaaattagtacaacctctataaaaaacagtatggagatttctttctttccttctatgtatttatttatgagacagggtcttgctctgtcacccagactggaatgcagtggcatgatttggctcaccacaacctcagcctcctgggctcaagcgatcctcccatctctgcctcctgagtagctgggactacaggtgcatgccaccgagcctggctaatttttttttggtatttttttgtagagagggagattcaccatgttgcctaggctggtctcgtactccttggctcaagcaatccacctgcctcgacctcccaaaatgctaggattacagacatgaaccacggcacctttctttcattcttaaagaaagaactttaagtactaaaagtagatctactattcagtccagcaatcccactactgggtatctatccaaagaaaaagaagtcattatatattaaaaaaaaacacctgcacatgtatatttattgcaacacaattcacaattgcaaagatatgaaaccaatctaagtacccatcaactgatgaatagataaagaaactgtggtgtatatataccatggaatactactcagtcataaaaaagaatgaaataatgtcttttgcagcaacttgatggagctagaggcgttattccaagcgaagtaactcggaaatagaaaaccaaaaactgtagttctcacttataagtggaaattaagctatgggtacgtaaaggcatatggagtggtataatggactttggagactcagaaagagggagagtgggaagggggtgagggataaaaaaatacatattgggtacacatacatatccggtgatgggtgcactaaaatctcatatatatatgtatatatatatatatgtatatttatatgtatatttcatccatgtaaccaaaacccacttgtgctccaaaagctattgatatatatatatatatataattttcatatgtttttatatatatgaaaaaagacagcaaatccctgtcttccaaatctcaagtcataggaagagaaaaacattcataaaattctaggtttggagatttgatttgtcggctgaaacctctttctgttaatgttgattccttacactggaaaattcctagactattatttgtatgagtgagaatttcttttctgattttcaatccaaaccacatggaaagaaggttaaaatggagcccgtgcactttgaatttattctcagcatttaggctgcagtatcacagcccaatttccaccagtaggaggcattatctaaacatgttgagaaatattcattcctaaggaatgacattgtttccttatctggctcaattcagtctgagaaggactgttgtttctgatgaagaaagagctccaccctcggccactgccacagctgctctgccaataacaaaggcacagcattttccctctgtgcatctccaacatggatgcttttcagggcattttaaaattcttccttaatcagaaaactgttattggctacagcttcatggctctgctgaccgtgggaagtgagcgtctcttttctgttgtggcttttaagtgcccctgcagcactgagaatatgacctatgggctggttttcctctttgctcctgcctgggtgttactgatcctgggattctttctgaacaataggtcgtggagactcttcacaggctgctgtgtgaatcccaggaaaatctttcccagaggccacagctgccgtttcttctacgtcctcggccagatcactctgagctcattggtggctccagtgatgtggctttctgtggctctgctcaatggaactttctatgaatgtgccatgagcgggacgagaagttcaggactcctggaactgatttgcaagggtaagcccaaagagtgctgggaagaacttcacaaagtatcttgtggcaaaactagcatgctacctaccgtcaatgaagaactgaaactctcccttcaggcccagtctcaggtaagaaaagacaaactcgcctttttctctcagcatgagctcgaagtattctctctgtgctcctttcagccagggctgtctgtgtcctgtcagaatattttgaaactaaatggaaactgaaacatgatgcagcattgagactatctcaggaaaagcttttgaaaggctgggtggctcaataaagttgctgactggattatctcttttccggttctgaaaagaaaatatccactggattgtccacatataaatacttaagtactttaaaacagtctctctgggtctgtaaataaataatgcctaacactaaatcataaattgagtgttaatggcagagctgtaattagaaattactgccttctatcaattatttacattcaagttgttttctcaaacacacacatgtattattcatctattaaaatgtagctgaatgaaatgagttatt

SEQ ID NO: 11054 - DNA, 6000 bp, Homo sapiens
ttttttaaaaagttcttcagttagagatgtatatttaaatatttatgtgtgaactgccatgatgtctagaagtttctttaaaatactctagaaaaaagagtttagggagaaagctgaaagatgaaataagattggcaaaatatggaaactattgaagctggatggtaggtacacggaattcattacattattctctttacatttgtatatgtttgaaaaatttcataaggtacacaacaaaataaatgacatggtcacctcagttattttgctgaagttttgtcaatcaccccctgcttagctggagtttaccttctagtatcattctcagcaaaggctcacaggaatgctattctctgaattcttacatattcagcctgttggcctgttctcgaattgaaggacagcttgtctggttcatactttctctacatgagtgtattgtaagcattacttcattgtcttttgtcattgaatattgctgaggtggccacagcctgatttctgatgccatctctatttctttctttattactaacaagatgttttatcctatattctcattggtttctttatctttcatgtccaaaaatgttaaataggccttcaggtaggtctttttggaacgatttttcctgctacaagtttactctttcattgtggagaatcattttcttatatttcaataaaaaagttggaaaattttcaacttattttcctttctgtgctatatcattttcaagaaactatattgttttgaatttaaaactaaaccactcctatattcctattggaatttcattaatttaatttaaaaaactaagttaacttgaagtcttggctcttgtttcatctaagtttcacaagcatactgggaggcaggtattaccttttctatgtttataaataatgctagagtccaaaaaggctaaggtggttatgccactgttaagttattgaacatcaatttggacctacatgtgtctaatcctaatttccatcacacaaattctgcctcattttagtatattcttgagtgttcatataacttttcaaagtatgttccctcatttgtaaaatgaggatgttgaattagtacatctcaaagtctcaactctgttgtcctaaatcttacagccagtggtgtgtgaattcccagccagttgtattcttaatatcctcttgggaatagaggtctatctccaagtttcctggcctctgtctgggcccctggattctttcccatcctgaacagcttttcaccttgggtttctaaatatttaggatagttatgctcaaactatgctcctactgtatcaatgaagtaaactttccattttatttttttaaaaatttccttagataaaaatgacaattgatatagaaggaatttttagcagtggaaagtttataaaagatttcaaatagtccccaaactttaatttttatatattttagagtccacctttctgtctggccagctatctttttataattttgggtttcctgtacctacagccacaacaatgccagagagaaatcttcacaagttttaaattgcaatgaaaacttgagattaaaatgggaaaatgaattaattacttcacctaatcacattcactgggccatttcaagaaataggattaagtcagcaaagtaagaactcatgatattaagtaactttgcttaagaacagtaccttaagatatatgcattattcggcagtttataacctataaaatggtgactagttgcattgtaaaaacattctgtgcctatattttatcataaagagatgtgcttctgcaatcataataattgctgatggtttcaacagaacacaattatttctcccaggggttttgttggtatttgtgtcacggaggaaacatgagggatagtaatcagtgtttttaaaagggttacttccttaaacagttggctaactatgagtgggtttcaccgaccctatgcatgaagtcaagcaattaaagaaatatatgcttacaaactgatccatttccaccttattttgagaaatgtcctcaaaaacacagcctccttccctacctctttccctatagacaagtttgttgtcccaactaaaggtgagatggactttgtttcaatcaaaactgttccactttgatcatatctctctagtgttttccactttttttccaaatggatttttattttatttgaagcatgtaaaagacataaaaagagaggtaactaggagaagaatttggatggagggtctggaggcgtggcagccttaacctgcagcctcacttctataggaatcaccctagagttccacagaacaaagttaggaaactcttgttctaaacagtggaggccaattaggatcacttggagagcatttaaaaagttctaatgcctgtgccttattcccagagaccacaatttattgggtcaaaagtaagttctgaaagtcaggattttttggaaagctccaggtgagtctatgcaggagctagaattgataacccttgcccgggagtaccactgagaggtcacggcaagtctgaacaaaatcttacttctgacacaaactaaacattacaccaggcagggatggcctgggatttggtgttcctgatgtgtctctgaatccttagacccagacagatcttgctttagagttttgtttcccagggtatttactccatggttttttttcttaataaagaattttattgtaaatagttacattaataaatagcaaagctattgctattttcagtccacttaggtttgttttaaaggacttaagaatgtgccactccaaaatattgccactttgacatacatattcattattttgagttataggcacttgaaaagcagcagtcacaagattgctctgaccttcctgctgtttcttaaaggcaggagaagaaattcccatgtgaaggatatcctccctgtactagaaagaaagcaacactcttaacatcaaggagggacaattgaggctgagaggattctgtacagattttattaaaataattcttgtcttcttgcctccccaaataatttagttgccttttcacaaattactattctttgtccaattcagtaggtaagtgttcaactccttgggtctccatttctttattaaagattcccggcccggcgcggtggctcacgcctgtaatcccagcactttggggggccgagacggacgaatcacgaggtcaggagatcgagaccatcctggctaacacgctgaaaccccgtctctactaaaaatacaaaaaattagccaggcttggtggcgggcgcctggtcccagctactcgggaggctgaggcaggagaatggcgtgaaccggggaggcggagcttgcagtgagccgacatcgagccactgcactcaagtctgggcgacagagcgagactccgtctcaaaacaaaaaaaaaaaaaaaaaaaagattcccatgctatgtgttaagtaaatgtgtatgctttttttctgttgatctgtctcatgtcaatttaattctcaggacaactttaaaaaaaaatcctaagaggatagaggtgaagttttgccttccctacagtttcataagtcagtttcacatgagtttcatccaaataacttaaacagcagaaataaaaccaataatcttcaatgcaaaggcagagcagcctagatattcatgtgctgggatacccggaagattcaaaacttctcccctaggagggagagcatttggaccaatgcctaatgcatgcagggcttaaaacctagatgacaggttgataggagcagcaaaccaccatgacacatgtatacctatgtaagaagcctgcgcgttcagcacatgtatcccagaacataaagtaaaatttaaaaaaacttctcccttagagtatttttagtaatagagcaaaaatgacatctacatgcagccagatttcttgtaagtcctgattatgaacaaaaatggaagatggacattcataaggaaggtgagaggcagtgctaagttatttagtgacttgcagaatttactaagaatcaacccctaagagattcttctctgtgatgaaagaaaaaataatattatgcaaatgcagtcataataaaagtttaagggtaattcctctgcaggtgctttgccttcatgttggaactctgccataaacagtggatgtggccttctgggtttgatccaatcagtctcaaaatccacaaagcttgtggctgtacacatatgcttttccacaaaagaaaatttcctacatttttcctttttcacccctcccagaggtacaaagcggaatagaccaaatgggtgagtgattacataaggcagttcttgcctattcagtggggagaaacaagcctaagtggttatgcttgtttaaacaagtttcatgtttttaataatctatctgccatatttctggcccaaattgtaagatgtcttaaaataatttataaattgtttttgctgtgaatattcatcattttttaaatattgagaattttattaccacaaagaatttttctttccttttaattgatttccgctcccttctctactcaaaactgctactaaataggaaaatggtctgacattcagctaactgtgatgccagccttctctggaatgttgtgttgtgttgggctgtgacttccatggaattcaattcctgtttaccaagggctcccacttattttattttaatatagtatgttgaaaagagtggaaaaaagaaaagcaattcaataggctcttacaattaggttttgagttagcctttgaaaaacaggacgagcaaagaaagattttatttttaggcttatctgataagtttcctttgttgttgtagttgttgagggattacagggattagtaatcttagaaaaatgttgagaatgaggcatatacggtgttttacccttgggtcctcccctgcctacactgtgctgagaactgctctctctgaccgggtctcctgtttctacctggtttgttgtgaacctgtgttctccacatttgtcctgactcttcaggtgaataactgagcctttcacttggctttgctgcaacccttcagctctgtgcgtggtaaggaatgcctgggttgcaaatctcactagaccctggggactctgttccgttccaatacctgggtttcctacttcaatcttttggctggggtgggaggcatgtacaataacagctaatttctcaaatatctatttacatgttattctaagataagacagtggcgagatattaaaaaattttagaatctttgtaactaacagagtcacaactgttggctgtctaatggaagggaaatatggggtagcctccatgcaccctcctgcttcccaccctacagttagggatttcctgtcaggctgcttttggtagacagagcactgtgctgctcgaggtaaagtagattggagctgagtggaagttgtccaccattcgtatctgccttcagtgtctatgtggagagcacagaaccccctctccatgtcctgcaaggcagaagttacatgtcatctggtgaggttgacaggtaggcagttgcaatgatgtgccttccaccctcatgaggtgaatgcagcatgaatgagtcactttttgagaggaccatcagcaaaaatcagtctccacaatatcagtgagagattttaaccaagtgaagggcagagattgaatgaaaataaacaggttccaggtcttttattttatggcccccaggctgcatttctgagcctataccataaagtaagttgtgtgtaagaggagtgtgtgcggaagagggttgaggaatggaaagcaactctaaaactgagttttacatattcatcctagtaaaagaaagaacattcagaggacaggaaaaaaaatgcctccccattttatgcacagcattatgatggcagcaaaattcaagtgttgtgcatcatactgggtgcattacatctagacttagacc

SEQ ID NO: 11055 - DNA, 6000 bp, Homo sapiens
aagctacaacattgggaagtttccattgcacttcccagaaggagtctagagcaaccaattttgagtttgcaaaggcataaattttgggaataactatgacatgaacccccaaattcctgctccctggatggcagagaccaagagaaagtactgccacatggttacaaggtcaagctcccaaggacatttttcaacatgtggtctctgggcaagatgaaagagtgaacagttaacctaacagaaaagttagaaaagagaaagaagagaaagagaaacacaattaggaaacagctgtcctggggttgtcataagaaccaactcagatcaagtatatgaaacttcttcaaaaactacttcttgaaatgacacaaatgtatcgcatgtagtacagaggcaactagaatttaaaaatagggctggccctggaaagtgataccgtaaattagtgaataatgaatcaaacacaatgacggaataagggagaaagcctggataggagaggcatgcttgcctcaatagcatgcctaaagaaggaatcgtaggacaatggtaagttttatcagaaatgaaaattagagaaaggccactttgggaggaaagtgttgactgtgccctgctgagctctgccacagggagggaggggtctgacctttgtagcctagctgtttagtgcttgtggcaaaaatatccacatgggggtgacaaagactctctgtgaccaaacagtcaagctcccctgagccttctttttatctaggcattgtccttgaaccctgtctttggcctgcctagtccagctttagcaagaattctgctaagttagttcagagagaataccccaccctctgtattggatcaagtttctcctcccttatctttgacatataagtccttgacctgcattcagcaagaatcccattaagccagtttacaagaatcccctctaccccgatgtctcctcctagtgatttttcatcatggactccctcaccctgcccactggattcactgaatccctgaattcaaagttgagcctgattgctcctctattgccgtaatcttgacacctattacaatgcaaatctgaacaagtttctacactttccctgcttcccactaccccccagaaccctgagatcctgcttctgcctcccactctgtattcaggctcaagttcactgataatgtaggctcaatcttttttttttttttttttttttgaggcagagtctcgctcccgctcttcgcccaggctggagtatgatggcatgatctcggctcactgcaacctctgcctcctgggttcaagtgattctcctgcctcaatctcttgagtagctgggattacaggcacccaccaccatgcctggctaatttttgtatttttagtagagatggggtttctccatgctggccaggctggtctcaaactcctgacctcaggtgatccacctgccttggccttccaaagtgctgggattacaggtgtgagccactgtgcctggccaggttcaatcttcataagcaccctgtgatctctgtttctgagctttaaaaataatatcttttccttgtctgacaaacattgttttccttctaattaatatcttcacctctcccaggccctgccagacttttaaaatccaggttatatgcccttcttctgtgattccatggtaccctgtacctctgctatccctgtgcctatcaatcgatataattcattttgtctgtataattaactttcccaaatttttattattagatcataaatcaggaagagaaggtatttatttttattgtactgctgtcacattgtttcacatatggaaaatgtctaaaacattgggaattacaattgaacttgagatttgggtggggacacagattgaaaccatatcagacatctataagggcttcaattttatagctgatagttttcttcatagagtcacaggcagggttactaaatgttaaggataaattgaattaggtcattgaactggactacaatctattttgaagctgtctgtttagaatcatgctaggtttgcagttctgtttaaattctgtcttacctaagcaagacagaacacataatttataatataaaataaggcagctcctgaccagctgttatgtatttttacagaagagctggcaaatgtaagcataaattgcagtaagatatgcaaaataaggactggatggcaagtggggggatgggttagaagtgcaatagcctatgagagacacttccctagagatatttcccatcttagtatgtgaaatgtttataggtagatcctaataagcataatttttcttaatggaacttggttcttagattccatcatgcatcattttaaaaaatcaaagtggaatcgtctcaagattaaaacaagtatattaattcaacaaggcttatttcattgtatagaaaaatatactgtagttccagctactcagaaggctgcggcaggaggactgagaccaggagctggaagctgtagtgcactgtgatcaggcctgtgaatagacactgcactccagctgggcaacatggtaagaccctttctctaaaaatgatacatacatatacatatacatgtatacacacacacaccccagtatatatattttataatctgttgtattttcacttttttcttttattatgactttcttaactagagattttacatttcaaggaaggaatggcatgatgaaatcaataggatctggctggtctttctgtttcttcattgttaccagatcctaaatctttccccttatctggctcaggattcaggtgtacagcagataattccattcccatcaaggtactgactgaagttaaaaaaaaaaaaaagtcacccctgaaagcccacctgcctcacattatgaattcctcactgttaaacaatactccccattgtctttgcttcattcatagctcacagtgtcaaacctgttggagcctggaagcagctgcccaaactcacttagaaagaatgaagagaaataagaaaaagcgaaaactgaagttaggaggagactcaacgtatcaaagtatcgttctgtgtttttgagtgtaagaatactcaatatttttatgggtgtgaatttactttctgttaaaaaatgataaaacctaccgtttattaggtactttctctacatgctagaacccaatatacacattcagttaggtactttctctacatgatagaacttaatatacaaattcagtatacactgaatatacacatatatacccagtttgattctggacctcagctcttcaacaaagctgaggtccagaatcaaaccgggatcccctccatttctaaagcccaagttctttcatctaagatatgctgcctcagagaaagcaaagccccaaagacaatctcatttgagattttatcagcttgtttatttagttaaaaaaagaaaaggaagaggaaaaaaggaacgcatgtatgaaatgagtctgtccagggtatccaaagatcacgaggggccaatgtttgccattggaggggctgttgcttcctctccgcctccacgcttccctgcgctgcacctctaggtgaaacttcagcgtgccgcgcggtggtgcgaaggtgagggcagcgcgcagaggaagtaaacggggactacaggggaccagagacgtgagatagtccttaaaatacatatctaatctgtcctcgtcattttccactgccaccaccctattcaactactcggtgataaccctgtaattctccagtctccaatctgtcctccccaaacccttctccgcaactcctcaagaggatcatcgggtggagtccttcccccttctgaaccttccgtggctgctcactactccgaggaccaagttaaacatcctttaggttatttagctgcacgtcctggcccctactctgtacactagcttctacatctggccgtgtacccacctgttcactgtgctccagctacctggccctttcctccttcagcttctttgcacaacttgtctgttttggctcctgctttaatctcagctttgatgccacttaggcctttcctagctgattcccgccctcacccctgttacccgccatctaattacagctctctaaatgtgcttcaacagcacctttcatgtcactgattgcaatttgcattgaatacttgcctgattatttttgtctgcaagtgccacatgggtttagccctgctcctgacaagcacactgctgaactgagtaacttttgaatgaatgaatgaatgagtgaataaatcagtgaaggtcctacttggcactgtcatcatcctatcatcaaaatatttcgagtccctcggtgttgctatccctggcatgcccatccccgcgggctggcaaaaccctggagggggcagcctcccaaggcaccgccgcgggctcagcccatctaggaatgactcccgcaccacgcggcgaggggcgggtccggcggcgaggtgtcctgctgcctagcaggttcacgtgtactggtgcaggtggggaggaaggcaaggaaggagcgcagcagggcgcgccagatacgtggaggggagcgcgggcggcgcctcgctcgcctccggcttcgccgtcggtcactgcctgggaacgcgacttcctcctctaggggccgacgtgcggggcggggcggggccgggcgggagacgcccccgcagggctgggctgaaagccgccccaatgggattcggtgcggggcagcgactgcgccccgtcccggcgccgcgctcgtccgcagaggaggcggcccggcccgggcagctgcggctcgggatccgtcgaggggaggccgagcttgccaagctggcgcccagcggggtcatggtgcccggcgcccgcggcggcggcgcactggcgcgggctgccgggcggggcctcctggctttgctgctcgcggtctccgccccgctccggctgcaggcggaggagctgggtgagtggagcgcgtccggctggcggcgggacccgaggcgccaggggcgggctgagggctgcggggcgggccgggccgggccgagggctacggggcgggccgggcctggggggacggagcgcgggaggaagtcgggctcgccgcctgccatccgcggagtccggctctacccgcggggctgggggtgaagtaggttactgcattccttgtcgctcccccaccaaactccttccttcccccaaaaccagagaattaacctggcgtctctgcactttctctccgccgccccccagcccatttcacttagtttccagacttcctgactctgctggccccgtgagaagtgacctgaccccgagggtcgccttaggggacagccgtgtgcagggccagttctttccagctgccttttgacaaagccgctcctcggccggcgctgggccctgccctccctgccgtcgctcctcccgcgcggaattggaatcccggcgtgtgcgttcggggctcgtgcggaatggccggggcacgtttgccgaggttggccttggacgctggcgagcaggcggtgctgccacctcctctcgagtgtcctgctggcgccgcaagttggaatcgtgtggcttcctgtgtatttgagccggtagactctcaaccaggctgctttttctctggagctggtctttgacttggagttagacctaattaacccacaaccgagtttaccctctgcctgtccagcatattaaagcagcaaccccctttaccagccctgggtgtccctatttcattcgtcctcattaattagtgcttttttttttttaatagcaagggccagctttctgccgagttgtttcagtgtttcctctcctcccttgctcctggccgtatatgcctgagcttatttaatggcgctgagtctatccggagtactttgacagctcccccaaccaccatgctttctggtgaaacaagaatcaaaactaaaaccaatgccggcatttttttcactgaa

SEQ ID NO: 11056 - DNA, 6000 bp, Homo sapiens
acttatcctttttaagagttcacttgtaatagaaaaataatattctaaatatccattaagtataaaaatatcttattgagccttctaagggataaacagtgtgtagagcttaaaaaaatcaatcagtctctattcatgaagtttatggcaaggaaaataaatagacctatataatataaaaagtcccccaccaacttcagatttatctgacttttctgaattataagagatattcacttattacttgtataattagaaattaagaacaagcaaaacagggcttctccccacctacttctgaataatgaaggagttctataagaacaagacagtaaggaaaataattcggatagaagaaataacatataatggcagagttgtcaaatcgttatggtaggcatacatggcaatggacagatcaggaacgatgttttatgtaattctgtaaagagtgggtttttcatctcgaaagagaaatcaataaaaagttctcagcatgtgaatgacaatcaaatgtgcacttggatatcagagtaaaaactgagtaggaaagagtcacaacgaagggtagaaaaactagttaataaacgtctatgaaagttaagaggagagttggtcaggctatgagaacaaagacatatttcacaatctgcatttggtttctaagtgaatggggagtctggcagaagacagaaaaggtatgagcctccaatttcaattttgtatcaaaatcagtgatagtgccaccacaaagtttgcgaatgcgaggagctcaaagggctgagatatcaaccacaaagataagaaatttaatatgtctggagaaatactacaatcattaaattgaaatagaaccttcttaacaatgtaacagcatcatgatcgggaccctatagaattttgaagcaagtatttggagacctaagggttggtttttgttgttaaatttgttttgtgatgtatgtgtttccctttgttatttttggctttggttctgtccgtttcctttgtacaaaacatgcacttctcttagaagtcatactgcttattattacacgtgctcatttgactctcaattgggaatttctttttctcctggtgttatcttgcactagtggttaccttctaaatgttaaattttcatttccatattatttgtatactgataaaccataatttccttgaagccacgtagcatgctatagcatttctatcacttagaatgtttaataactttccaaaatttatgtagacctatatgagtccttttcttaatccatctggcctctcttaatgtcaatgctcttctccacccctcatcaagatgaggaaagagaatttgcccagaattcagatatttatgaaaaaataaaatgtttgggtctccaggttatctggcaaatcaagtgaaaagtgaacctacctcccccaaatgacccctaagctttataggttactttatcactgggttatatcaacagccccccaactccagttgatgagtaaatcttattttcttttccctattgccctatggagagaatttccatcctctcaatctcagaccactaattcttattcgcagttttgcttagatgttttttgaaccagtccttccctacgtagctttaaaatttaaggcagtaattatcaaaccctcaagtaccctcaagagataggtaaaatcttcttcctgggtgtctaggagatctaatctaaaaaaagctccttatctttgatgtattgtgaacattacaaaaattgattcaaagcttgcattttactgtatctctgtctaaatattaaaatgctttaatttagtcatcacttatattaacttctggtcaaaaatttccaaaaaccgattctattttgaagcttcttcgccctccggatacaccactacagactggagtttaaatgctcaatgtaaaagattactacatacatcacagtgcccttcacaaaacgttagtaatatagctgggcgcggtggctcacgcctgtaatcccagcactttgggaggccgaggtgggcagatcacgaggtcaggagtttgagaccagcctgggcaatatggtgaaaccccatctctactaaaaatacaaaagttagctgggcgtggtggcacacgcctgtagtctcagctacttgggaggctgaggcaggagaatcgcttgaacccgagagggagaggttgcagtgagctgagatcgcaccattcactcggggctgagtaacagagtgagactccgcacccccttccaaaaaaaattagtaatacttttgaggaacacatttaaaatgctacaaaactatataaaaacaaaagtaaagacatgaactcatgattcagttgaaactgaatactaaatttcatttagagcttagtaaaaataaatttgtaattattttcccatccaagttcaaagacactttacccttaagaatccaccttctaaaggaaaaaagaaaataagtgctaacactaaatgaacactgttgcaggatctctgataatcactatgtacacttcatgtcattaaaccatcacaaatactattccacagattaggctgcttaggaaagttatttgtataaagccatgtgaccaaaaatacattcaaactatagtgtaactccaaatgaagactgtgacaaagcacctcaaaaaaattttctagcctctagctgaggaatcattgaggaacactctactgataacactataactcattaatactcctattaaacaactttctgtttgggcaattaaaaacaatgttcagttaaaactaaaatctaatacttcctagagttccacatgagatcatcaccatcatcgtcatcttcactagctaacccaaaggaacaaggtaaacacaaaaactccccactcttgtaccaatctaaaaagtaaatttttgaatccattttccaactgtgtcacacacagttgttagtatccttctaaggtgtgtatatgcctatgtatactttttaagtaaacttataaacatgtggtaactagggcatattttattctgtctacggcagcttcttggtttatccaactaagtattactaattctattttcttagaatgagaagttctcagaacaatgatctatcacctaaatttcaaatgaatgtgtaactggtagacaaacttaaagcagactttctaaaactattaacagtgctcaagaatgcatctatttacatcttaaaaatttctcagttactatatgctactctaatgaaagctatattcaaattataattttttcccacagcatgccaacagattaggaattataaacagacagatctggatttgaatcctgtctattctttagcagctggttatctctgacaaattactgtaaacctcgttaggcttctcggttttgtattatcaatcatcattggtaactgatagtactgagagatcctcattatgtaaggattgaaagaaaaatggttgtagcactgagaaaagtatcaaacattattctgcaatttccttaacttgggttttacttttaagttgtaaattttcccttggcaatgttcacaggatatctttgctaaaatattatttttcagttagttttaagctgactctttaaatatcaaatgatttgctctagagatggattttctttctttggaagaagccaagatcatttccatttaagggcatgtaagcagctgctgctacacattttagttacccataagaaagtgaagtgggctaagttcactctgtcataagcatttaaaaaattaaaaattacaagtacctcctctaaaattaaagaagagatttaagaattaatattttcgagtgtggtgacttaagtaaatctaacatctaagacaacaaattagataaacagagaagaggagaatgatgcccggctttacaaaaaaattatttccccagttctactgtaagataaactgttctaggaagttcaaaatatcatctcacttactagcatctcatttttatagtaattttcaggaaagcaactgctagattaaatgaggcacatcctttcaaaaacattacaaaacttaaatttcaacacatcaaacctataaagcctcattaactgagatgtaactgatttggaatctgtaattatttcttttttgccataaagttgcccttaatactgcatcagtttattaaaaatttggtaagattgtgtaataatttaatgcaattgtttttaaaaaatcttaaatacttaaagtagcatattgctattttgggggtgttgtatgtatcagtttaaatataagtattactattcacaaatatattgttaaactgctaattgaagaaaacacaaatgaattaaatacatttattagttctttaactgtaagataaaaataattttttaaaacaaaaagcaattagcctgattttctcatactccttctcccatacacacaagaacaagaacaaaataagaaaacaggtataaaattttattgtgtaaaaatatttcactttcactaaaagctaacattatgaagacacgtattaaagcaacagcagcaagaattcaatgaaagttgttttgcttatacctgtgtttatttttctcataattaaaattcctgcagtaactattttagctcttcaacatcttcaccattaatattcaattatctctaagcctgaagatgcatgaatctttaacaaaagctttccaccacctcaagtttacttatttttttcatttatctaccatatactgttttaaattaaaaacaaaagatgaagcacaaagtgttaatgacttttccatacctaaagtaagaagttctaaagtttggttgtgataagactgagactgtggctaaccaatcgaaacttcagaattcctatgtgacatcataagacctccctagaacactttttctcctccacctactgcaactgttcccataaactgggtgacagagtcagaaaactccccagctaaacacccgtaagacttcatacaacacaatactctatactgtgatgatcacagctgccaaggtaagaaacagatttcgctgactttggtaattcttactttctataattcttaattcctataatttctataatctgaacttttaaaatgagttaattttatgaatatcagttcaatcttaggcaataaaatgacatgacaaagtgcttaaatttataaatgcttatccatttagtgacaggaaaaatgagacaactttgaaatgaaaaaggtcatattcatctttgatcctggttactggtttgtcatttaaatttatctttcacttttattttgcttttcaaatgtgaatttctgccaattaaaaaatcttccaattatgttaccatatttggtagtagtggttaatttctccatgcaaaaacaatgacttaattttgttatttattgctctgctgagaaacagtgcagaactgagctatttacatctgaactaatatgaatagtcatttgactacaacatgcacattatcagcatgcctattccaatattatcataatttcatacagtgaataatgaaatggagtttcagaatatataatacaagctacttttaaagtgcccttgaggatgtttcccctctaaagtccagtcaacttttaacaaacatttctaaaaaaattccatgctattaataaattgagttactgatattaaattcaatattgtatcataaagaagtttagaaattttaaaacaatgttcacaaacacaaaaaatctgacgttagagaataatttgatactttaaaaagttattttgacacacgaatattcttaactatcttattttcacacaaatttgattaaatggatttctgcctattaatgcctatagttttgtcaagttattatcctccagtggtactccatttcctctctcggatttagaaagaaaggaaaaaataaaataaatgccaggaatggagatgccac

SEQ ID NO: 11057 - DNA, 6000 bp, Homo sapiens
tagtttggtttacataagattcgcttggaggtaaatgtgggctacaaaaatgagttgaaattttacacagctcaaatcaatctttgatccttaaacatttttcaaggatgatagaatgctaagtaaatgggaaagacgttctcagttaagttgaatacttcagggttatgaagcgaattgacggaccccagaaacttatcttttgaaaaagggataccagcacaagtggtaatacgatgagaaatcttcactgctctgaaagatgtaattgaccaacagtcacataaagaacacattttctggcaagttttaccaatttgggtagagcacttctaaacttgcaaacttatgacttccaaattaacttttacttctttcttgctgtctggtaaacgttagttaaaatggaaatttggtgcatagaaaggattattctgatgcgaaggaaaggaaatctgtaagataatgccatcttatctcattacaaaatcaacctacacccgcctagtctcagatagtctttctattcttctacaaatgccttgaattgccccagagggattgcaaattttctgattcttcttcacttactttcatctcagccagctgataaccttagctactttgagaaaataccttcaaaccctagtttcatgcggcctatactgtctgaaaacattttctttatgttgcactcattctctttttaacggagtagctgtcctttcaaagttaactactcctccagtgcacaagtaatattttcccacaaataagcccacttgtagctattttaaatacctttccctttcccagatgttaccttgcctcttttttcattctttttgtctgcattaaatgaggaaatccaccaaggctgtgtgtgtgctttttggtacactgcctatatcccatctcttagtaatttcatctgtacctgtggcttctaattacaaatcttttttttttctttcttttttttttcagatcctctcacctcagcctcctgagtagttgggactacagaggcctgccactatgtctaaataacctttttatttgttgtagacacagggtctccctatgttgcccagggtggtcttgaactcttgggttcaagttgtcatcccacctcagcctcccaagtgctgggattacagagttgaaccactgtgtcttcccaatcacaaatcttataacaattttttttttttttgagactgagtctcactctgttgcccagttgtagtgcattggtgttatcttggctcactgcaacctccacctttcaggttcaggcaactctcgtgcctcagcctcccgggaggctgggactacaggtgtgtgccaccacgcccagctaatttttgtatttttagtagagacgggatttctccatgttggtcaggctggtctcgaacacctgacctcaggtgatctgcccgccttggccacccaaagtgctgggattacaagcatgagccactgtgccccgctgtaacaattttaaagtgaacgccacagctcctgttttaaattgtcagtcatcggtctttacctagatatttcagttcttcataccaaaatatttcaaacaaatctttgtatctctttcagcaggtcagtccctccccgagcttcctttttttgtgttagtaacattttcccaatcaaaactccaaaaatcggtttccacagcctcctcttccttgtcttcccattcatccatcatcaagttctggtaattctaccttcctttcctttctttctgctagtattgcctttcaagttcctatagcttactgctctcccattacaatactcttcttacaagtctaatccggagccaccaattatttaacgtttatgctactcaatgaggtgaaagtaatccatcagagtttatgtgggataggcatttaaaggccttaaaaatcactccattcatttcttaaaatttcagaaattcctattttgaaacaaaggtaaaaatccaaaaaaggaggtggttctcatattaagaaatatttctcacaattctgaaaaaaacttaccctccattgtgccaacaatgtgcattttgcaaaatatatatagctacatggagaaaacagaatcaaaggcctggcaggtcatttggcctaaagaagccctgcagaagacagaaactgtaaataactgtttctagttctccaaagagcagtgttaatcaggctgcatccatttcttctacatagacaaggtctggcaatcagagaagacacagttctaggaagtcagtgtttatattaaagaaatggcattgacatttctgagaatatgagaaaaacacatttaaaaaaaaaaaactattccacaatttttgcaaaacattccaatggagacaagcttctaaggtcagataagtgagatacttttgaacaattttgctattgataaaaatataactcaccaacactgctagagtatgagttataatagaagttgctacctgtcatttagagaccctgttagttgtccatgagagaaaactgtggggccttttgcaaaacctagtttgtcttgcacatgattactcatagcattgcatttcagtgccattatcccaaaagaagagaagcttcttcagaatgtcttatcaatgatattttcatgaaatcatgttgagatcttgtatcaatgatcatggaaaaatgattttagaaagaaaagacatagtacgttcatgtattaagagaagtaactaattactggctcatgctatgagtaattcctttggctcagaaaatagttcaagtgatatccatgaataatttaacttgttataaggaagttctttagctctatttccaattggtcacataggtaatagattaaaaagaaaagaatactttacaagaatatttaaacatcaacattcatctatagacctaacaaaacataacagaaataaacacaattttttttgctttaaaaatcctattataaaacagtcaatgacaacttttctttcatgtaacttattctgaattagcatcatggtaatgttttttataattgtagttgataaataattttacaaaaataaattgttatgtaaattaaatgaagcatacttttttgaaaagaagacatgtattttcttacgataaaaagaataaatcattttcatgaatatgttctaagtccaatgaaataatttttagttaagacaaaacaatagatttatttaaagaacaatataaatacaagaccaaaacaacatttataggttgctgaacctgaagactcgaaagtcaggttacaatttctacttccagaagattgtttttcccctttcttaatttaaagaaaaatgtactcttggaaataggatagccaacaagtaaaagcaaaattgttccttaaaattgcaacatttgggcccagcgcggcggctcacgcctgtgatcccagcactttgggaggcggaggcctgtaatcccagccacccaggaggctgaggcaggagaatcacttgaagccggaaggcggaggttgcggtgagcagagatggcgccactgcactctagtttgggcaacaagagcgaaactccgtctcagaaaagaaaaaaaaaaacctgcaacatttcaaaagatgttatattagtcatttcagtgaaagtttaattagggaacggtgtctaccagaatatatttggcatccttcttttttctggtatttgcctgagtgagaaaagtgttaggaataggaaggccagatgagtttgctttccctccagagaatactggccaagaaatttcctgtccaacctcaggagcatcactgaagcctgtttatgaggaattgtcctaccacaacactgtgttatggcatttgggaagccctcagaggagctgcctgctctaagattgaggccacatgactcaggccattataaaccctaatgcagagccctgaagagggagagcatttggaaggggatagggaagcacataaagatgatatgctcagctttactgtcgttgggcagaaaactctctagtgggcttgagagggggaactgattttaaggagggctgaatagtttgggaacctacttaatgcaaccatagtctgtatttttaaaatcctcacatttcactacagatttgggttttagtgtcttggcataaatagggccttaatataaattcttagttttctggagacatggtagaggtcagatatcaagatttcataggcaaacaaaacatgctatatatgtaaaaaatgtatatacacacacagccttttgctaaactgaaagaaagtaaaaattcaaagcagtcaaggggttgaaagatggattgggtatggacttttcttcatctatgtcaatttttgaaatctctctcccatctccaccattccctttgttaattgtccttgcttacatttaaaggaagggaattagatcatcaaacaggtcactcacacctacctctaacttcacacaccttggtcaatgtgaaacaagcttgaactggttatatgcttccccaccatttttatttattgtaagctactttaaaaattttagacaatgttgtaataaaaatatacacctttttcccccattatccctggtcttctggtgaagcaagcagtgtaatcaatgattcttatgtgtgaggagcaactccaagtagaggcgttcatgtccctaatgcttttttatttttcctcatcagcaaatttaaactacaactttatcctgatcccactgctgctctttgcctcttctccccccagcccttccacatttaccagcctcctccctacctcctcccagcctttccctttgccctcccctttcttctagcccctcctcccagttgagtcagtggcttgaaacttttaaaagctctgtgctccaagttacaaaaaagcttttacgaggtatcagcacttttctttcattagggggaaggcgtgaggaaagtaccaaacagcagcggagttttaaactttaaatagacaggtctgagtgcctgaacttgccttttcattttacttcatcctccaaggagttcaatcacttggcgtgacttcactacttttaagcaaaagagtaagtttttaaaaaatgagaacacgttacctattagtttctttttctacaagtaaaacttttctaaagttttaaaatgtgttaaatgtaattttgaattatgatactgtaaatggattgatggatttgaaagtgtttctatagttttaaagttaaaatttattgtaccaaatatatattttgactgttaaaaaagtttctattaacattgcaacaggtgaaaaggttcaaacctttccgattagaataaaggattagtttactggatgtttggtttttcattttagagtatcattttattttgttttttttttgtaatcagtaatagtctaggtgctatcatttgttgggtggggggggggcggttaggcgcctgggttgggggatttgactgactacatcggaaaaatcaaagtgcaaatttgcttagcgtgcttcctatagtattctacacttcatagaataaagtgcttttttcatatggaaatcttgattgatgttctatagctttgcaaagccaacttcttttgtgacgaagtgctttgttaaaacatcgtggttacttgacttccacgtggttccttcctagaattttccccattaaacaaaaaggtataaaattcaagagtattaatattatgctttaaaaatcaacagtaaattgttactttgtgttagcaaccgctatggaaagatttgagaccctcaggagagacagcttttactcgaccacgttggcagtttaggagatgaaatctcttgaatgggtggtggctagttacagagcattagagatcagacgtttaaaaaagagtgtatgccagggtacttttccaaaaccgtctcctaaaacgggagctcctagaaagagcaggaaaaaaacttt

SEQ ID NO: 11058 - DNA, 6000 bp, Homo sapiens
ctctgcgctcagcccatggatcaaccaggcatgctgtgagcggcttccaccttgggtgccagcaactagatgaggggaatgcggtggtgcctgataactcagagatgccagcagtcgtggagccccaaggggggttacagttctcgcttgtggagtcccaaggtctgagtccccaagaaatgttacagctcttcaatcccatagctcagtgagtgggaacgtgttacagctttctttttcccatagtctgacaagcgggagtgtgctgcagctcctttattctcgtcgcccacagctcagtgggcagaagggagggttacagatcattcattcctggtgcctgcagctcagtgaatgagagggttacagctcatttgttctcactgcccacagcttggcaagtctgggctgttgtcccctgaccaagaggaataaggtacgtggacacatggacaccagagagtgagtaaggcagagaataattttattgagcaacagaagcaaagctgtcagcggacagggcaccctgaaagcagatcccctttctgcctgtgtggctgagtccaaggtttttatgggcttggaatgggggaatgcaagctgattggtccatgggtggtctttggaaaaagcaccatttgattggctaacaggtatcatccagaagaaaccaatagagagagagagtgtaagatggtgatagaagttctcactctggtcattgactctatccagagctggcagtttcgttttcaggcttcaggctgtcttggcttgaaggtcgggtttcaccaaggacctgaccctgtctgcctacaaatttgtctgtctcttgttattatcaattgtgtgatgctgattgttgacttaaggtgttctaggaagagaaagctgtctttgtaggagtagaaaaagttagaacttggctattgtctgaaaaatggttgttgctgcacagggagggtaggagaaaggagttaggcgtgggcagctctctaagtgagcaagcatgtggaaatagggtgtgcaagtgaccatgactggaaaggggtttagaaaggcagtgtggcaaatacaggtagagagatgagagcggaatggtgacagcaagagtcagcagaacaaagataccagcgtggcgcagagcaccaaaggcagaaggacctgagcaagtgtgcaaagcctggggtgggcataggcatggcatgttttgagaactgaaggaggcaatgaggttgcagcagcacagagagcagaggggaatctgaaagagatgacttacaaaggtaatagggtcagatagtatagatcctccatggaaattatactttatttcaactatgatggtaaatcttcggacagtttgcttgagctgtaacatgacaattagtgctttaagaagattctagcttctgtgtggagaatgaattgtgtttaagggttgagttggcaagagtagaagcagggaaatgggttaggaggcaattgcagtagtcagaggtgacagtggtttgcactagtgtacaagtggtggagatggctctgtctcatgtcctgtcacttactggatctttgcctttaaaaagtgttggaagtgcattgtctttagtatagcagaacgtccttgcagcctttctattgagacatgctaggttttacaagtctgtgtatcagctgcagtttttatctttcaagcaacgtaggattagcctctgttcaacttgattctctcatattttacccatctcgaagggattttttgtttgtttgtttttaatgtttggtttcagagacatgtaaaaagtcactggccaaaaaatttggaaacatcttttgcgaagatgtccataattatttcactgattgtcagaatcagttttttcaaaaacgttgagccaccctctgcttctcaatagtttgcaatttgctttttttcagtctttcgttaatttgatgctcagcagtttatcttcattactttttaaaacaaataggaactacctaccaccctccccttcccagaaataacaaaggtcttactggccaaccttcagttctaagagaatgttattggaattttttggtaattctatttagttcttgtttttagtttgttgaattgttttggataagtcatttgcttccccagttaattcctatttaattacacatattcctctcttccttctaattctttttttatataacagtgttcccttctggtgtaagttccacatcctctacctttaatgacaaaggccttggggtcatggcttaaccatacaatagctgttttgatcgtgcctgtccttttctttgtttttggttagagtagagtgataaagtaacaacttaaacaaagattttttgttgattttatgctgaatgactgagttgcccctccctccatactttgatttgttaatttcatagagtcctgaaatttccctctaattacactctatattgatcataaaaccagtagtatttcagtgggaggtagtaaaatgtcagtgtgattttaaaaaaatttatgagaaagcctcaagtatttgtctttaaaatagatatgttccatgtgcatgttgtctgtattttagaagaacataaactctgtacgtttgtttaattactgatttctcagttttctctgcatatctggataaatgtaatttaaggagcagtaatttactcaatttaaaatattttcaaattagatggtgtgagcagtcacagacactatatggtgcttaagaatactgtttataatgtttgtgaaaaaattgataaaaattaaagtaattaaaaaatttgattttatattttatgtttaaaacagtcattaaatttgtaatatctcattaaattatttacagggtatttaactggaatttttccccatgtgaacacaaaatatctgagacgggtttcagttaatttagaaagtttattttgcgaagttaaggatgcactgtggcatatccccaggaggtcctgacaataagtgtgtccaaggtggtcggggtacagcttgcttttatacattttaggaagacatgagacatcaatcagtatgtgaccaaacattggtttggttgggggggcggtgactttcaggccataggtagataagagacaaaagattacattcttttgagtccttgatcagccattcactgaatatacaatttagtctggctcagtgaatctgcctttttacataaacagcaaggcagagaaagcaatcagatatgcatttgcctcagctgagcagagagatgactttctgtcctggacttgtgaagatacgctatcatatattgccagggtgaaaatcaacacaactgtttaacatagagtaaagatcttggccgagggcggtgactcatgcctataatcccagcactttgggaggccgaggcaggcagaccactaggtcaagagatagagaccatcctggcgaacgtggtgaaaccctgtctctactaaaaatacaaaaaaaaaaaaaaatttggccgggcgtggttatgggcacctgtagtcccagctgctcctggggctgaggcagaagaaccacttgaacccgggaggcagaggttgcaatgaaccgagatcgcgccgctgcactccatcctggcaacagagcgagactctgtctcaaaaaaaaaaaaaaaaaaaaagatcttgaggcccacaaggaatttccttgtgggcaaattgtgagggaggtatgtagctatgtagcttttttatttttgtagctatcttatttaggaataaaagggaaagaaggtttgcctgatgtactttccaacttgacttttcccttggcttagtgatttttggggtcctgagatttattttcctttcacactcatattcatctttctgtcaagaatcaactcacttcaaagtaaattcaatgtttgcaagaagtttctctgtaaatgtgatgggatttaatttttgaatcatgacagtttagcatttttcctcaaaagtaccaactttactgaaaaatagaagatatttcatagggtaatacaagatactttttcaatatttatctcactttccagatacttggatattttctatagcaaaaatgtggtcattggtacctcacgtatgggaaaattctgtagtctaatccccacccccagcctccaaaaaaaaaaggattcctgcattgaattttgtttcagtaacacattttacataataacttataatcattgccgttttatagatcatttattaataatatatttacatatgagtctatgctagatcttgcctgaaaacaaagtattaataaacaattgctttatgtgcctaccctctaaaggcatttggtttctagatgatatgcaaacactggtttctcaagtcatctttggtatataattgatacatttataaagtaaaatatgtcaaaagttgatgactttatggtatgtgaaagtaatttactcacttcctggtgagaagaataggaatggggttgcattattcacctgtgttacctttgatgagtacattgaagagctgtgaagggaattcattcatctttccttggctagcaggtttgctgctggttcatgaaagggaaagaaaagggaagaagcacatataggtgtcacagtaaaaggatcacttcatagagtaatttgttttaaggaaaagctttctatatatttcttcttcaacgctcccccctcaaccacaaatagaggttcttaacttgagagtctatttatttatttattgtcttcagaagggtcataaatgctcagaaattttatgtaaaatcaatttttatcttatgagtgggcccataacatttattaagtctttggaccattacccaaaaaggtttagagccactggttttaaaaggcttttgtgtcttgtgatgtagagacaatcagattctggtaattatttggttttcatggtaactaagatgtgggatagaactccgactgtgtactttatttagtatacagaggaggacacaaacatgagaagattaaggtagagagtgaaatatggtcaggacaaatgtgaatttagagcctgagtgatggtttagtggatttatgtcctcacttgtcactaatgaaaaggaccttacaggttatataattaaaggtagatactaaatactgaaactaataccagtcattctattccatcttctgtggtaggcttcactttcataagggtgtgggggagatacctaacgatgttttcacccctagtgaaattaattgataatttcctatggtgctttgtggctatatttcaaatgcagtattttcttactggctcagtaggaagaggcttggagttagatgatttgggtttaatctttgccctgtaataactataagactcttggaaaagatacttaatgggttagtgtcttagtctgtgctgctacaacaaaatactgagactgggtaatttataaatgacagaaatttattgctcacaattctgtaagctgagagttcagcatcaaggcaccagaagattcactgtctggtgagggcctgttcctcatgcatggcaccttctatgcatcctcacgtgacagaaggggcaacacaagctctctgaagcctcttttgtaaggatatttatcctgtttattagggtagagccctccatcacctcccaaaagccccacttcttaataccattcacctttggtgttacatgaattttagggagaagcaaacattcacaccacagcaataagttaaatcattttgtatttttataggtacaaacaaattactggaacagagaaaagtgctaataatgagacccacttgtgtatgggaacttgggatataattgtggttgtgctatagtcaataaaatagagtggccaggcatagtggctcacgcctgtaattccagcactttgggaaggcaaggtgggtggatcatttgagcccaagtgttcgacagcaacccgggcaacataga

SEQ ID NO: 11059 - DNA, 6000 bp, Homo sapiens
caggcatgcaccataactcctggataattttttatttttcattttttgtagagacagggtctcactatgttgccctggtgggtcttaaactgacataagtgatcctcctgcctcagcctcccaaagtgctgggattacaggtgtgagccactgcatccagccaggaataagtttctagaacttgaaagactcaaaagaggttggggtttagagttcagttagagaaattgttatagccaaaaatatggctagcaacttggcaatgccaaccatcttcactatacctacttgtattatacataggtagattccttgaggtttattcatcttaggacctgaaggactaggatgtgtccctattatcatatccaaaatttagtgacttagagataatctaataatctctgataattcttaaaaatgaagaattcaatgtccagaatcacttaatttgtaacacagacagtcacttacaagctaagcctttatcagaggccccctgacttccccacctaggatttttttgtgtgtttttcagggttgaaaggggatagggatatactcactatgtacccacaatttttttaattaaaaaaagagaaaagggatgagggatgaggatgaaggaagagagaagtgaaattctggcagtgtagaacataaggaatcacttagtaaagatacagagtaagagtcagtagtatgttggtgatatggttaggctttgtgtccccacccaaatctcatcttgaattgtagtctccacatgttgagggagggaagtgattggattctgggggtggtatcccccatactgttctcataatagtgaattttcacgagatctgatggttttataagtgtttgacggtacctcctatgcacacattctcttctttctcccgccaccacgtgaagaaggttcttacttctcctttgctttccaccatgattgtaagtttcctgaggcctccccagccatgtggaactgtgagtcaattgaagctcttttctttataaatcacccagtctcaggtagttctttatagcactgcggaaacggactaatatacttggtatacaaaactggtatagaatcaagttacattttggagaataccaggaagaagcatctgaaagggcaattggagtgtcagaaccaggttaagagcaggctctgtggcacaatggatagttcattggacttttgcctacattgaaagaatgaggttaagctcaacaactaatgctgatgctttcgctggttaggcctataggtggaattcatgaagttgggggaatacctcactaatttttaatttttctaattctgaagcccaggctcacctgattgtggcagtggggaatgtccaaaatatgtaggaccgggcaggccggcaactcaggctaatgctgctgttttaggagtgaattttttctctggtaagcctgtttttgctcgtaaggacttcaactgattggatgaggcgcgctctcacattattgaagacaatttccttttttaaagtcaattaattatagttgttaccatatctacaaaatatcacaacatcaccctagattagcgtctgattaaataacaggataatatggcctagccaaattgacacacacagccaatcatcacagcaggaaggaaaagtaggatccccagcaactagaggtaaggcagagtcagtgcactgctatgagtgcaagtaggcaatcagaacccagaaacccataaaaatggaaggcacataacaaatgattagataaaagccatagatcctaggaatcccctaaatttgagacaaattatgacataggtttggtctttgtttttaaaaaatcataatgattcaacagcaaaatactttgaagaaggaacctggtggtatttcacttctgagatatcactaaaagaattgtgcgtaagtgaccaagtccctttggtggtcctccgaccttatctgtaaaatccaaaagtctgattagaataatgacaggatgtttgcagaaaagaatttgaatgtaaagtgtttagactgctctgggctgcatatcaaatcactaagagggatatttatttatttatttgtttgtttgtttgtttgtttattttgagacagtctcactttgttgcccaggctggaatgcagtggcatgatcttggatcaccacaacctctgcctcccaggcgcaagcgattctcaagcttcggcctcccaagtacctgagattagaggcacctgccaccatggccagctaatttttgtatttttagtagagatggggattcaccatgttggccaggctggtctcaaactcctgaccccaggtgatccacctgtctcagccttctaaattctggggttataggtgtgagccaccatgcctggctaatttttgtatttttagtagacatggagtttcaccatgttgactaggctggtctggaactcctgactcaggtaatccgcccgtctcagccttccaagcctttcaaagtgctgggattacaggtgtgagccaccactcccggccgggatattttaaaaatactgctgccttagccaaaactacagaagatcattaaactgaagtggagcctgggcttcagaattagaaaaataaaaacttaaaaaaaaatacttctctgagtacttctaagttcatccagtgtggagagtcaggtgcccaaattattcaaatttttttttattctggtttttaagcacataatactccatgtgattcctggaaagaaatctgcaagaacctggatttggttgtctttatggcatcttctagttctaaaatgaattccttctgtaccaacaactaatgctgatacttttgctggttagggatataggtggaattggtgaagtgggggtatactggaccaagggagtgatggaaaagatgagcacaaacccataacgccagaaaaggaaacgtggctctcatgctgcagatttatattttatttatttttattttttcatttttttatacttttgagacaggatctcactcttgttgcccaggctggagtgcagtggggtgatcatgtggcaggccaggtctcacaaacaggcaggcctccataataactgtttcagcactgactgaatggttaggttaaatattaaaggctgagagagccagtgcccttacacaaagtccagaacaagtaacaaaggcccaccaagactctttcccaggccttcctgggccttgaagcatgacaagataacgaaggaatactcacactccttgtgacaagacagtcttcgggagattcccagcagctgccgggtgaggttttcctggagactctccccagggctatcccatgtgcaaaaccacacgtccctctccctactggggaataacggagatcggggtggacgcgctcaaagggtaaaaccagatttatgccaggagcctattattttcccatctgggcttgttaagccatttgcctggtactgccagggaagcaatagggctcgcttatacacctgctttgcatttggttaagatcaggttttgagtgggttttgagtctgttctgcccgagtgcaccccctctcttgtctttgtctgaaatctgtctctgcttgtttgtgtatctgtcatggctcactgcagcctcaaactctggcctcaagggatcctcacacctcaacctctccagtagctgggactattggcatgcaccaccatgcctggctaatttttgttgttgttgttatagagacagagtctccctatgttgccccggctggtctcaaattcctggactcaagcaatcctcttccccctgattttcagaaatagtgtctaaattctatgatttagacatgtttagttagagtagtgatgcagtcattgtatttatattagaatacattcttttcatattttttttctcactgcttttagggttggaagagtttagttagttagagtagtgttttccaaagggtgtactgcagtctacaggattttgataatcttttcattagaggagtattcaagctttatttaaccaagggggttgtcatagaactcatgttccatggaaccaaactttgagaatcactgccttagggtcactgaaactagaagagtttagcatccactatttgctaaaattctctttgaccaacactattattaatttagcttctttcatcaccaaactgtaaccccttttcagcatggagtacacatgctaggatgcaccagtctagatacataagaaaatagtgaatttaaattgattagtgaaaattgcttggatttggggagttagaagtcttgggtatcagttctagttctggcacctagtaaataattttgagcaataagtcatatataataacttaatttaaataatcagagccttaatttgctcatctaaaaacaagaataaaatgtttataagggatatttttaagtttgacttgagctaatgtgtataaaaacttgtcaaattgtgaacactgtaaaaagcaagatataattatcacagaactaagtactttatattggttcagcagagtttcagaatttctactgttgtcaaagcacatgttttgctatgttgattttcagctgctatgaagtttatagaaaagcggaaagtctgaaatttctgtgacaaggctttttgttcggggttatttttaaagaaaacagaagatcggattgcattaaaatttgatgattgtgttattcttgttatatatgtcttgactagtatttagtaaaagttataaggaaaaaaggagcagttgtctgcaatatactagaaatgaactttaatcttttcacacgattcttattacaacattttttcctctctccagattgcccaatcactgaagagctgtgatcttcctaaacagttaaaagtcaggcacagctatgtaactcatacagtttctctttgccagactagactaaagaaggagcactaatttattctgataaaacaggtctatgcagctaccaggacaatggaatctacgttgactttagcaacggaacaacctgttaagaagaacactcttaagaaatataaaatagcttgcattgtaagtacaattcttatttttagtctttctagttttgtgacaaatgttaaaagtatatgatttcccatttacatttctttgtgttgctattaaaatgtaaacttttaagtaactgtattcagtattatcccttatgaaaactctaatgcaaattaatatcttaaatcatattttacacgtaagaaatttgagtaacaacaagttaacattacgttaaactcaaaagttggaatccatgacagaacgctttgtggcgctgattttttgcatgattataactacctctcaatcacttttttattgcatgagtattttaagacaagaaagtgagaaattaaaatcattgtaccctattatttgctgaaccaacaattgtatcctattttacttcactcctagagatagtctcttttgcctattttctctctcttgtcatttcatgtggtaagatctgccaccccccctcaccccccaaataaattttccttgattttattttcttttttcttttttttaattttaaatttttttctttttctttttactccagaaatacgcttatccatttccttgattttattactctctcttttccctttgccatcaaacttttggggtaaagagggctcatttcattgcttcagttttctcagcccccaaccattcctttgtgctctggctttgtttctactgtactgagtccctgactcaaaagtcagtcctcctcgtccttcatccacttgagtgttcataacaacaataacttcctggtactttctcattctgaattattctctccccttgcttctaccatgacattgacattttcattttatgacttttttccttatctgcattcttagccaacaatttatctttattctcatga

SEQ ID NO: 11060 - DNA, 6000 bp, Homo sapiens
atcaaacttaaaattcaggttacctggcaaccctacattttgtttgaaatagaagtgtaagagataatgaaggagtggcagataccgtggttaacaaaaagtgaaggactagaaaccaacttcctgtagcaggtaatcagcgacaatctggggccagtggtgtgggggtaaaaagaatttatgaagatacttgtaggtaaagaaagtcatatttattagagcacgtatgaaaatgtgttgcaagggaacaatgggcaggccagcaagagaggagctgactgcaaggagacgaaggcttgctggggatgttctagaatggtgcttgtgctgtgtgctgaagagggctttgtgcagtactgataacaccgaggttgcagtgaattagcttgcatttttttttaatcacccgagggtctgatgatagctgagtgcaggaagattgtgagttatttgtgcaagagggctacatgttctggaccacaaagcaaggcagacttacagcttatctgctttatatttttgctttccctcggtcccgccatcctgactccttttccctaattagaaccccacactctctttggatggtacatgcgttttccattttcccaggttctattactctcctttggatcttacacttctgaattctctctattcgttttgttacctaactgatccctgtaggcatctctccttcatcccagagcagcaagaatcctttccttaccctctttgtagatgcaggcccaataacaggtctcaaaccttcccagagattatatataaaccatgcataatataggagaaaattaaatctttttattctctcccttaggggtagtgagtggttgatttacaaatgcaaatgatagatttaaatgtttgtgtaaagttgaaatgtcaaacattttgttggcatttagagatattatctgaaagagcattttacaaataaggaaactaaggctcagaggcttctggtaatctgttcaaggtcacatagttatccaagcttcttgctccaggggacatatttttgtgctttcaaaaaaagaaagaaaaatcaggatgtcatacacattcttaaaaataaattaatgccacagaaaaatgttttccctaggcctcacaaagattaaagaggcttgtgggttttttttctgtttagatttggctagatgtctttcttgttttactggcgaattagaagaaagctggaaaagctctgaaacagctgctaaaataattaccctacagcatatttcattttttaatcactaagaaaagttgtttcaaagtaatatttcaaagtaataattaaacattgataaattgtttttgtttggtgttttggccttatctacaaccaaagcttcaagcaccaagacagaaatgtctaaatatttatgttacaataaaacttaatagaaaacttacacaaaatcttaaattatcatctttactgctattccagattagagtatgcaatcactaaaacagagtgatttaggattaaggatgaaacattcattgttcacctttgcattaacccaaaaattgtgttgtggttttatatctcatgaccttattgtactttggaatgtgatggtgaagctgtccctcagatcatttagaataaagaagactgaggcaatatttcactataggctttgcaatgtctatagctaaacctgaaaatggcatatctgactcatttttttttttttttttttgagacagagtctttctctgttgcccatgctggagtgcagtggcatgatcttggctcactgcaacctccgcctcccaggttcaagcaattctcctgcctcagcctccagagtagctgggactacaggcatgtgccaccatgccctgctaatttttgtatttttagtggagactggttttcatcatgttggccaggttggtctcagacacctgacctcaagtgaaccacccgcgtcagcctcccaaaatgctgagattacaggcgtgagccaccgtgcccggccttggctcatttttattcttccgattttagacttccaattgggtttttataattacccatattaagtcccacctggcacagatgaggcatgagcattaggcagaggccacatcctggtgacgtgtgtgccaggtctgtcctgcagatgtgctacattttgtttggcttttaaacgtgctacattttgtttgtttgaagaaactgtttctctgaattttgtagacaacattttgcaaccggagaattcacacaaacatttaaatttcctgcttctcttgaaaaatctgaccatctgcccacactgggcacacaatcctgttgaatagatgctgcaacctttaacatggcacatggtttgccttttgcagtgtgtatagggctgcctcagtcaaatatggttcatggcatattgtgctttcaaaaaaaagaaagaaaaaccaggatgtcatacaaaatcttaaaaataaattaatgccacagaaaaatgctttccctaggccttaagatgtttgtgaccctggagactgcacactgtgttttccaaatgttaagtctttaaagtggttcgttgccttgagatgcagacaatacacttcttccatttgttttgtcaggtttaaaggcactttggataatgtctctgttgagttgcttttagaggttttgacactcatttgaccagtctcagtggagcaaatctttgtccttgaatctgatttttggaaagagtcaaaggaaaatttggagccaagtttggggcagaaaaatatgtgtgattatgaaacagtgaaaacctgtttctcttgggtggtttgtgagctgactcaaaggtaactttttaaaaaagttcaataatgctttgagggaaggcttttacttcttccagatgtcaactgtcctttctactaagctctcataatattgaagtagctttgttgtctatggtgacatccgaggttcttggtctcacggccacaaagatcaaatatgtggacacacacaaagggtgaggtttggagcagaatttttaataggcaaaaggaggagaatagctctgctacagagaggggtcccaaaaaatgggttgcaatacgtggtgaaatgcaggggtttttatagatgagctagtggggaggcggtgtctgatctacataaggagggaaaacccggtttcgtgcatatggcatgaaaacccggttaggaccaggtgtgtcatctgcatagggcttaagtgtctggcagccccggccccaatcttctactatataggcaggtagctactccgtgttgcttatttccttcttactgtgcatgtggtaaaaaagaggggaggtggaacccccatggtggacatgcctggccccagtagccccttctgtctgtgccgctgccggcatctcccgtgcaagcttccagtttccttacctatgtttgcagcccaatcttccaggttgctctttgttagaaaggaagtgatttcttgggctgctttttgttagaaggtaagttctgccgagggctcttttgctcatactatctgcctaaataatttctatctcctgtatcaatatcctatgtgtgactctattctgcatatatgacttaggttttaattattttgtttacgagttggtcctacccccccacccccgcttccaccacacttaaggaaagatacattttaattcattttttatatggtatgcatagttggaggccaaaagattgagttgaaggattcattacttgatgaataaatggatgggtggatggatgagtcagtataaatgaagagcatcccaagttgactattttaaagggataacatgcattttatatttgttaaacattcattctcatttgtaaacacttgtatatattcatgtattcaaaatgtattgaaaattaattgttttccttggtacctgaagtcagtcctgggtattgcaaagtagttcgaagtcactggtttccctctgtctcacttcactacacactggtgattttgctaagtgatgagccagaaaatgtacaagttccagaatcaaaggtaaaacaaaacccaccaagaatcagctcactgttagcgtcctagttgaaaaataaggcttatcaaagtatttcagattgcattaacacttttgatatagctaggtatcagtgtcaacctcaggagagggcaacgccaactcctgaaaccttcaatacagaaagtctagaaaaataagcaaatatacatacaaacaatagcgagaagactccagaaaccacataaaaccgtgggaatcgaaatatcccttacgtgtgttcagtacatgtgaacccacgtattttaagtggacgatttctctctcagagtaccgtaggtagtgggggacggggcgcagagggggagaaacagaaagtcgccttcctccatggttcatttgcatttccatccagaaactcacaggtcgaccccaagactccactctctcccgcctttgagaagccggaccggcatcggcggctgcatccttctcctcctccccgctctattttggggccccatgatctcatgccctctgcagaccacacgctgcaattccagcccagcccgcgccgcgaggccacgcagggcgattcctgcaagtgtcgggagggtggccggggcgcggggaggggacggcttggggggaagtttaagacacgcccacgtaagggacccaaaataaccgacacacagagtgcccgaaatcagacaggaagccaaataatccggggcgttgagtcgctttgccctgactgcgagagccgggtgtagggcggggagccaaggatctgaccgcgaggggcgggcgcggcggggaggggcggggcggggcgggcggcgcggggcctattaaaggcgcggccgggcagcggggccggagcggccggggccacgatggagcgcgacggctgcgcggggggcgggagccgcggcggcgagggcgggcgcgctccccgggagggcccggcggggaacggccgcgatcggggccgcagccacgctgccgaggcgcccggggacccgcaggcggccgcgtccttgctggcccctatggacgtgggggaggagccgctggagaaggcggcgcgcgcccgcactgccaaggaccccaacacctataaagtactctcgctggtaggtccgcggccaggccccggcgcccgggagggctgggagtacggggagggcggcgccgagctcctgcgctctcagcgcagtcagcaccgggcaccggagagaggcatggtccgggagtgcttcttcgcccgcgcgctctcctccgcagcctttgcaagtgccctacacagccgcccctgccaggtaccttgccagggcaggatggttcactctcacttgaattatggatgcctgtgaaagcaggctgttcaaaacggtcatccttagaaatactcgaccccctgccccaggagagtacgggtttttagaggagaaaaatgtcaaacgcgaaagttgttggtcttaagaaggtgcatcaatgtgttgcttcttttagggggctctgggcgcagtatacatgacttcacttgggttaactgattgcagttgaagagttagcggagctctttaagttttattaggaactctacggaacactttttccctttcgctccgttttggaatttccttgcaggtgctcagaaattccatggatgttcacattatgtgactgaagaaacctttatgattctttgcccactcttctaaccagaggctacacggtttgtgttgctaacaaaagctacctattactcctctgctattttgctatgacatttgcaggacccacagtcaacttcatgaaatgtgggggttggtttttattctgaattcatggtgggaagtgctgattgagagaaggcctggattcctggctgttattatttgctgaggccttgcgtaactgtccctaaacctcaatttctaatgtgtg

SEQ ID NO: 11061 - DNA, 6000 bp, Homo sapiens
attgagtcttgctggatgtgttgggtttggatacatgcacacgaagagagagcattccaagcttgatgaggagcactggtaaatgcacttctagtactagagagtgacggagatgttttgcatctgtatgagatcatgcaagactcacgactcatctagaccctaatttttctaacacttttcaatgaccctccatagaatcctcggtgtttagaaatcttatagagttctctgtagcaaaaacagtccattttaaaatcagtgaaaacttgcagcatcaacacaaccactagtagctgctgctcatttggcctgtaaagaacaatttttactggttaatagcaaaaaaaagacaaacaaacaaaccaaatccaaaacaaaaaaacaacaacccccaaaacaaacacaaaaaacacctggctaattaaatgcattggtactgcattttgtgtctatggcaatttgaaaaagctgtaataagcatcaattgtaaggaaaaaaaagagtaatttttacctacttctttctcttaatctttcccaactgccctccagggtaaaagaactctgtcacctcagttcatataaacaaacatgaacaacacacagtaggttctagaagtgtagtttcttaattggttttgagttccatataatcctaaaaagtagctttctcaattcaaaatacagacattactgtgtatttagtggtgaaaactttaaaagaacataaatatccaaaaagaaaaaaagtttaagcaaaatatatgtccatatgatgttgtgctatgcaatcattaaacatgagttttacaatgttttaaataggagaaaattgctattaaacttgaggcagaagaaatctctgtgatgcaagttgttatatagtatgtcacaatcagctaactctatattgtaaaagacttgcaggaatatgctaaaatgttcattgttttctctgggtggagagagtggggaaaatgtttttttaaaagtagcgtttccattttagtatcataaatacgctacatttataatgaataaaaataattcagaggtatcttttctgtaatactgaagactttttccatgcccaggcctctgagggggacatgtcctaactttcacccttgaagtacagataaatggggagaaaaaatttgttccaaatatattgatattgttagaaaatgcttatctcatgtaaatgcagaaccaaaggaaatgtgtaaatatcgaatactgcaaggatatgtataaacacaattcttcctcctgaacttttaagcaacgaccaatagttacataaagttggcttcttggaatacaatttaagggtgacataggagtcccagtcatttcccaaattaacaggtattatcatcagtatgtcagacagacatcctccctgatacggtttggctgtgtccccacccaaatttcatcttgaattgtagctcccttaatctccacgcattgtagggggggaactggtgggaggtaattgaatcatgggggcaggttttcctgtgctgttcttgtgatagtgaataagtctcaggagatctgatggttttataaagggcagtttcctgcacacactcttttgcctgccaccacgtaagatgtgactttgctcttcctttatcttctgccatgagggtgaagcctccccagccatgtggaactgtgagtccattaagactctttttctctatgaattatccaatcacaggtatttcttcatagcagtatgaaaatggactaatacaccccccctccaaaagaaaaaaaaggaatgaacagtctgtctcaattattagaagtacttaagaaagggtatcttcagccccatatatagtctaagaaatattacaacaatcaaagaatatagcttgaagctaaaacgggttcttgaaatcttcccttggtgtttcttatgtttactgctattgatgaaattcaactggatgaggcttttctcctccagtctcactaactgtgtagtagaatgaaaaagataaaaaaaaagacatgcaaatatttcttctatacatagaaaacagtattatctaaatcaaatatggaatcatcataagaatacttagaagtgaataatgtattatagttcataaaaagtaataacttacctaatgaagttttaaaagcaattgtttacgctgtaaaaacacaatgtgtgtagattaatattttccacaaaagttatctgtaaaacatgactaagattgttagatatggtctgaaaagcacagaaagcaagcctggacatgttaatagttatcaagaagttccaaaaattgtgaactgacattctcataaaatagtatttgagtcaagttttatacaaacgcttcatttttttaaagcacaaaactatctgatcatggttggcaaatcatgaaaaaacaaaagcaaacccagcagaataggttctaaatacttaattaagagttatagttatttatttaaaagaaactggtcgggcgcagtgactcacacctgtaatcccagcactttgggaggccgaggcaggtggatcatttgaagtcaggagttcaagaccaacctggccaacatggtgaaaccccatctctactaaagatacaaaaaaaattagccaggtgtggtggcatgcgcctgtagtcccagctacttgggaggctgaggcaggagaatagttgaacccaggaggcagaggttgcagtgagctgagatcatgccactgcacttccgcctgggtgacagagctagactctgtctcacaaaaaaacaaaaagaaaaacaaaacaaaaaacctgaccattaaaaatggctttatgaaaatattatttcattttgtaacaatggggttggggagtcttaataattgtctaacatgtaaagtaggaagggtatatcaaactttgcaaatatcacattaactcataaaactttattaaggctctattgagaggtgaggccagctggacctcctgagacaagtggggacttggggaacttgcctgtcttacaagaggagtgtaaaatgcaccaatcagcgctctgtaaaaagcaccaatcagcactctgtaaaacacactaatcagcactctgtaaaacgcaccaatcagcaagattttaaaagtagccaatcgcagggaggactgaaaaaagggcactctcataggacagaaacagaacactggagaggacaataagggaataaaagctggccaccccagccagcagcagcaacccgctccagtcccctttcatgctgtggaagctttgtcctttcactcttcacaataaaccttgctatcgctcactctgggtctgtgccatctttaagagctgtaacacttaccaccaaggtctgccgcttcattcttgaagtcactgagaccactaatctaccggcaggaaccaattccagacacattattaaggtaggtagatcttcaatagatctactcttttttatttttatttttttggcagtttataaccatgtaccaaggatgcacaattaaaaaaataaagccaacttttacattaagatttaaccaaaaatcatcaataatacatcgttttaatgctagtagaatcttcttctgacatcagttctattagcataattataatgccaattaaaaaaatctagtgggtctcttcattttagtttagagcttgattggaaacattcaggaaaacatccatggcttgcttgctactttctctttacctctagcactatgcttctccccaccagccctccctccacatcctctgactcagagactatttgaagaggacacctgttttaaatggatccacaggaaatacctatgttgccttttcataatccgaacctgcaactggttggctgaaatgaaaatgttgcccacagactgatgcaacttcagtgtgacaacatttactggaaggcaggagggactccagtttatatttattttccttccattaagccctggtagtgtagtgtaagaaaaaagtaagggcaaaaccagtttaacaaccagatgattagtattaaattacacgcaggggttttacatccaaaattggaattttttaaagctgaatgcaatcttgtggcagaaagttatttgaaaatcctttctttatagctttttatctataaacctcttgtccaaagttcatattctagctgatgttatatactgatatgacattattcaatctgtcatggaaaagtgctgcgtagcctacccattgaaagcagaattgagagagtttcctagtgattgacagtcgtttgtcaacactgaaaaccttattgccccaaaatactgaaagtcactcgcggctgcctgtgctcgggtttacaccccacgttcacacccccaccggatccctccgcacggggcaccagctctcggccaactgcaactaccccaggaagcgtcaccgcgattccggggcgggaacatttgtggacactggggtccactccttcagtctaggttccccgccccctcgcccggcccggcgcccactagccacagggcccgcttccccctggagatcagcgcgcacttcccgagccctcgtagcactcagaggtcgcatccacacctgggatgcctagggggcgcctcctggccgggtgtcccgggaccctgcgaacgcaggagcagaatgacgaaggtgacgaaagagatgacgacacgccgcctgccaggccgcggccggcagtggagagcgtccgcaaaccgcgcccggccagtacaggtcacccgggcgctcgcggccgcgccagtccccgggggcgcgcgccccgcccccgcccccgcccccgccccgccccgccccgcgcccgcgcccgcgcccgggttcccacggcgcccgcccccgcgcgcccggcgcctccctcacgcccgccctccttgccgcccagccggtccaggcctctggcgaacatggcgcttgtcccctgccaggtgctgcggatggcaatcctgctgtcttactgctctatcctgtgtaactacaaggccatcgaaatgccctcacaccagacctacggagggagctggaaattcctgacgttcattgatctggtaaggccgtcccctccccctgctcgccccgcaccccgtgcctgtgtgtgcgtgtgtgtgtgtgtgtgtgtgtgtgtgtgtggatgcgcgagcacctgcgcacgtgcgcgcctccagcatccacccgtgtcctcgcctcttccccagtgattgcgtgtgaaggcctggctgcccccgcagcggcaccttctgaaccactcaccgttacctggtagctgggtacccttacctggcaactgggggacaaatggaggtggggcgcagccaggtggtgggctctttggagggggacaccgaactgcttctaagaggtgacacgggaagaatcttcaacaaaagcatcggacctgatcctgaatggcctgagacccattcgccctcaaggtgcttttcagagcacccaccgtgggatgaacttgttgcaactgaaggaaactgggtattgtctagtgatttggaacttcacctgaaagaaccaaatccttctcataagggagagaaagcacctaataaagttgtcttctttgcatctgtttttttcccccattgtcaataatttactttcaacctttaccccgtacatattaggagacagagatgttcaaagtgcatttccaaggtgactgtacacacttctctgtcttcccatgtacaaatttacagtagtttgcataagcagctcctctgttggcacaatatgataatcttgacaggtgcaggttattattagtatatcattttgaaagtttttctatttctggcactaaaaggccctcttcaacctccctggagaacagaacatgggcataaggcccaataatgaactcatggatggacctaggaatttcagggtaaaggtgactaagacacacgctaaaagattattaggaagaggc

SEQ ID NO: 11062 - DNA, 6000 bp, Homo sapiens
tttttctatacacatatgtatagatagttagtcaatctttcttttttcctaattataaagtaagatgtgttcaaggtggagaacttagcgattaaaaaaaaaaaacctcatgtatcaaaaaaaaaaaacccactaagaatcccaataccccaaaatataatccctgttattctgaagcaacgggggttttttctgttttttcctatgccctgcatacacatatttacagtttttaaaaagtcaaatagatttacactgtatatacagttcagcagtctgcccttttcatttagaaatgtattgttaacctttccctatattgggtaatattttttcatcacatgattttgtaaaggttgtacagtatttctccttatgaacatatctgattcaaccaactagtctcctattatttgacatttaagtgattcaaattcttcactattataaacaagtaaagaacttctctatataaatatttatattgcttctttgtgatttattcctagaaacagctgtaaaatacaaagagctcctacagtgcgattttttaaatcaaactattacaaaattggggaaagtatatgcctcggcaattcacagaagaaaaaaatctaaatgttcaattaaattacacagtagatacacagtattcaggtaaagaaactgaaaaggaagaaagagagcagaggatatgttggcaagcagtgagctacctaacaccgagaggcaggccaggccagtatttaacagcagatgacaggcctcaaatcacagccccatccttcccagctctctaactttggggaagttactgaactttctcagcttcaatatcccatctgaaaatgaggaccataataatactcacctgatagggcttctgtggggcttataacatggcccacatgaaaacactgtgcatagcatagtatctggaacacaccaagagtgcaacactattacttagtcatacttcttttttccaagcctatctttagaatgttatgctgaacatgttatgatgattaaaatgataacctatgatgatgctatgcttagctctcagaaagaaacctgccatgaaaaataatggttttattaaaaagcagtaaagttgataaccttatatgctatccaacagatccttttgtagtgatggaaatgtcctttgatctgtactgtccaatacggtagccagtggttatatgtgggtgctgactacttgaaatgtggctaatacaactgaggagctagattttattttatttcaccttaattaatttaaacttaaatagacacatgtggttagtggctacgatattaggcattatggttttagaaggcaatacaggaatatctatataatttcaaagcacatacatcctttgtcccattttaggtagtcactccatagcaacagaaataccatgaggtagggaggagtgactaatatattaagactaccaaaaaaaactgctgataatcaaaaagagaacatataattccatttatgcaaaagtacatatggctgtttacatatggacagagagatatggaaggatgctcccaaaatactaatagtattatctctaatagtaggacttttaggtaatttttacataatttgttaacccttttttatagtttgaattttttatgaccatgaattatttacataaccagaaaaagaaaacattaaaatattttcactttgggaaaaaaaaaaagggcattactggatcaaaggataagctcacttttaaggccttttatatctgcctagccaaattgtcctaataaaagggtgttctacgcttttacactgttggtgggactgtaaactagttcaaccattgtggaagacagtgtggcgattcctcaaggatctaaaactagaaatgccatttgacccagccatcccattactgagcatatacccaaaggattataaatcatgctgctataaagacacatgcacaagaatgtttattgaggcactattcacaatagcaaagacttggaactcaacccaaatgtccatcaattatagactggattaagcaaatgtggctcatatacaccatggaatactatgcagccataaaaaaggatgagttcatccttttcatttgtagggacatggatgaagctgttaaccatcattctgagcaaactatcacaaggacagaaaaccaaacaccgcatgttctcactcatagatgggaattgaacaatgagaacacttggacacagggtggggaacatcacacaccggggcctgtcatggggttggggggagaggggagggatagcattaggagatatacctaatgtaaatgacgagttaatgggtgcagcacaccaacatggcacatgtatacatatgtaacaaacctgcacattgtgcacatgtaccctagaacttaaagtataataatttaaaaaaagtaaattaaacttaaaactttcaactttggcttaactagagttaactttatcagcatattaaataaaaactgtaatatacatgttacatacaaaaaaaaagggttttctaaattcagctcctcccaaccaacaaacacctcaaacatgcacacccttattatcaccaagcattaaaattgctttcacttttgccaatttaacaggtaaaaaattgtgtatcattttaatttgaatttcattaatagtgaaattgtgtattcatttatttgctggctactcactcgtcacttcttttagaaatatcatgttcaggtgaggtgtggtaactcacacctgtaatcccagcactttgggaggctgaggtgggacaactgcccgggcccaggagttcaagaccagctcgggcaacacagagagaccctgtctaaaccaaaaaaaaatcttctaaaaataaaaagaaattttaaaaagaaatatattcatagcctttgacctttttcagtattagggtatacatctttccttttacgtcggaaagtacttagattttatataaattatatgctacggttattaaacctgtccttttatatatgtcgcaaatattttccttctttgtatttcctttactttgtatctttttcttttttgagacagggtctggctctgtctcccaggttggagtacagtggcacagacacggctcactgcgacctcaatctcccaaggctcaagcaatccaccttcctcagcctcctgagtagttgggactacaggcacatgccaccatgccctactaatttttaaatttttatttagtagtgacggggtctggctaagttgcccaggctgttcttcaacttttgagatcaagagatcctcttgcttctgccttccaaagttttgggattacaggcatgagccactgcatctggccatgctactttgtatctttttaaacatgtagatgttttcaaagaatttctagacctctctggctttgacattttttgtctcttaattgtattataaacacctagggatgtgattccatagtttacgtcctcctacacaggattaaggaggcagctgcttcttgggttttagcatatacaagtttcttcaaggtcttaaaggaaaaaaagtacttgttaggagggctacatgtcactgggcaacaggaacttttcagcttcattataatcctatagcaccaccgctgtatatgtggtcctataagattataatggagctgaaaagtgctagcgagcttcttaactgggataaaagtttgtttgtaaacgtatgtaaatgtatttacatgtgctagcccagggtcaacctaaaaggtagcgaaagtgtttagcccagaagtctacatagaaactagggttgtctacctccataccaccctgaatgtcccccgatctcggaagctaagcagggtcaggcctggttagtacttggatgggacaatagggctaaggtgagtagatttaatgctccaggataacgacctttaccgacaggtcattgtgtggcacgtggctgtatgtagttattaaaatgtaaatacatatatttacaaacaaactttttttcccagttaagaagctcgctagcacacagcattctgttgaaagccccctttatttcgcagtcctgaagggagtgagggaaggaagtaaaagggcagaggaaataatgaatgaatgcgagacgccgattgtacagggacttgtttccatactgctctctaccagaaacgttctcagtttccttccttctgctggacatgttccaagggccaaaacctcaaataatgtgactttgtagattggagagtgtgtgaccacagaaaggaaagggaggcagcacgtgccagccggcgacagaatgttaagtctgcagcatactccaccgcaatgaaacaaataatttgtgtatttcctccccttccttcgcccagagccactgtgagaatgggctacagaaagtttcgaggcagtaaagccagttgttcacccagaacatctgactgccataaaaattatggtgacgagaaagaacgtttgctcaaatgccggggtcgggttgagggctggagaaaggtcccaccccgcagcatctacctcccgggctcctcaccatgtgcatcgcctcctccatccacttttcggtctcctctgccgacaccgagcacgcgccgcttgcagctggcttgggtgccgccttcgcctccatacccagccaccactcagctacagagcccgcggcagaggaggagcgcgggcagcggaacgcggcgggcccgggaccccgtttccgggggtagtctaatgaaaaggcactcgggagctatttctgaacggacctgggcttgtcggaccagtgagcggcggcggctgcgcggcggcagcggcagaaagcgtagctgctttgctgtagtccacgcccccttgccgctccggtgacagtctctgcggaaagtcacgtttgtgatttcgggagagcacagaacgggacgacggcgctcttgctgggtcatctgggccaggtgacgaagaaacagtttcctggtgaagcagtccctcacccctagtcagcccacacccctagggcctaaagatgctgaggtctgtatggaattttctgaaacgccacaaaaagaaatgcatcttcctgggcacggtccttggaggtgggtgacaacgtgcttgaaagggggcattgggagaagggggtgggagaggtgacttcttctaaaataaggacaggccgggcgatcctagtctgggatatgtagagggagttcgatcaaccatgggatgaaaagggaggtggccaacctccagggttctcccatctctgcagttgagaaatgcctctgtgccctttgccctgtcaccgactcttaactctgtttctcacctatccttttttctcacggacctttggagaactcatcacagtttaagtttctgtttcaaggcaccattctcttacaggaactttttaaaaaaaattctgctttcctgtgagattctgcatttctccttggcactcttgatactttggctctcacccttctcaggagtttaataataatctagggaagttacctataggctgcacttcgggtggtggttaaagtcgatttgaatttttgaaaacagcgcagttgtcctaaaggactgaaagatatggattagataaagaaaaacaaatcaatattttagctctgtttctgccattttagaatacaaactatggcagtaagaaaaatgcttgagggatgttgtgcaatcttcctcaggatcttcaaggttgggatcattgtaatctagctgacataactgagttgcacaggcccagaggagatttagaaacagataagataaaaatcttgagacgcttttccctcatacaatgctcatgtgataatattcagggatttgaaggagggaataaaagttttgtgaattatatgaaaaggacatctaggaactataaaagaggaaatttgttagaacttgagtttttgagaaa

SEQ ID NO: 11063 - DNA, 6000 bp, Homo sapiens
gaatgaacctggaggacattatgttaagtgaaataagccaggcacagaaaaacaaataccacatgatgacacttatatgtggaatctaaaaacactgaactcatagaagtagaagtagaactgtggttatcaaggactgagttagagagatgttagtaaagaaaaaaaagtagaatggtggttgctaagggtgagagggaggagagaccagggagttagtgtttaatgggtgcaaagttttagttgggaagataaaaatgttcaggatggtggtgatggttacaccacaatgtgaacgtacctgtatttaatgccactgtacactttaacatagttacaatggtaaattctatattgtaaatattttatcacaaccatataagaagtttaaacacattctttatctgcaaagagttctcgaactagcatgaaaaagagaaatggtagttgctggttactacatggtacagggatacgcaatgactatttgactgagggccatgaaggagttgcacctcagaagggtggctgtgctagaggaccttccaaccctgggattcaatgggtttagagctctgtaaattaggaacggcactagcgtgcaggatgatggccacggctgacagatcgccatgcaactgccacgccccgcacccagtgcctgctctgttttatctgagcttcaccctaaggtccttatcggtcatcatctctgaaaaactccagactggaagggagagccaaggtctccagagaaatttataaaacaagaataatctggggtttcagctgggtgtgagcagatcaattgcggaagataattcagattggccatactctaaaccctgtcattatgtgccaccatgcccggctaattttgtatttttagtagagacggggtttctccatgttggtcaggctggtcttgaactgccaacctcaagtgactcgcccgcctcggcctcccaaagtgctgggattacaggcctgagccacggcgtccagctcttgcttttaatttcattgataaaatatgttcttgcctccacatttaccagcatctctgccatactttctgaatagctgggacaacaggcatgcaccaccgcacccggctaattctttgatttttagtaaagacaagatctccctatgttgcccaggctggtctctaactcccgggctcaagtgatcctcctaccctgtcctcccaaagtgctgggtttacaggctaccacacagctgagattatcatttgaatccatgaggaagactgcctgaaaaagtaaattgtggatggggagggaaggggaagattgctggggattaagtgtggcattttggacacattcagtttggagttgttctctcctgttaccagggatgaactctttcttctgttttaccctaaatttccatgtgtgcattggattgcacacctgctcatctactcaagaacattgctccagcatgtaacccattttttctcccccatatcatccctctttccattccttttggttcatgctggtgagcaaacaaacatgtatagcttctaattaaaaaaaaaaaaaactgctttgactatatggttccttcctgtttctactccatttctttgtcttcatctgatgtttttattctttcactccaaacaggctttggtcatcccccactaaaactcttcttaccaagctcaccactgacctccatgtggccaagcccattcctcagttttccgtcctaattttacacactgtagcagcatttcacagttaattgttcttttttacaaaaatttttttaatttggctcctgaaacgtgctctctcttggtttatctatctcactaatcagaacttctcattctctttttttgattctttatcttcctaacctctgaactttggagcatgccaggactcagacttcagacatccccattctgtctgcacaccatctatatgctaaagaactccaaatatataccaccatcccagactcacctaaccaactgccttcatgacaacttgacaactccaaactgaaggtgtccaaaatgccactcttaatccccagcaatcttcacctttcctccccatccacaatttactttttcaggcagtcttctccatggattcaaaggttaatctcagctgagcatggtaactgatgcctgttaacccagcactttgggaggccaaggtgggaggatcacttgagcaggggaggtcgaggctgcagggaaccatgatcatgccactgcactgcagcttgggcaacagagtgagctgctgtctcaaaaaaattaaaaatgtcatcagcaagcaccctcacagacacacccaggataatgttttaccaaatatctgggcaccccatggtccaataaatttgacacatcaaattaaccatcacagctttctaactcgttggcctgttttaatctttgtcctttaatctgtcctcaacaaaacggtagattaaaaaaacaaccagcaacatcatttagcttctctgataaacattcttcagtcttcctgtctcaatcaatgtaaaatgtaaagactatcatgactaccaatgccctacatgctctactccccactcctagccccaccaccatcactcttcctggactctgttttgcccacgctgatatttctcccagaagcccagcatgctcctgcctcggggcctttacatccactgattcctaggcttgaaatgatcttaatcccaatagctgcattgtttcctccctcaatgattctcttatcttagatggctttgcaatatacccatttttaaaaatataacatacctcatccctcttattttactttcttttaaaataaactgtattttttagaaccgttttagatttacagaacaactgcaaaggtagtacagaatttccataaattccatttcagatttccctatgattaccatcttacattacattcctcacaactaattaatcaaccttgattcttattactaatgaaagtccatgctttatttagatttccttagtttttccccaagtcctttttctgtcccaggatcccatccaggataccacattacatttagttttcacgtctcctgagtttcttctaggctgcggcagtttttcagactttccttattttattttattttttgtagagacagcatctggctatgtcggccagatcaggcctcgaactcctggcctcaagcaatcctctcgcttcagcctctcaaagtgtacggattacaggcgtgagccacgtctggactgtactttccttacttttgataacctgacaactttgaggaatattggtcaggtattttgtaggatgttccactactggaatttgtttgatatttttctcattatgagactgaggttatggttttccaggagggagaccacacatgtaatatgccacattcatcacatcatattgactacatgccatcaatgagtcacgattgttgacgttggcttagaacatctggctggggtagtgtctgtcggctttctccattgtaaacctactgtttttccctttccacattgtactattttggaggaagtcactgtgcacagcctagggtacatgatctacataaattatttggaattattctgtataggagatttgtctcctctccgccttttatttatttattcaattatttatttatatcagtgtagactcatggatttttttactttggcttgtaatccaatactaccttgtttagtttacttcgttgctcaaatggttccatctttggcaactgggagctttcaggtggttcctgtgtctaaacattctgccatcaaggcaggattcgttctttagttttattttttttcttctcattcaattgagacagcgtctcattctgtcgcccaggctggagtacagtggcgcgatctcggctcactgcatccttgacctctcagcctcaagtgatcctcccaccttagcctcccgagcagctgggatcacagcgtgcgccaccacgcccagttaatttttttattttttgtagagataggctttcaccacatcgctcaggctggtctcaaactcctgggctcaagagatcctcccccttcggcctcccaaagtgttaggaatacgcgcgtgagccaccgcgcccggcccgatttttccttttttgagtatcacttccttacttttcagcctcagccttgtttttcaaggtgctttaccaccacctggcacaatccacactttctatttatccctccccgttaaagtgccgggacctggagggtgggtcttggcagtatttttgagcgcggtgggcacacaaggggacgctcagttgatatccagagaatgatgagcccggcgggtgttgaggccgactggagagaggttggtcggcagggttctgggaaggcggtgctcggcctccgtgtgaccgcaggctcctcgcccgcgtcctcgagggtcccagggatgcaggacctgccgcagcttccgcagccacacccacgctcagagacggcttccagcgtcctcgccgcggcaacgcaccggactgcaaatgtcaccagcgcagcggggattcccgggggaagtccagcgcgctccctgccctggggaccagaggacgagcggaggaagtgtcttgggcggcaaacatcccactccccgcgccggtccgcgcagcccgcgggaacgcccctgggcttgcgggaggggctggagcgcgtccccggctccgggcggtcccgagcgcatggactctgggtggggcgggaacccgcgctctgtgagccggctgccgccgcgccccagcgctgtcatcccggggcggggcctggtccccagctgtggtcgcttcctaagcggcgggggctgagccggcggcgcccagatgcggccgcggcggcgcggagctcgggcggccgtggaggaactcagcctcggccgcaggaggcgccgggagcggagccgccgggagtcgcgcaacaggtttccttctccatcgctgcgcccacaggggacgcgcgccctgccgggagaggggcttctcggttcgcactctcgctcccagtccaggtttgtttttctcttcctgagcccccatttctcttcctgactattttccccgtgcgcggagagatcggggagggcgggtcggggcgggggcactgtctaggctcgggacccgcggctgtgccttaggtgggattttggatctggcgcaggtcctcacgccgcctctgggcaccttcggaaacacagcattgggtttctcatataaagcagaatgattttttaaaattacttttaatttcagaggctgagggacttaggatttagtgcttcgtaagaattattttagggatacctgttggtaggctgcctttataaagtgtccacccaagactacttttattttaaatcgaaaggctggagtgtttttttattatcacctcttcacttcctagtagggtgactgtgtcaaaaacaccagaatgggtacttcttgacttgaacttggcggtgtcactcagtagccaggaaagacggagaaattgatagagccttcgaggagtcccttcgaagcccacgtaagactttgttttagaaacatggagagaagtagtggcaatgcctgcgagagccacgccgtcctgagagggaattctgcctttttctagactccgctgacaccagctgagatctgtattacttcctgtggttctcacgcacttgtttcagccgtttctcagcagagggaggagctgttatttacaggtatccaaaaatgagtcacagggctgctctcttaattgtgagactttgttaatgaacttttgaaaagcgaggcttgctttaaaatgagactctagatgtgaaatgcctgccctgccaacctggggcagtggtatgggaagtgacgattgagttttcagtttcctaaggcgcctgatgttacaacatgccagtaaaggtc

SEQ ID NO: 11064 - DNA, 6000 bp, Homo sapiens
aggttggggtgagctgagatcatgccattgcactccagcctgggcaacaagagtgaaactccatcttaaaaaaataaaaatcataatatagtggattgctagttcccagatgagtcttgtgcatttagctaatgatatttgttgagtccactgaggaacaaatggtaaccagaaattagtcaggagtcacaattgtggaaatgaaattgtagtaccacactttgaagtgctcaggccaaaactcgaggcatcatatttacctctcctgtctctgatacccccataccatcagcaaatccgtttggctctaccattaaaatataaccccgaatctaaccccctgtgcactacaatcacttttaaccattctggtccaagccaccaaccccttgctggattattgcagccatctcttcactgtaggaagaactgacagtagaaggtaaaaatggtgagtgacagatggctgcaatgatctctactttcttttacaattagatgcaagttgtatctaaactgctatcagaatatttgattgcaaaaaccagaaatataaccaaactacttaacgcaaagaaggaaagaatgtctcaagtttccataaagcataagattcgggaaccagaaagtcagaaatcaagattctactctcgacctccttgggtcactggtggtcattctctgtcatctctgtgtctgctccatcctcccgagttctgtctaagaatgggtacactcagctgtggtgtgtaggaaataaaacacactacctagccctaggacaacatggcttcctcctcattcagattaatttgtaattttgtaatccagttccaaattcccagaagattatctcttggcttgccttatttctggtttcagtctcagatcctagtggtttggaccaggaaacaaggggacctgattaaaatagagttgcccaggcccgtcatttagcaggggctagggaactcattcagaaaaggtggcttgaactagacaaaccaactaattaacatctgtgctgcaatttccaaataatttaaattcaatagtctattaaactatgtagtgaattaattattgtcatgcacacagccttcaggactcaataaactgaaactaagtcaataaaaatgaatgctagcaagtgaggtagatttgttctactttccagaaagcttttgccattaaataatttctcattaaaatgtttattttcagtttctgccttctccatctcaatcagcatccagcttacctttgcgatctgtaccaggtcctgcattagtctggtaacctttaaactggataatgaggactgatagattcagaaatgttatgaattcttggtctttagtcttctgcacctgtcaatttcatatgctaacattcttttagtgtatgtgtagtttcgttttcttaaaaagttgtcttattattttcattgtgttggcagaatattttttagtgccaccttgactcagctaaatgtaagatatatatttataatttgtcagtagtatactattacatcatcaccttatggtccattcttcaaacaggtaagaaataatttcattcaggagaatgtcacctaaaggcagaagctattgaattgcttgaaatcaacatacttactcattcattcaaataaaacaaataaacacaacttttctgagaaattatgatgggtaaaattctctgttttgtgctcaatttaaaaatgaataatatagattatttagtttaatgtatttaattctaaacttaaaatgtttaattccaaataaaattctcaaaatttcagttctaatttgaaaaaacaaattgattaattctaactgacttataagaattactgtgagtttgaggatcgattattttacctttgctataataaaggtcgttattttgggccattgttggttttggccatttggattttcggataagtccccgtgtctctgagcacagaggatggactgcaagttcacaaaggtaggctatatccatcttaaattccaggtattcactaagaactgaaattttgagaatgtcagaatgagttcataacctgatggaaaagatagagtatagaaataaaaacaaacattctagagtcagaagtaggaaactggcttaaattggtgactctttgaagtcccctttacctcaaggaccctgatagaataggaaactgacatttttgagtgtctacagagtactaagcaatgcagtacaaacttttcatattctttcttttccccctccagttcatgctcataaatttctaagaaggtggtattaatctcattttaaacctgaggaatctgatccctagaaaaatttaaaatttgcccaagattacacatattaccatggcctggactgaagttcatggctggctgacaacaaagcctatattttcccactacaccacaaagcctctcaacaagaagttgtcttttttttctagaaagttttataatccaatgatgaaaaattatccaatagatttattttagacctaggtaagtaaaaaggcagatcatacaattctatggggttgtgatctgtctgttttgcaatttccccctgtggaatcacatgtacttttaaaaagctctcaaggtaattctgaggctctcttccccattgtcttccaatggtctttgcctcctgttcgctaggtctgctcctccttatccggcatgatctatggtgggcgtcaccatgtccaagccttcctggccagttaagtggccctctgccgtcctccttcattattccatcattggactcatcacatcgttttacaattactatttatgttaaaagtcgtctccgttagaccgtagtgagcttgctgaaagcaaggattgcattttcgtgtctttagtacctagcacaccgcctgacaacaaaatgttagagaactaaattaataaaaaattcagagccacttggaaatagtttaggaatgtcctcacatttgttttcttggtcgttgcacccagcgaatcaactaattcaataaatattaaacgacaaatcaaaattttgtaggttccaaatgcaagacatcgtcctgggatgcggaagctgcagagtggactacatttcccgaaatccctgggcccagtcgtagttggttcgctgactgcttttgaatgctggttaactcaaccaatagggtgacgagaatttccctaaaggagagggagccgacctcacaaagaagagggcgggtgcttctgacaggtttggaacttaaaaaaaccctttgtggcggttccgtggcttttccgcagaccagagcgcgcgaggagtcattcgctaggaacctgtccccctctccccgaattaggattagtcttcctgcacttccttccttccttacgtctttcctatttccacatccttcctaatcaagtacctgtgcttccgtccacctgtcctgttgaacgcactctccggggggtttccccggcacaatctcttgtctgtcttttccaacttgagccaggcatttgtctccaagcattcacgcgagatgggcagtgcggcctcggaaagatctgagcaaaaacttcatcctatccccctttccccgttctagagtgaagctcccagggcattactgagtggctcatcagcgtcagggcagattgaaggttctgaaaaatagtggcagcgcggcgtttcctgccacccgcgctcctccccggcgaggggctgggtgcggggtagtgtcatcggcccgggctgacaccggccctggaaccgttccccgctggcagcctcttccatcccagcagctaactgctaagaccagacacgttccaccaacagtaacagctgtaggaaagaacccgttttttcccgtctaggtttctctccttttcctagtacctaagtccatcatcctcctgccactgacatatcgttgtctagacgctctttttcaaaactcaaatccaatcaaacaaaaacaacgcccgtcaataaagcaagaaaaataatactgcagccagcggccaggagcgtgcaccccattaacggcgagaaagcatcaacccctgctgtaatgactgaattggaaagaaaggtttcctgctgcttgttagtcgtcaacatttttactatgccagctgcaagagaagcagctgcatactctggcaactcgactggggtgggagaaatttagccagcgtctgggattttcgcagaagataatttaagccccagcttcgctcgggctggggggctgggggcctgctgggccagggtgggggaaccgggctgcggcgcgcatgcgcaggtaccgcagcccggctcctgggaggccctgctgccgccaccgccgcggcccgcgctgtaaccgcggctgccgctgctgctccgggcgggcgttggtgccgtgtgccgaggcgccctgtcaggcgatggggagcggctgggcggggagagccgacggccgcggcggcgcctgaggaacgcagccgggctcgggagcggcgagggcgggccggtccagcggcggaggagcgaggcggggcgaggcaggcggcgcggggacccacaccaggcgccttgtgtgcgaggccgagcggcggccgcggacagagagccggcgacccccggcaggaggagaaggagccggaggacgcgccgagggactgcggggccggggcgggcgagcagcggcgcggccgcgggccatggacgcagcggcgacggtggcggcgccgggggcgagccggggcggcggcgcggcgcagagtccgcccgcggccaggtgaggctgggctgagcgggctcgggcgccgccgccactgctgctgctgctgctgccgggccgcggagcgaggcggcggcggcggcggctgaatcggcaccacagcagccgcgccaagcagcggcggcctcggaggaagaggggtcgccgcccaggtttcttgcggccgccgctcttgtcgtcgcagtatttcctgttcggattatcttttgcttccccccagctgcctccttaccctcacactcccactcctccgtttccgcggtcgaagctgccttcggccccgggtggtctcccccgcccggggaccccctgtgcctcccctcccgggctgcgggggagcccctccgagaccatgaggaaattcaacatcaggaaggtgctggacggcctgaccgccggctcgtcctcggcgtcgcagcagcaacagcagcagcatccgcctgggaaccgggagccggagatccaggaaacgctccagtccgagcactttcagctctgcaaggtgaacggagcgcgcagccccgcgacaccgtcattgaaaaattggggttgttttaagggggctactcgggctttacatgggaatgcaagggaagagaacgccaataataataataataactctaataaaaggctcgctcctcccttggcaaacgtttcttcggtgggttgttttggagattgataccttactccttttcattgatttttctctctcccctttgcacatgcagcaatcagttcaaggttgcttcaaactattatccgacctttaatcgtattctgacactgccagtaataacctggaagcttttatattcaagcgttttaatatgattcaccaacttcgaagtttcctttggaaacggtgtctaatgaatgttgtttatcaaaaagccaaacctgttctaccacacctttgctcatcacttttcccttaaaatgtggtgtaagtggcttacgatatgaaatcacagggttctttttatcattatgtttgttaaaaagtactgagatttttgcctgttaatggcacgataattgccatagcgttctgtaattcagaaagaatgatgcagcgaattaagtcaccagctgcttaatgagaaacacaaacttgcctcggttttaatacctgcctttctcataaatagccatgtatttgtatgtcagagttaattaaaagtgtgcatata

SEQ ID NO: 11065 - DNA, 6000 bp, Homo sapiens
gctaaagtctagatttcctagatactctctgtcccctgtcccttacaattagacagagtcatgtgattaatttctggccaatgacctataagaaggtagatttatagcacactttggagcactgcttaaaaagagcctactcagttgggagttctttgctcttttgcttccttctgctgccaacctggaacatagacataatagctggaactctagcagccatctgcaaccataaggagatctttttgttttgttttgtttttctccccttctgcattcttatcatttatttgtggtaagaacacttaaaatctattctcttaacacttttcaagtatacgatacgatatgttattaactatagtcactacgttacagaactcttgaatttattcctgctgcctagctgaaattttgtatcctttgaccaacatctcctcaatccctacccttccctccttaaaccctgttaactgtaattcctctctctgcttcaatgagatggccttttttagatttcacatataagtgagatcatgtagtatttgtctttctgtgtctggcttatttcctttaacataatatcctccagattaacctgtgttattgcaaatgacaagatttccttcttgaggctgaatagtattatccattcatctattgatggacacttaggttgattccatatcttggctattgtgcacaatgctgcaatgaacatatcaaagaggtatgaagatttcatacctttttgaaatgctgattacattgcataagacggcctttaaaatggaagccacatgctgaggatggtggaacagaaagctcaggtgggtccctgaggatagcatagaaataccacaccaaatctggacggcctatttctggactcgtttcacatgagagagaaatgggccaggcatggtagctcatgcctgtaatcctagcactttgggaggccgaggtgggtggatcatttgaggtcaggagttcgagaccagcctggccaacttgatgaaaccccgtctctactaaaaatacaaaaattagccaggtgtggtagtacacgcttgtaatcccagctacttgggaggctgaggcaggagaatcacttgaaccccggagaaggaggttgcagcgagctgagattgcgtggctgaactccagcctgggcaaaagagggagactctgtttcaaaaaggaaaaaaaaagagagagagaaaaaaaaataaagttcttttctgtttaagccactggtttttaaatttgcggttttttttttccagctctatgtagctaaactgaaacatgatgaatataagtagcctttgcaacaatccaggtgagagaagacagtggtttggcccgggggggtggcaaaggatgtcagatactggacttttttttgaatcctataggatttgcagatggtttagatacaagaatgaatgaactattaatagaaaaactaagacttctggtttggggcccaagtgacttgagagtgtaatgatttacagagatgcagaaggctatggagggggcaggcttgggtgtgggactggggttggtgggaacggcagtctagggcacacgtggcagcatggccttgatagaagcaggaacacgatgaaacagggagggaggccaagagcacggggcacagattggtaggaaatgagtgagctctcatcctactgcttctattttctcaacaaaggctgatccaggtcatcccctgagactgaagggaagaaagcagagggtggagatgggaggtttgaagagaaagacactatggaatagtccttttagtgagtgggattgctgggcagccatgggtgtgcatctgtctgaaatctgtgctctctaatttaaagaaaagccacttaccagcgctgtgtgtttttctgcaatccagtccagttgcatggttgggtttaactgagcctgggtttcaccagacaagcactgtaggatataagatgagagaaacagggggaatgaaggggtgtttgcaagaaggagatcagaatgatggatcaggaatcaaaactggataaagaaagaagtaaacacatgagatggatgaacacagacttgacagttcttgaaaagaccgaaaaacagggtgggctccaaagaagccaaacagaaggatagaaggttgtgaagggggaaaaggagatttcggagatgcaattagtcatcagtgaggacaaggtcaaatgagtcactggagagagaaggaattgagaagctaaagatattgaatggaggtcaaggtgctgaataaagtatatttcattataagactaataataaaattcgttcacaacttcctctaattagatttgttatctgctttgaataaagataccattaattagtctaagtactttaaatttaatttttttttctgaagggatatttatgggacttcaaagaacaaagttttacccaaacaactaagtttttgttgggtgaaaatataaagcatttttttccatgtgaaacttctttgtatcttgatatctcttctttttcttctgtgagtttttttaggcggcgagtctattaacacaatcttttaaagattgacctgtttattctctctgaaatagttcatgtcatagcttgtttcttctaagctggactttgcccccttgtactttccttgcaactttttcatcgttttttaaaacaacatttattctcatatttacttattttctcaaatgtttgtttcctttcttcctgctccatctccctgttcctcagattcctttccttaggagaaaaaattggggtatttcccacagcatgctgtgagaaaagtctctgaacttcctgggggtgggacttgtgaacacagagggtcttgcacactattttatatccagcgagtgttcagattacagggccaggcctcagatacaggtccagtttgtggaaggcggtccctgaaacattatgaacactgctttgctccttctgtctcctagtccctcttcttaagctcaaacgttattaattgggagtctgttctgggctactcattgtactgattaaagtaattcacattaatgggcaatgactgatctactcaattctcttaggggaagtcacatttctaaaatgtgcatattaatccaaataaaaccctgattcatgagataaatgtaaagcaaatgattaacactctattcagggttttctgtcacagaacaaaatattttcttttctcttggggccccaaaacagccttctcatcccttagaaagtgggctaggacaatgtaaaattggacagtagagttgtgtgtgtgtacgtgtgtctctgtgtgtgtgcagcacctgtcacctcatctacacatctctctagctcatgatatatgtttcaaatcatgaaccagagacattcatatatgaacatggttaagacatattcattctttctttctttcttttcttttctttctttttttttttttttgagacggtgtctcgcactgtcgcccaggctggagtgcaatggcgcgatctcgactcactgcaacctccgcctcccgggttcacacgattctcctgcctcagcctcctgagtagctgaggttaagacatattcttaacgagtaagttctttgtctaggataatattttgtaattttccacagaatattcttcagatgcctaacttgatgaaggttttcaggagcctagtcttagaatcatagaggttcttggctcctggttccttcttaaatccaattgttcattactggaatatacaaatgagtagggagccagaaatgataggcaccagaaactgaggtttccatttctcaatgtggcctgaactaaatgaattaaatctcatcctcctatgggacgtgaaggaaaagggctctggctgggaagtactgctgtgcagtggttagtatagtgggtctgagggtcaaatagatttgagtgcaactcccaacccaactcctactactagctttgggacctcgggtgagtcacacagccctcaggtgctacagcttctataaatagtgatatagtattcttacttaaagtgtggctgatcagagcagcccttccgtggatcaaccaccccatcagaggatctatgtctaggattgagccttttctgccccaggaggttctttcaggtccagaggctttcccgtggagggaagagaggcagcaatgaaatcagcgtataggcggactgggctctttccccttcatgtctgcagggcaatgacctcctagagtccgctatgcaccccccacttgcctctctgggcactgcgaggtggagcagttgtaggaccaggaaaagcaagaacagagcgtcctcttcggctaccctacccgggagttcaggcgctgcgcctggccctctggggcgtgtttgaccataactcgcaccgcttgctcttttcccatttcagcaaagtcttgagcctgtattctagtaccttttatcagccttgggtaagcagctcgcacggggtatataaggagaatcaactttctgaactgaaaaaaatgtaaatagtaaagtcagtcgtgcttcttcctgccggtgactgtttacaagagggaagtcagcggggcccccaagaggtcgctggtggcgcaggaaccgcatccagattgtaaagaacgggggaaggaaaaaaaaagaaaacacccagaaactttcttccttgttgcgaataatcgccgcctccccccctccgcccccagcagaagcagtaacgtgacacccgagcgaaatcccgagacccgagcggagagggaggggagagggaggagagtgctgcggagcgccggagggagaaaggggaggagaaggaggaaaacccctgtcaaggaggtggagcgaggggatggtgtccgcctcctgttcctccctgccgttttttagagaagcctgaaccgggacaaaacacgccgagacctacagacacaaagccggggggtccacgctggcgctggaggcgagccccggcggccgcaagcgagcccgaggcgcggcggggcgcggggcgtggggacgctagcgggcgccggacgggcgcggcgccccgtcacgggcagcgccccgaaccggggccggacacctcggccgctcgggccgcggcggcggggaccatgccgaagaaagtctcctgagcccggcaacttcggcccctccccgcccccacccggctgccctccgcgcggccctccccatgtgcagccggccagccgggctctcctcctcgcggcggatgggtgaccttttcctggcacgggcaggctgtgggaggcagcggagcaggcgatgaagaagaagcagcagcatcccggcggcggcgcggatccctggccccatggggcccctatggggggcgcccctccgggcctgggcagctggaagcgtcgggtgcccctgctgcctttcctgcgcttctccctccgggactacggcttctgcatggccaccctgctggtcttctgcctgggctccctcctctatcagctcagcgggggaccccctcgcttcctgctcgacctgcggcagtacttgggtaaggaagctgggcaggcgctagggcggcgccgacagcgcaaagttgtgcggcggggagagggtcgcggcggggacttctcgcgctgccaccgcgcgccgccgccgccccgggtctctccaggtgctaagcccgtgagcatctgtgccgcggtcgggagcgccttcttcctcccgcgcgtccgactgtcctcaccgaggcgggggcgccgctgggttgcgctgccggcaggtaccccggggcgaggcaccgctcaccttccccccgccccacctccgccacccggatccggactggggcggagtggatgggtgtgtggggtgtgccggagtgtgtgtatcttcaggcctggcggcgcggggagtggcgaagggaagggaaggtcctcttcgttgcattgttagtgaccgcag

SEQ ID NO: 11066 - DNA, 6000 bp, Homo sapiens
gtcgggaggctgaggcaggagaattgcttgaacccgggagttggaggttgcagtgcgctgagatcgtgccactgcactccagcctgggtgacagagcaagactccatctcagaaaaaaaaaaaaaagtcaaataagacaaatgaaaatggcatcttaccacaaatataacctacttatctgggttactgaatatgaaatgatctctaaacaaactcttcttgcagtatctgttacagatgttctattttttaaaacctgaaacctgataagatttcttattccttaggatacttattttaatcttttttttttttttttcaaggcggagtctcgctgtgtcgcccaggctggagtacagtggctagatctcggctcactgcaagctctgcctcccgagttcatgccattctcctgcctcagcctcccgagtagctgggactacaggcgcctgccaccacgcccggctaattttttgtatttttagtaaagacagggtttcaccgtgttagccagcatggtctcgacctcctgacctcgtgatccgcctgcctcagcctcccaaagttctgggattacaggggtgagccaccgcgcccggccctttaatcttttatcttcaggatttttattagggtaccaaatattaaattatagtatgatttttagcatccttgagtacaaacgtctctgcagattttcaggttgttgaaactagttagctgagggagcagagagcagggtctgcatcttggccctggagcccctctagctcctgtgatggtggagaaggcatagctctcttacactttactgtttctccatttctcccaacacagcttatatatatatatatatatatatatatatatatatatatatatatatatatatattttttttttttttttttaagacgaagtttcactcttgttgcccaggctggagtgcaatggcgcgatctcggctcaccgcaacctctgcctcccgggttcaagcaattctcccgccccagcctcctgagtacctgggattacaggcatgcgccaccacgcccagctaatttttgtgttgttaatagagacggggtttcttgaactcccggctggcctcgaactcccgacctcaggtgatccgcctgcctccacctcccaaagtgcaacccagctcatatttttagaaagctaatgagtagaataatttataatcatctctataaatgtatataaattaactaaatgccttttgtttcattatactgtgttggcttagaatgccagagtttaaaaccacagcttcatcatttactgttctgtaactcagagaaaaacacttaatttctataaatttctgttttgtatataaaaatgggataataaattgtaatcatgtcattaggctgttataaggtttaaataatatacataaagcacttaacacaattagcataataaatgctggctactacaatgataatatttctatgagttgttcttcatatgagaggcatcacccatcattatgagctaattaaattcattcataaatatatggacaagaaagttacagcaaaagcagttttaaaatattttaggccaggcacagtggctcatgactgtaatcccagcactttgggaggccgaggcaggtggatcacctgagttcaggagtttgagaccagcctggccaacgtggtgaaactccgtctctattaaaaatacaaaaattagctgggcgtggtggtgggcacctgttatcccagctacttgggaggttgaggcaggagaatcgcttgaacctgggaggaggaggttgcgtgagctgagattgtgccattgcaccctagccttggtgacaagaatgaaactcttgtctcaaaaaaaaaaaaaaaaaaaaaaagtggctcatgcctgtaatcccaacattttggaaggccgaggcaggaggattgcttcagctcaggaattcaagaccaacctgggcaagctagcaagccctcgtcttcacttaaaaaaaaaaattagcagggcatgggggcatgtgcctacagtcccagctactcaggagtctgaggtaggaagatggcttcagctcaggaggtcaaggctgcagtgagccatgatctatcttgccatggcactccagcctgggtgtcaaagcaagaccctgtctcaaaaaaataaaatataatatctttgtttcttgctctccctcttgtcatcttctaggggtctttcaaaaagttcaaaaatatgtagatgactaactctggaaaatactggagtagactgtgttgtaatagaagtgcagtgactcactcactcccagaaactggaaacagatacaaatcaggtcccagatttccttttggcatcaagcctgctttaaattgcagaaaaagatggactcaaattttgattgtgggaatgatgaaaatgacaatgaaatcggctactgaaaaaggaaatatatcaaggtttggaatcaaaaggtattatctggtgaaagaataaagacattttaatatatactttgttttctgtagtattagaaatattttagaatatcttctcctatatgaaagattaccttcaaagaagagaaagcatctaatgtgcacagaaccgcagtgggttgctgtcaggcaacttgaactctttttatgatagaggatatcaagttgacatgagctgactcaaaggaacatcaaagtactcaccgtattaacattgacagatttatttgtcgtgtaagcaactgccaagttaattctgtcttttgtttctcagattaatgtgaaggctcagtaaaccaagctgagttttccaatggacaagtggaactcagccacaaagcttgtttaaagttttgttgtaactcattagagttgtggtatggtgctttttccccaaatgatggggttttttaaatgaaattccgtagcgctcatgggtgcatgtagcaaaacaatggcctaaagagaaccatttcatacaaaacagtaaaatttttgattattaaataatactgtcaaccacttagacattatttgtccaacaaacccccactgagggcttactctagcaagctgtttgctttaaggtttggccaccctcttcctggagctcacatctatctgacgagacagataaacaataaagaataatggacagttagaccatgggaaaggctttgtaagaaaacagagagcctcaactttacctattatcttttcatatagacgtactttgtaaccttatattactaattcaaattatacagatccacatgtcatgttttctgacttccagattcttttttttttttttggagacggagtctcgctccaccgcgcaggctggagtgcaatggcgcgatcttggctcactgcaaccttcgcctcctgggttcaagcgattctcctgcctcagcctccctagtagctggaattacaggtgcgtgccagtatgcctggataatttttgtatttttagtagagatggggtttcaccatgttggccaggctattctcgaactcctgacctcaagtgatccacccgcctcggcctcctaaagtgttgggattacaggcgtgagccactgcacccggcttctagattcctttttttttttttttttttaatagactcaggcgatcctcctgcctgcgtttgctgcatagctgggagtacaggcacaaatgaccacgcccatctccaaattcatttttaattccagcagtaggaaaaaaaggaaaaggccaagtttgcagatggaacccagaagtgtgtggggcttcgctgtgaaatcacttgtagcttaacaatggcgtggggaatctcagagtaagcccggagttagttgaaaggagtctttagccaaaacgtttataatttattctggggcggggccgggggagggggcggtggcggtcagcaggcctgtgggaggagggtgttcaaaggagtaaagggggctcaaagagagaaatagattcttgtttcctttttcatgtcaaaagttttatttcatgtcaaaagttttatttcaaaggaagactaaatattactcttattctgcctgaatggccaagtttccaagtttttctcaatcaacatgcaatcctgttaatctaaaatgcttgaatttcttgctactctgctttacagggttccgtaacttttttttttttttaaatctgcaaggtggaagaaaagtctaacactttcactttagagttacgatactgaccaaaaaggcactgacagcccaggtgcgctggcttccttccagctgagcgctgtccccgcgccgcctccaggggtcggcagaatgctgaacagtaagcatggcgcatcctcaaccttggccccacaatgaatcacccgagaaaattaaaaaaccaccagggcccgagccgcagcccaggctggaaagtggggtgttcaggaagaccccagtactttttaaagctgcccgggagagtcccacgtgcagccaagggtggggaattacccacttaataaaaacttcccctgtaaatgcgatgtttcatttttaatgtataacagttttctgaaatattaccgttgttttcatcgtataggtacatgtacatgtgcacacacagacacatgcatgtgtgtaaatactaattttaaaaataatggttacgaggacatttacatcgctccagttggagtcctgtccaatcctgagggcgggtctaatgaggggccgtaccttccaagatttcactccgcccctcgacgccgcgcggcgctgcgcgtgcgcaaacgcctttccctggcgagccggatctcggagcgtccccgcgcctctccgcggccgcccggggaggggagggcccgtcccgcccctccccgtctctccccgcccctccccgtccctcccgccgaagctccgtcccgcccgcgggccggctccgccctcacctcccggccgcggctgccctctgcccgggttgtccaagatggagggcgctccaccggggtcgctcgccctccggctcctgctgttcgtggcgctacccgcctccggctggctgacgacgggcgcccccgagccgccgccgctgtccggagccccacaggtagggcagggcgggcctggctggccgctttacgactccgactctccgggaggcccgggctgtccacagtgacgcttcccacatcccaccggcgggcaggggcgggggtccgggcccccgaaggaggtgtggggagaagcaccccaggaaatgggggcggcgtgggaggccgaggtaagaggaaagggacccactggggctgcgtcgctgtgagtgagcctcgagccactccacaccgactctccggcggcccaagccggcgcgcgacctgacggggctttgccgtcgaagcgcgcggttgccggtgatcaggccttcgtaatggcgccttcccggggtagagccagcgcttgggcaaggaatgtttgtgtgctcgggaagtgtggaagttgcccacttcgcgcatttccaggccacttgtgcctgctcggcctgcgatcgcgagggtccgccgttccgaggctgcggggctccgccgggctcaggtgggcagagggagagacctggccctcgcgcgacgtaatgtttttgtcggatgttggaggagaagttctcacggcggggcgcgatcggcggtgtccgcatcccctggggactcagcccggcctctgggggcggggcccagcagtccgggttggagagtcctgcaggtgcttctgatgccagctgaggtgggagaatcgaggcatcctaacattaaaacgtggctgatgctcaccattcctgccgtagagtcgtgcctacctaggccagtatcagccttttttcagtagaatggtagggaaaagtttgaatattttaaagagcaagtgttctgagaatgacaagaaactatgtcggtacacctcttcctagtcaagacttgaatatgaacactctaaatacaaag

SEQ ID NO: 11067 - DNA, 6000 bp, Homo sapiens
ctcacagtacctagactagcggtgcctagactaggagcagctggtttctctaggcccctcacccctcactctctccatccccttcttcctggccccccttcctttcccatttccattcccattttcataatcatgttttctttgcttaaaatactggattttcctgccgctggtatgcaccaggctcaaacaagcaggctaagacagccgttagttgtcctatcatcagtcttttctagaacatatcgttctagaaaaggtacaggaaacttgagggggcagcttccaaatcctgcccaccatggtgtatcagaaatattcaaaacagaaaacttgaaggatatttgcctcctaaagatccaagttggaaatagtttagaggaaggtacctcaatagcaagagaaacacaggtgatgcgacaagagaaccgaggaggacaagtgaccaaggaatctattccagattactgttatctcacaacaaggggaaatgtgaagttgggatcatagaaacaaagaagtatagctaagaataaccgagaattacagctaggaaagctatcaggaaaatggggctggaggtggcacgtgaaagggatatgaaaacatgctgagacttctaaaattaggaataaaacaaaaccaataataccaataaatgtgacacatactggtatgagtcataggttaacggcggccaccctgagaagaaaactagaatgtataacttttaaaccaacagaaaaaaaccctcagtatactaaatggaacacaggtatggaggggaaatgccagcattaaaaaacacaataaatacatgtggaccaggcacagtggctcatgcctgtaatccctgcactttgggaggctgaggtgggaggatcgcttgagctcaggagttcaagaccagcctgggcaatataggcagaccccatctctacagacaaatatagaaaattagcccagtgggtggcgcatgcttgtagtcctggctactcggaggctgaggcagtaagatggcctgagcccaggagttagaggctgcagtgagctatgaccacgccattgcactccagcctgggcaacagagggagatcccatatcttaaaacaaacaaacaaaaaagatggcatagctaaatcctaaacagtaataattacaataaagctgaattgctaaactcatcacataaatcagtgaaactcccaggttggattttaaaatatcaaataatatacactattttcaaaaggcaatgttaaatgtaaagcttaaaaatggaaggtatctaccaagaaaggctactttatttgttcgttcgtttcttttagcgactacaatatgctttattgttcttggaaagggctcagggtttggctttaaatcaggctgcacgcttttcatcagtcccacatctctctccccatgccaagctggctccagctagcaatgccacattaaattccagggagacctttagaaacttccagaagcctcccttcctcctgaccccccacccctgcagtccaagatctcccatgttggcccacgacccctgcttagggtccagcctggaactcactgatccgacccactccggaccagcctggtagcaggagtagaggctggaggcaaacacccaactctgcgccagcacctgtgccactggagacctggagcccagggtgtgatatgcttggaggaagcagagggtccctgtgtgagtcaccccggccctcaaggctgtcacagctccagtggccccaccccgcccacttgcaactccaggccatgggtccagaaatgtctggattcttgttccctttcagaccccaacctttctcttctccttctctttcctcctggcccccttatcttttcccatttccattcccactttcagactcgttccttatttgtttaaagcacagattttcggctgggtactgtggctcatgcctgtaatcccagcactttgggagtctgaggcgggcagatcacgaagtcaggagttcaagaccagcctggccaacataatgaaaccccgtccctactaaaaatacaaaaaaattagccgggtgtgttggctggcacctgtaatcctagctactggggaggctgaggcaggaggatctcttgaacctgggaggcggaggttgcagcgagccgacattgcacaactgcacaccagcccctgcgacagtgagagactctgtctaaaaaaaaaaaaaaaaggcaagattcgtttggccctggtgcactctaggctcagtcaaaccagctgaagtctatcattatgctgtccatcattatgctatgtttttctagaagattctatcctgttgaagcacccccagactggttgaaaaccaagttactcttccttggaaaatctttgtggacacccaggtgggcatacaaatttccaagtcttggccagtttcagtggctcacacctgtaatcccagcactatgggaggctgaggcaggtggatcacctgaggccaggagtttataagaccagcctagccaacatggtgagacctgtctctactaaaattgcaaaaattagttgggcacagtggcaggccctgtaatcctagctacttgggaggctgagttaaaagaatcgcttcaaccctggaggaggcggttgcactgaactgagatcatcccacttcactccagcctgggcaacagagtaagactcagtctcaagaaaaaaaaaaaaaaagacaaaaaaagtattaccaacttgtgccagccatgaggtctacaacctcgatgctgccaccctcaggaccctgggggttacaacctccactccagctcccctctgaacctgtgcttttcctctgagccccattcactcccacaactgtctcattcattcactggttcactcagcctccaaccacccttaaatcatgtcaggctcaccagctgacggagagaaaaatcatcctttgtaggtctgaaaaacgtgtctgaatcctgatggtgggtcttgttttcatttccaccccctcacagcacactcagggccatgaagaggccatggcctgggctcagagctccagctctcctcagggtgggcctggcatttgctgacttcagggagggtggcagggctcacaactgaaataggagacctgccctgggtccttagcatgtgcaaggatagggttctttgtagaatctgctcatttcatctgtgttcatagcatctgtcattttccacatgcggacatccacacccagaaagctgaagaagcttgcacaggaatattcagccacaatatgagctgacttccatatctgaatgcatgatctctagatcccggccattacaataacctttgggccacttctatgcccatcctgggcaggcctgagtctagtggccggatgcctgcagcaggggtgaggcaggagggcccaggtgtgcacacaggcccctcctcctgtcacctggctgtcctgcttggggctctcctgccagcctccttctgccttcctcctgttcccgcagtcactggcccaggtcacccggcctcaggggtggtgctgccagggacttcccagtggcctcctcctaggactaacctgagctcctgcccccagccctgtacatgggaggcttttctcacacacagatccctgggcccaccaagctattcccctcccaaatctgagaactgcccacccccgtgtgactgttgtcctgccgaccacccttcatgtagcccctcctggacagaggctctagtgcatcaggccagaaccttttggctcctgtgtccctgctcagtcacagagatggctgccatcccatgtccctgtcctgaagcatagtcaggccctgggcttggtccaggcctcctcccctttcccacagcctcaggaccctggtgattgatggtcaccaggtgaaggtctccccacatgaagactgtgtggagtgggaggtctgtgcctatttttctcattcattggggaatgggctgagtggctgggggcaaagtgggactcaggggctctgcccagtccttactgcaggctaagccctcccttgcggccaagagccactgggccctccacctccctctggcttctacccgcagatctagatggtttcatggtgactcagaggaggatgcactcgggcgtcccttttgaggatggctgcagggaccatccagggactgagccgaggtgcagatacagccacggatttgggtgttgttagacacagaagggtgtgtagcaaagtgagccccacgcatgcgtagactcttccctcggcttctgctctccatggaaacacaactgatcacatcatgattgatcacggtagccctctagggctttctttcttttctttttttttttttccagaagtcataaagggatatagaatatactcaaagaccacctcatgcttttagtggagaggcaaaaaaggttcgctccggaatggggaagcggctgcgccctggacggagaggggcggggacttcgcgactgcaggcggagggagggcgggtgtcgctggcgcaggcggtgacagggagacaccgccgccactgagtattcctatgcaagtttcttcatcttcctgtgcatcagtgtttacactggggtaatgataaatgctgtgttgaaaaattatttgatggggccatggaaggaacggaaggaacggcgtcctggcccgctcggggcccgcgcacgccgccaccaagccgcgggggcgggtcggaggggagagttgcgtcagccaggccgctgtcagatgacgagcccggggcgtgacggggtggagcatccccaaaaaagtgcatgcctaggatcccgcccagtgtatccctgcgcgcggcgggccgggctgggcagctttataaacagccgtggtgtgagcctcgaagggaaccatcagcgcctcctgtccacggagctccaggtctacaatggcagcggccgccagccccgcgttccttctgtgcctcccgcttctgcacctgctgtctggctggtcccgggcaggatgggtcggtgagttcggggatgtagcctaagcagggcgggggccaaacctgggaggttgtggactgcagcgggtttcagaggaggggaggcttctggaaggaccggcgcgatctccctgaacgaacatcgcggtctccccgaacgtcgcggtccctccgaacgtcgcggtctccccgaacatcgcggtgcccccgaacatcgctgtctccccgaacatcgcgatctccccgaacatcgtgatctccccagacatgcccagctgaaggcactcagttcccctcggtggctcctttccgccgggtccgcttcctgcggctgctgcttgcccctcaggccaggaggtttctggaaggaccggtgctgtctccccgaacatcgtggtctccccgaacatcgcggcctctccgaacatcgccctctctccgagcaacgcgatctccccgaacatcgcggtctccccgaaaatcgcgatctccccgaacattgccatctcaccgaacatcgcgatctcgccgaacatgcccggctgaaggcactcagttcccctccgcggctcctttccgccgggtctgattcctgcggctgctgcttgccccgcaggccaggaggcttctggtagcaccggcgcgatgcccccgaacatcgcgttctaccccaacatcgcgatccctccgaacatcgtgatcccccccgaacatcgccgtccccccgagtaacgcggtctccccgaacatcgcggtccccccgaacatcgcggtacccccgaacatcgccgtctccccgtacattgcgatcccccgaaacattgcgatctccccgaacatcgcgatctcgccgaacatgcccggctgaaggcactcagttcccctccgcggctcctttcctccgggtccgcttcctgcggctgctgcttgccccataggccaggaggcttctgggtggaccagcgcg

SEQ ID NO: 11068 - DNA, 6000 bp, Homo sapiens
acaaaaaaattagctgggtgtggtggcggacacctgtaatcccagctacttagggaggctgaggcaggagaatcgcttgaacccaggaggcagaggttgcagtgagccgagatcacaccagtgtactccagcctgggtgacaaaagtgaaactctgtctcaaaaaaaaaaaaaaatggtagaatgtcacatggaaagttaacttttagagatagtaatccagacacctataatattacattgtccttttaagtatctatatcaataaattaaccaacatttgttgacttaacatggccagggacagtgctgggttctcataattcccaagtaattctagccagaccttgtcctcaaggagcttatgagcagcatgaggagataaaaaacagataaataactctaattcaggaagaatttgataaatgcatgataactactactagaattcagaggagaggaaattttctttgaatagagactaaaggaaggaataatgaatgtggtagcatttgggctggacctattacaagaggcatgctttcccctgacaagccaagaaagtggggatttaaggtagaagaaaagaaaagccttgagttcttggagtattaaaattttgcttggctgaagcataggttacagtcggaggagatggactaggaaggatcgttatgggcagagaggaagccctgaactcatgggggaagctatgatttgggttaaagacagagctgggtcatgtcaagatggatcctgaagcagtaaaaaaaaatccaagaaagtaaacaggttgcagggtttaggatgaagtccgggaggaaagggcagagtggtccttaggaggccgttaggacaggtaaggtaatgggtctcaaagggagtggccgaaatgcaatggaaaaagagagattgtaaagctagaaggcttaggaattgcctcttgattaggtgtggaaggcaagggaaaatcagccctcgaagaagacagtgagattttaatctgggtggctggagagacagtgatgctgggcacagacacggggaagttgagaggaacaccatgtttgagaatggtgactcatatttgaacaagcctgcaatgcccagcagaccgctggaaaagtggggctggagacacattcaacggaggagccagatcaatctttacccttcttcacctgagagagccagtaagtcacggctggaacgtgtgtgtccagcaggagagggtagggagggaagccaagagagctgggagcccgagtgaagtttttgccaaaggcagaagaggaaagtcggcgtagcacagtatactttcccacccatgctcaccaagcccagggacaaggctcaccaagatgagtttggaagagaatgctggagagaaagtggttaagaaaactgcctttactgaacttcttgggctaactttgattgtaagtctctgaacaatcaaagcctgtgaggagacagctaaccttcttattcttcctatgtcaatagtgaacaattgcagatcccctttcctttccttctcctttcccctgttcctctctcctccctccctgaatactcttgcttttttctgggactggtctagagcatgggtggccattgttgacctacaggaggcaccactgtcaccaacaaagggtaacagtctttcttttcaatatttatttatatccagtatttattttcaatactgactatggagagagctctcctgtgctcaaacactgcaatactgggggtctttcaaagcacaaaaacatatatttgcatgatggcatcattaacatttttatggctttctatttcttttttgtactggtctcaagagccactcataaatctctcagtaactgcatagtgtcccagggccagagaccggccactcctggcattgtgattagagtcatttaatatccaaggtggtgactaatgtctggcaacaaagcctccattgggtgtcatgtgtcctgggaccctgagcgtgggcactctaggagcacctcagtattgcgtgttagtactatggccgagagaatagttgagaaagtggtcaagaggtggatccatgtgaacgccactgggaaatgagagacctcgttcccaatcacggtcagtgcaactcgaaagcctaaaatcagtttaaaacaaaggtatctacctttatcttatgttcatatcctaggcttttaataatacgtatttttcacatgtttacagaaagcagtcaactgagctattcatggaaaggtttgtgggtttggttaacgaagtggaggagtattacatttcagctggaaacacatccctagaatgccaaaacatttattccaaagtctggtttcctggtgcaatcggaggcatggcaatgcctctgttcagagactgggggctagggccagtaaggcatttgatccacatgtatcccagaaggcttttattgttaaattatattctttcggaaaaaccacccatgtcctattttgtaaacttgatatccatacacttttgactggcattctattttagccgtaagactatgattcacagcaagcctgtttttcctcttgcttggggtggcagcagaaagcatagggtactttccagcctccaagggtaggggcaaaggggctggggtttctcctccccagtacagctttctctggctgtgccacactgctccctgtgagcagacagcaagtctcccctcactccccactgccattcatccagcgctgtgcagtagcccagctgcgtgtctgccgggaggggctgccaagtgccctgcctactggctgcttcccgaatccctgccattccacgcacaaacacatccacacactctctctgcctagttcacacactgagccactcgcacatgcgagcacattccttccttccttctcactctctcggcccttgacttctacaagcccatggaacatttctggaaagacgttcttgatccagcagggtaggcttgttttgatttctctctctgtagctttagcattttgagaaagcaacttacctttctggctagtgtctgtatcctagcagggagatgaggattgctgttctccatgggggtatgtgtgtgtctcctttttctttcaggacttgtaggattctttgtgccatttgcatataatttggcaggttcacattttttaagagccctatgaagtgctttttgcatgtgttttaaaaaggcatttgaaaattgaaagtgtgatttatggaaattaaatcatctgtaaaaaattgctttggaaagtaatgattgctggccataaagggaaatatctgcgatgcacctaatgtgtttttaaccctttatttgctgacaatctatagtcattaatgctaaactcgattttggcttcagctacatttgcatattgtccaacaatggtctatttttgtaagaattagataaaatgtatacttgatataaaatagtcaaaaatgtaactcttagtaacagtaagcttggcatttagatagaccatgaacacttcgtcagatactctgttgggtgtttgggatagcaattaaaacaaagtattgatagttgtatcagagtctattaggctgcagcaaaggaagtttattcaaaagtataaactatccaagattatagacgcatgatatacttcacctattttttgtctccttaatatgtatatatatatatatatatatatatatacacatatatgtgtgtgtgtatgtgcgtgtgcatgtttaacttttaattcagttaaaaacttttttctatttgtttttcatctggatatttgattctgcatatcctagcccaagtgaaccgagaagatcgagttgtaggactaaaggatagacatgcagaaatgcattttaaaaatctgttagctggaccagaccgacaatgtaacataattgccaaagctttggttcgtgacctgaggttatgtttggtatgaaaaggtcacattttatattcagttttctgaagttttggttgcataaccaacctgtggaaggcatgaacacccatgtgcgccctaaccaaaggtttttctgaatcatccttcacatgagaattcctaatgggaccaagtacagtactgtggtccaacataaacacacaagtcaggctgagagaatctcagaaggttgtggaagggtctatctactttgggagcattttgcagaggaagaaactgaggtcctggcaggttgcattctcctgatggcaaaatgcagctcttcctatatgtataccctgaatctccgcccccttcccctcagatgccccctgtcagttcccccagctgctaaatatagctgtctgtggctggctgcgtatgcaaccgcacaccccattctatctgccctatctcggttacagtgtagtcctccccagggtcatcctatgtacacactacgtatttctagccaacgaggagggggaatcaaacagaaagagagacaaacagagatatatcggagtctggcacggggcacataaggcagcacattagagaaagccggcccctggatccgtctttcgcgtttattttaagcccagtcttccctgggccacctttagcagatcctcgtgcgcccccgccccctggccgtgaaactcagcctctatccagcagcgacgacaagtaaagtaaagttcagggaagctgctctttgggatcgctccaaatcgagttgtgcctggagtgatgtttaagccaatgtcagggcaaggcaacagtccctggccgtcctccagcacctttgtaatgcatatgagctcgggagaccagtacttaaagttggaggcccgggagcccaggagctggcggagggcgttcgtcctgggactgcacttgctcccgtcgggtcgcccggcttcaccggacccgcaggctcccggggcagggccggggccagagctcgcgtgtcggcgggacatgcgctgcgtcgcctctaacctcgggctgtgctctttttccaggtggcccgccggtttctgagccttctgccctgcggggacacggtctgcaccctgcccgcggccacggaccatgaccatgaccctccacaccaaagcatctgggatggccctactgcatcagatccaagggaacgagctggagcccctgaaccgtccgcagctcaagatccccctggagcggcccctgggcgaggtgtacctggacagcagcaagcccgccgtgtacaactaccccgagggcgccgcctacgagttcaacgccgcggccgccgccaacgcgcaggtctacggtcagaccggcctcccctacggccccgggtctgaggctgcggcgttcggctccaacggcctggggggtttccccccactcaacagcgtgtctccgagcccgctgatgctactgcacccgccgccgcagctgtcgcctttcctgcagccccacggccagcaggtgccctactacctggagaacgagcccagcggctacacggtgcgcgaggccggcccgccggcattctacaggtacccgcgcccgcgccgcccgtcggggtggccgccgcgcccggcaggagggagggagggagggagggagaagggagagcctagggagctgcgggagccgcgggacgcgcgacccgagggtgcgcgcagggagcccggggcgcgcggcccagcccgggggttctgcgtgcagcccgcgctgcgttcagagtcaagttctctcgccgggcagctgaaaaaaacgtactctccacccacttaccgtccgtgcgagaggcagacccgaaagcccgggcttcctaacaaaacacacgttggaaaaccagacaaagcagcagttatttgtgggggaaaacacctccaggcaaataaacacggggcgctttgagtcacttgggaaggtctcgctcttggcatttaaagttgggggtgtttggagttagcagagctcagcagagttttatttatccttttaatgtttttgtttaa

SEQ ID NO: 11069 - DNA, 6000 bp, Homo sapiens
gaaatgaatagggcccttcacttagctggggggttgccttggaaacgctagtgccagctctaggctcagaccaattccaggatttccaaaagcacataaaaggacatagttttgtgctccctcctcccccatgaatcagggctatcaggtacagctgtgtgggtcctgctctgcgtgaggggtaagtgtgagccaaaatccagcttctgtttcactcaccagcagtgcacagtagctgggggctgcagccaaaatggctggccagtggcatctctgtcaccagctctgcaccttaagtctctgctagagaagcaggaactatctggtaaggtgggaattctggcttaattagaggcaacaagtggcaggctgaggctccagcttctgccatctggcatcctcagcaatgggctttgtggactgcagcactcttaggagctgatgcccagctggcccctaaaataatctgctgtcatttcatatgctaaagggacacttcggaccttgtgaaagagagaattacaatgaagccatgtgaggaggttttagaaaatgagaaatatgtgcctctcacgccgagcctctttaaacagcggactatggatagattatcgtagatggaaatcttttacaaatacactttcctgccttcttaagcagactatcactgggcttaactaaacagcttcttggctctttctggatctgcaacaaggctgtggtccttcagagcccatcgaggtgggcgacctctagaccaccaggccctgtcaggttttcccagtgattcctgagagcctcttggcagcagcagctttctgtgagatggaaacgtgcttacgtgaggacttcgtgatatgattttggctgctcagaagtcatatttgcttcctagttctcaagtgtgtccttaaagaagagatagggcaactcggtagaaagcaagcatttaaaaaacccattattatctgtcttgagtcctcactggggaaccacgagctccctggtacagagcctctgtgagctgtgcagtcaccaactccaggctgcgcttatgtttaagccaccctgagagaggccacctgaggtctagcaagtctttgctctctcctcattggcagtgaagtcttgtccgtcacaggcctgaactaagtgtaatactcagagctttaagaatagagcaaacaaggttctcactcttaaaaagtgcctgaggattttataaagactgcaactgaagagaagaaaaggcattcttacctgagccctcgatggcagtatttccttcggaactgaaatacattctgaaccactttttccaccagcttgaatggctgctctatcttgggctgtatcaagggagtgaagtgcaccacgcccacgtccaccttcgttgtaagcaaacatattatcattctgtggcatgatatgtggcatagtgtgatcaatcaactcatccttgtaaaacaggaggatgggctgtcaacagcctgttttcataaacagacctttccacgtacttcggtttcatctctaggcatggaagatggtacattctggattcgcaaatgacatggagaaatcagccggctgcacctgttctctaatgacatccaccagacctgtgcttgatggtcacttaattttaaaacacagtttcacaatggcttaaaaatcaatccaaatcattaaagtcagtcagcagataatagatggcattagaatattttagtttttgaatgaggaaaaaaataagccgcagcagcagcttcaagacacagagagatggcagacaggcccccagggaccactcagtgctaaacttcccagatagagacaccacttattttcggtagacactgattaatcagctggactgaattcatgagtgtagtctgaaaagccacagaactttctagtagcaattttaaatgccccgaaaggcataggcaggactgaaattgaaaatggaaaccatcaaaaaatgtcactgtttgatagtgtttaagctactgccagctgtggagattctttaattgtcagaagataaaacttttcaggcatatcttataagagatttataccctgatttgttccaaaaatggactcatggtgattcacaaggacaaattcaaataccaaaggaaaaacatttaaagacagagggaaatggattcaaaacagtaactacacacacaaaaatgctaacggagaccatggtctaggaaatgggaagtctcgtcataattgacaaaagcctcagtctccaggaattgttaaacttgttaatgaggatctcatacagactcaacaaaaggcgaagaaagtacggcaatttaggaggtgtgggctgcaccactgcttttcaaaaggaactccattgttgaaatcccatagaggttgtcattttctcctaagaggacttgcttctaaagatccttgtggctacataattccttaaacagatgaaaatgggagactggcttttctggttgtgtttcttttagggtagaaggaaaacaactgaatatgatgtgagactttatggacaagaaagtgaaaataagctgtgctcagcctcacacagcctgacgcgcttgtgggaggtgcctgtggtgcctgagctgtgtcatcaaggccccggacccctgagagcttgcacctccctatttaaacaatcaatgagcctgtccccgaaggtttcaggtcagctacagctgctcctactggatggaatgggaaatagaaggctttggtggtaaggggcggtgtgggctggcgcatgctgagaatgtgccaagcggcctttccacaccccaaatgcccacccccaacatccatcagccttcttgtgaagtccagcaggctgttcttgtgaagattctatggtggaacagtagttatgaacagtgacttaactaagatgtcaaatgctcttaataaattttagtaagttttttgaattgtgtgctatatgttgtttcatgtttcctcaagtttagtaacaactacctcttcctacaggacttcccttagactttaacaaaacgcaccatagaacagtgcccagcttggagaggtctgtggtcatcagggaaagagggactgaagaagacaaggggctgtggagtggatgcagggtgtaggtggggtagatgtactgctatagggagagaagaaaggtggtttcagctcagggcagttctggggaaggaaaaagaagacctgatctatgaatggcagagtgcaggcagcagcccaagacacactccactgacttcagatgtcaggttccttcccacaaactctgaactatcctgcctacctcgcctcctcctgatttgtatagagaagtggtcccaactgtcaggcatgtgtctggccactctctacacctcgccagccttctctcactggactctccatttccctttcatcccctgagcttcctggcacccttgtccctgcctcccgttctccaggactcatctcctgtaacccttcaactccagttctcccagtgacaaagagccaattctatcaattcttactagcagcctgctagtctccagaagaaatactcttagcaaaatctgagataaaatctaatccctgcctaggcctaaaaccatgaaatattatcaaaactctacataaggcttacaaactattaagaccaaaagcacaaatacagagatagatgcactctcttccagtacagaaactgccactttcagcttccttagattttaaattttggcctcatctttatttgcctgatttcattcctttgagatatagttggtatttgcaaatacaggaagtgtctaacttttgcttgatttaaataaagttttaaaaccctgaacaaatatagtagtaccccatgtaaactatagcgtcgacttctaaagtttgaatacaattccaatactctgttaagttggcttatattatgtcacggctaaaagagaattcccctcacaaatgcagttactatttagtgggagattctgtaaaactcagcgtcaacaaagctcttccagttatgtctcctgcttctgggacggccaggacctctcctgtaccaccccttcctctccctttcccccaaaggcacctttcagaattactctgaatgatggagcccatttttttctagaactataggaaagctgcttggtaactatggtaacgaatacaaaaatgttttttacttataattgaatgcttatttaaaattacaagtattattttttcttccttgagttttaagtctattaatgggtttgattacaaaaaagaaatcagtacaaaggcatcagaagtacttaaaatattctagtttaatgccgccagccttttccaaactcagtccatcagtataccaaaatgacctactaaaatttcaaatgaaaggatttaaaatgaatttaaatatttgcctttctaaccctatacgtcaacgctgtaacaagctaagactgtttctcagtgttagcagccttggccataacaggcccgaggcagatgtcctagtttccaggccagggtgtctaggacgtgactggttatcagctcagagcagcacttggaactcacaagggacccgggctaaggagatattaaatcttaaatcttagatattagatattacaactgagaactgtaatcaacatgatatacagaggacactgaagagacgtacaactcagttcctgatgattatcatatgcccaaaagctaagtcacgaccacatgcacagacacagaaacaatgctggccactgtctacaaaagggtcttcattcaacactctcacggtgttcaagaccattagaggacaagatagtggagatgaaaaaatgatgaggaagttactatgtaaatagccaagacacagccataacttaagacaacagaagggctagtgaaaaaaaaaaaaaagaccacagggaataatcagtaagactttaaagaacaacatataagaaggattcaaagttcgaagtgggatgatcacgggcagacctgggtggttgggaacaggaagcatatggcatcttgcaggctataggcaccacaaaatggaacgcaggaggacaggggcttgggagagccacttcactgtcgggtaaaacaacggagcaagatgagtgcctccggatgcttggtttccccaccctccagtgtctgcttgctcttcaagtacctccaccaagctaatgacagtccactttaggacatcacgggcctcgaggttacaactttcccaggtaaggagaatcccaggtagaggcagcaagtcactgatgcctgtgatatgataattatgcatgtcatagaaaaagaaaatactgacaaatgtgaatgtagatcacattttctggaattggttcactctacctgtgatccatgtccaaaagccaatttaaggaaagaatttccactgtaaaaccttaaagctgacagcattctaagtatttcaaaccaactggttcaataaagatcaactacacggtcagtacctatcctaaagtttacaatttgtgttattgtaacaatatttatttctgcagaagttctgtcctcacccttttttcttcctacagatctttgtttttttctctttcttcttgggatcataaaaaaagaacagattttaaacagtcacatagtgtttcctctcagagcagatgtggtaggaagaactgaggccaagagaatgacagcaaactcagatcacaagagaaataagactaagaaatgtggtgagggggatgaagagtttttttactgtgtaaattatgtaaatgtacatatgtatgtatgtaaattacacctattagtaataacaacaacaagatgagtcagtgtctcttggtcccaagagattaaacaatttcagggagatgcacgtgtaatcctcaagaaagcacaaatggaacaagaactgacaattgttgtataaaggttttctgttacatttaatctggagtt

SEQ ID NO: 11070 - DNA, 6000 bp, Homo sapiens
atcacctaacttctctgatcttcagtttcctcctctgtgaaataaagataataatccctgcctcatcaggttgtcctccggatttaatgatctaaatgtataaagaaccaggagattgactaatacaaaaatactctggagaaaagatcattatttttataatatcgttctcttgtattattgaatttctcatgtgcctccatcttgtttcccaaccttaactgtagtttctctgccgcatttaccttcatcatactgacctgcacgtgacaagcactaaacattatcaattttctaaagctttaaagtgctaaaagaaaaacttcagctgaattcaatttaaaatagtttaactgagcaaagaatgattcatgaattgggcagcctcctgagccagggtagcctcaaagactgcagtgcagtcgcgtggtggaagagaatttatggacagaaaaaagaaagtgacgtacagaaagcggaaatgaggtacggaaacagccagatggttacagctcagcatttgtcttatttgaacatggtttgaacagctggccacaattgagtggccaaaactcagtaattgacacccgagtagatcacactctgtttacacttccatttaggctacagttcagtgtacagagaaacctttaggccaaacttaaaatatgtaaagaggcagtattaggctaaaccccatttagcaaaagtagatcatgcactctttcaattcaattcaagactcatttttggattatttgttattggcgaggcattctcaaggaatttttagcaggtcttttgacttttcagtgtccttgtttgagaaatacaagttttggtctctaattctagatacgctgacgtccctctagcattaaagtttggaatctatacattcctggagggcaaggacggtgatttttctttcagacccctcaacacttacaccgatggtgggtacagagtgtggcatacagaattgatgctggtgcacacagaatgaattcctgttcctttttccctctctccctggccctcgctccactccagccagactggtttttctttgtacccctagaattttccaggttgttctgccttgaggacttggtacttgccccttcccatcattcgattctctgcccgaccccagtctctccatcccataaccctgctttgttttttcgttcttgtaattactctctgaaattgtcttactagtcatttatttatttgtttattctctccacctctcccccagtccccaaatataagcttctatcttggatctttttgtatcactgctgctaaaacagtacttagcacaatctaggccctgaaatagataactgtaaaataaatgaataaactctaccatcccttatacagtaggttttacagtcatccctcagtatcctcaggagattggttccaggatcacctgcgtatacctgaatctgcacatattcaggtccttaaacaggctccacagaacctgcatataggaagagtgggcctttgccctctgaatactcgcatttcccatcccacggatgctgtattttccatctgcatttggttgaaaaaaatccgtgtctaagggcatccacgctgttcaaacccatattgttcaagatcaactgtagctggtgaggtgaactctgcagctatcacacaccaggttctagtgaacgctcttaggggagggtaacccatacaagtgaattaaccgcagaggtcttagtacacatggagtgggaagaaaaaagttatcccctggaagacaactacagacaattgtatcagctatttagaaatcatatcagcatatcttatttgctgtggaaactttaggtaacattttaaaacgaattcatttctttttattatggaaaatgtcaaacataaacatgagtagatgtggtaggtaagaaaagcataatggactctcatgtacactgtggtggatgcactccggggtgtccctcaccctagggttcatgccctgtgtactcctctccctttgagtgtgtgcaaaacatgctttctggccaacagaatgttcacatttgaagttgcccccgtgggattgctttatgttatataaaattctgtcttgctggagactcactctggggactctccttgcaggcctgacaaaataagtggctgtgctcggaaagcccaagtgacaatgaagtccaggtaacctctaggaattgcaggttccctcttggagctgaggacagtctccagtctccagccagcaagaagccagggccctcggtcctactgctgcaaggaaaggaattttgcctgtgcccggagtcagagtggaagccagttcttctccagtgaatgtgaacgcagcctggccagccccttgatggcaggcgtgagaccctaagtgggggactgagtgtacctggacacctgatccataaaaactgtgagaaaaatctgtcttgttttaaggccactacgtttgtggcaatttgcagcaataaataattaagtacaagtacatgtcacccaaggtcaactattttcaacagtttccaattgtttcatttatacctccatgtctggagctgggtgggtgggaggaggggagtggatgggctggtgtgttttaaagcacatttcagactttatattatttcgctggcagatactttagtacatatctctaacagacaaggaaggactttttaaaagcataaccataatgccagaaaaattcggtttcattgagaataagagtgggagtcttttttaatgccatcaaatcaatggatctattatattaattggacacccacagaaaaggtgcttgcaataaacagaataagaataataccccgttgatctcattagctaaaggacaggaaagcatatgagagctttcacttgaaatgtatgaagctttccagttggttttttaaaactagtccagccacaaatacttaattgtccctgtaatatgcttgtctctcatacaatatctaaaataattaaaacccaattattatcgtgtgcttaagatccattctccctagactctaaccggctttggaatggacccctgtaaatttcacttgtattcaaaactccttgtaattgcatgtcatactctaattgctattcccatcactttttccttaccacagctcctcccaactggccctcttggataagccaatctcatcccccttcgacactcctcactgaggcacgctttgtaagggacatacttagggctctgggttcgatgccatctctactacttgggagctttgtgatgtttggccagtagttaagctttctctaagctggatacaataatgcctcaccgggttccggcgaagattagacaaagaacatgtgtaacgtgcaaactgcccagtacagagaaggcaccgttccccacaaccccctttgttggttcccatctcccaccacctagccccagaacgcccagcaccacgcctctcctgcccttgtcgcgggggatgcagggacttgtagtttctaaggccccgagtcgtgcttctcctcggcgcaggcctgcgggcggaagaactacacatcccagtgggctgtgaaaggaaagtggggctcgggaaattgagcatccctgcccagctgccttcgttttctgcggccccggggctatgcccacctctgcgggggctcggacccgcggcaacgcctgggagggcgcgagcgagcagaagccccaggctccggccgtcccagggccgcgcccgcagctcctcctgggctgtcgggtgggaaggggggaggcgcaggcgggagaggagaagcacgcgacccctccgctgccgagggggctccacgggggaatggagggagaaataaagcgagcagctgtaaacgtccgtggggagaagtggagaccgaaagagctgggcggcagcaacccaaaacctggcctccaagggcttatactccgggagggaggccggggccggaggggaccctgaccgcttcctctgcccttctttctcggcccggaagccggccgagccgggccccgagaccctcgcccgcagcccggtcccgaagtcaggccggcctagggccgccccaccccatcctggcacccggcacccccagcccatttctcgggcatcaccagagtccccgggcgacgcgaccacgcgcccagctggggaggaggaagaagggaggcgcaggccggggagggtcacctccgcgccgcggctcctcaggtcccggggagtcgccaggagtggcttgccggtggccgtgggaatgagcgtgtcccgaggcggcagctgctgcgcgggataaacccggaagaagccgcgagacggactgaagtcggccaggagcgcactgcgcggcggggccgcgggcgcccgaccccatccctacttgggcgatgccacagggagccccgcgccttccacaccccagggcgcccgcccgagggggctggggctggaatctcgctgcgccggtgccctggcttcgcgggcgaggaggaggaggagcaggaggaggagccgcgggtgaggcgcgaggccaccgcccacccggcccggaggaggcggacccactcggagcgccgcgcgcgcgccgggctgagccttgcaaacaagtgtctgtgctgtgtccccgcggccctcctcgcgccggggccgcttcctccgggtaggagggagcaagggagccctcgccgcgcggcccgcgagccgccgccgccctcggcccgcgcatccccgcgcgggggccgcggattcgactaggctgccaggcgcagcgacaccgggtcgcggtgcgagcggcgccccggctctcgccgagaggctcctgacagaaaaacgtgcgtggttgtccccacccctgggaggggttgccggtgccgcgcgcggccgcccagtcgccagcgctctctcctgggaggatccgctgccggaggaaggagtggacccaacctggccgcgccgcagaagtggctcccgaggaagccggcgccggggccgccgcctcgtgtcccctcggggcgcagtgctcgggggtcggcgggccagagccgaggcgcggccggggagccgggggctgcggggccgagcgggcagccgcgcgagggggcgggcgctcggcgacccgggggccggccgggctgagccccgcgccccgggacgcgggctggaagcgacggaggagtgctgccgcgggctgcggaccagcgccgtcccctcacggagcggggattctgctatgacagttgggctccccggagggttaacctgggtgtcctcggcaaagttgtcgccgagccgggagcccgtgtaggggccgcggcgccgcggctcggggggcggccgggcggccggcggcggtcgtggctcggcggggcccgcgcggccggggggctcctgggggtgtgcgcccccagccggctgccctcgtggatgcctcccggcggcggcgggcccatgaaagactgcgagtacagccagatcagcacccacagctcctcccccatggagtcgccccacaagaagaagaaaatcgcggcccggaggaaatgggaggtgttcccgggaagaaacaagttcttctgtaacgggaggatcatgatggcccggcagacgggcgtcttctacctgacgctcgtcctcatcctggtcactagcggactcttcttcgccttcgagtaagtggtggcgaccgctcccccgacgccgcactcccctggtctcccctgtcccccgcccctcctcgggctgctttcgttttctagaagtcttatctactgtaaattgttatataatgccagtctgcgctccctcttttttcttttaaaggtctgattgcttttgggcccccggaaagaacgccgttctgggctgggcttctgggagcagggagggaaggggtccacttgcaaggggggccaggccttgccaatccaggtggcggatgggacccagcaggtggggc

SEQ ID NO: 11071 - DNA, 6000 bp, Homo sapiens; identical to SEQ ID NO: 3763

SEQ ID NO: 11072 - DNA, 6000 bp, Homo sapiens
ttttctttattcccatgtgacttttgcttaagcaaaaggccttgtacagcaaatacagcttctgtattttaccatggccttgcacttgctgttctttgtgcctacaatgtcctttccctaaatttcccccattcttccagattcactcaaaagcaatctctttcatgatgagatctctttcccaattctcattttgaaaaatgtcaaacctatagaaaagttgaaagaatagtacaagagcactgatatattcttcactacatttgtgactgttaatatttttaacctctgcttgctattcatacatatattctttttttcccctgaaatcatttgaaagttgccaacatcatgacacttcactttcagcatgtatcacataagaacaagcacatcgtcctatgtaatcacagtagctttatcttatgaaatttaacattgattcaatattatttactgtacattttttcttggcagtttatgatcttagaaatcaagaagcctaaaatgaatcactgtgtgttttgagggtcttttggtagaatcatgttcctttctgggtgttctaaaaagttcctggatctttggggtgagattctgtttgagtttcagaacaatgtgtgcatgccatcagtttgatagctcatggtttgtgttccaaaggggcagctattagtgttacctgtccctgctattgctcttgacatcatgcagggacatcctcagtagctgctctttctgcccttggtctgtcatttgagcttgtgtttccaaagtcagatgcaggaagattgggtcctcacaacagggcggtggttggagcacctggatgccaagcctggatctgtcctatcatttgagggacatttgtgttcttggctatttgtgttcttaggctgccataacaaagtacctctgggtggcttaaaatgacagaaattgtctcacacagttctggaggccggaagtccaaaaccaaggcattggcagggtcacgctccctctgaaggctctaggggagaatctgttccatgcctttgtcccagcttctggtgttgctggcaatccttggtgttccttggcttgtagatgcatagcacctccattctcatatggctgccttctccttgtgtgtttcttgcccacttcttgaaagtacaccagtcatactggattaagaacccaccctactctagtataacctcatcataatttatccataaggaatgaccctattttcaaataaggtcacacttgaagtactgggggttatgagttcaacgtattcttttaggggacacaattcagcctataacagggggtcttaggctgatatctgtgagtctctgcttcctcaaaggtttttcagaaaatttaaatgaaatacaggagaattatgccctgcagtatttgactttacagcaggagtcccccaaccctccgggccatggacttgtactggtctgtggcctgttaggaacctggccgcacagcaggagaacgagggcattaccgctgagctccgcctcctgtcagataagtggtggtgcaaaccctattgtgcatgagaggggtctagggtggactgtccttgtgatgcctgatgaaacatcccccacaacagccctccaccatccatggaaaaattgtcttccacgaaattggtgcctggtgccaaaaggttggggactgctgctttaaagtcccttatataggatttacattaaaaattttccagtggtctccaaatgtcccttataccttcctatttttgggtctaggctccaagtaagaatcacgcattgcattttgtcatgcctttttagtctcctttaatttaggacaatggttctcaaacttccatgtgtatgagaatctcctggagagcttgctagagcaatctcctggtgccaaacttccacgtttatgagaatctcctggagagcttgctagagcaatctcctggtgccaaacttccacgtgtatgagaatctcctggagagcttgctagagcaatctcccggtgccaaacttccatgtgtatgagaatctcctggagagcttgctagagcaatctcctggtgcccatctccagagattttcattcaataggttgaggcaggacccatgaaatggcatttctaacaagctggtaggtgacacaaaagttgcttgtctaaggaccgcacttttgaaaaccactgatctagaacagaggttggcaagctttttctgcggagggccatatggtaaaatatgttagcattttcaggtcatacagtctctgttgcaacgactcaactgtgtcattgcaggcaaaagcagccctagataatacataaacacatgggtgtggccgtattcccacaaaactttatttacaaaacagctgccttaccacatttgacccacaggttattgcttgctacatggatttagagtagcacttccactttttttctctttttttttttggaggagagttgttttttcagcgcattaatattttgcaatagtccagttcagttttcttgtcatatgtttcacagtttgaatttgattgttttatctcaattagattaagttgaacttcttggcaagactacttgtgatagtgtgtacggtagggaataactgtgaaagactttgaaatggaccaaaaatattagtggtcaactgtaatggaatgctagctgtttagtacagtcttttgggttatctgattctatggggtcttgtgtctgccactgtctttgaggtattttacaactctgtaaattgtagactactgatggtaatatacacgatttttgtctttagaaatgcaaattgtgtctattgcgtacgcagctgttttttgacctatggttactgaccaattttccatctatagacaaccttatttcagcattcctaactgcttgaatatttgttggattctccttggattttcctttgaaccagctgtgacatgttaccggttctcacattaatgaatgagctaaggaatacctttgatacatgttcattctacatctgagtcatgattataccatcttttaaatattaccctttagcattttttattgcatcactttagaaagcagaaaatgctagttttttaaaaattggtgatactagttttaattacttgattaaggtggttctaccagatctttccattgtgaagaggtattttgtgttttttaaggaagtatactttgaaggtgatactttgagacaaagagaatattccgcttcacaataatttttcaccagatggttttagtatttactgatggtctttgcctgtatccattataacactggagttgcaaaacacaaaccctttttctttttttttttttttgagatggaatctcgctctgtttcccaggctggagtgcagtggcacgatctctgctcactgcaacctctgcctcctgggttcaagcgattctcctgcctcagcctcccgagtagctgggactacaggcgtgtgccaccacgcccggttaattttttgtatttttagtagagatgggatttcactgtgttagccaggatggtctcgatctcctgaccttgtgatccgcccgccttggcctcccaaagtgctgggtttacagtcgcgagccaccgcgcccggtcaccacaaaccctttttcgacgtccacagtttacacctgagctctccctttgacccactacaacactttcttttcttgggcaatatattaatagcacggtggttatgtcacaggcctgtgactggcttgggctcaaacccgggctttttcacttactagctgcaagactaactagttatttaatttctccattcctcactttccttatctgcaaaacggatgcaataaaggcaccccctcttacaggactgttaggattaaatgagctaaatcacagtgtccgaacacttcagtacttcgtacataattacttgctcaagaaatgttagctattattgggtcatgattatttatatgtgtttgaattccagctttgccacatcccagagtgtctttgagtaagtcactgagtatccttgtgcctcaattcctcatctataagtaggttcccatctcataggtttttaaagattcatgcttacatgcttagcagtgtctggtatggaataagcactaaaaaagatgagcttttatgatgatgatgattactattttcagtcatgattattttgtatatttactctaaaagaaagtgaatttttttagttcaagacttttagattcatcgttctactttcattgtggctagctcatggccatccacgtagtgaattaataaagctttgttgagtggcacttgcttgacagcgacacttttgtccactctttcaccttgctggatttgtgctgccttccttgctgtaggaagcccacgcttgggaaataacattcccacagaaggtctgagaggctctgacgggccaaggttgtaaacccccatgatttgactccacgggcagttaaagtgtgttcccaccccccacggatccgctgccactaggctgtgcgaaggcatttacctccctggcactttgatccaagttccctattttcccctactggtcgatcgaggttgggaacagttgctctaacctgggaagcacccgccacgatccagcagggcgcggtgggaggggaaactgaggcccggctaggcacccccgccgcgcccagcccgccgagaggctcaggccccgggaggcacctggagcctgcgccccgcccgcgccgcttcctgtcccgcgcgctgcgctcacgtgacccgggcctgggaggagccggggcgggcgggggtcacctgaacaagggagtcacgtgagcggggggcgggggtgggggggcggtgccgggcggctgtcacgtgacgcggttccggggccgccgctgccgctgtcgctgtcgccgagcccagtcgagccgcgctcacctcgggctcccgctccgtctccacctccgcctttgccctggcggcgcgaccccgtcccgggcgcggcccccagcagtcgcgcgccgttagcctcgcgcccgccgcgcagtccgggcccggcgcgatgggggccgccgccggccggagcccccacctggggcccgcgcccgcccgccgcccgcagcgctctctgctcctgctgcagctgctgctgctcgtcgctgccccggggtccacgcaggcccaggccgccccgttccccgagctgtgcaggtgggtggcccgcccggacgcaggctccgctcgcggtgcccggggtgagcggccggcgtggggggcggggagcgctcgaggagctcctggggtctccaagtcgcctccgttccgcgccggggtccgccccgttcccgagggaaagttgcctgcgtggtgtccgcgagtcccgccgggtcccgtgcgcaggcggggggcgcgggggcacacgcggtcgtggcggtcctggagccccgcgtccggccacttgtggctgtcgctgagtcgggggtggctttgtgcggagcggtcgccccggcccttggggtcggcgcctgccctcgcgcggccgggcgtccgggaaagttggaggcaggaactccagtttgctttgttcccgctgcgcgtttgcatcagagtttcgccagcggggcaccggtgaggcccctcggtgtggagaggctcaccggggcgttggagcccgcaggaatggtcctggagttgagtgtttgtggtttcatttgctgattgatttccccccgtgggctcattttctctttaaagaatatatatatatatatatttttagcaggcggtgacttttgtcttctttagattgggggcagggggtgtcgtccagtgtgagctttcaagacttgacccttcacttctctgagcccaacttcctgcctggttgctcacatgatgtcattgtctccggggcggattattctagtggatcttgctctgggaaccatgattgtataaccc

SEQ ID NO: 11073 - DNA, 6000 bp, Homo sapiens
tctcagaaatccagagtatgcctgacaccatgggcctctgtttatctgtacttctatgtgcatgtggaggggctcacccccaatgccacatgcactcctaggtctgaaaatgggggagggatggggtgttttccaccttgcgccactttgatgccttccatcagcaactctgagccagagcctactggggcattacccctgtgcagaggtaactccctggcccaggttccctaggaacttgggctattgcaccatcagcgaggagtctgcccaggggaggggaggcagtgagtggcacctgtaggagctcgggtaggttctggagagcacagccatctgggtcattgacaaggtgcaggcaatgggcctgctggagagtgctgggctgctcagtgtggggcagggaggagccctgcagctgctctgggattcccaggagcctgaagctttcttgtctgttgccgtgacaccatgtcaccacaaactgagctgcgtaaagcatgcacactccatgtctcctgggctctgtggtcaggagggtagctgcagggcagctggatgttacattcaaggtgttagctgcagtggtggcctcgtctcaaggctcatctggagaaagatttgatttggagctcaagtggatatcggcaggattcattctgtcccacttcaggaccaagggtcttggtttcccgctggttgccagctgaaggtacccacagctccttgccatgtgggcctccaccacagggccagggctccatcacagccagcaggggagagagactctcagccatgtggatgttacaatcttaaggagcatgatcatggaggtgtcatccgtgacacttgccatttccattggttacaggcaagtcacaggttctgcacactcagctgagaggtgaggatatgtgggccactggacagccagtctgctacaccctctggtcttctttcttgtctcctgctcttccctccaccttgtaaggcactttttggatggtaggactggttttggggtcctgtggtgccccatgcctgctgctgtcccagctttggtgactgtctctttgttacaggacctttgaggtgtcaattttctggctggaaacctctgtggtcacggtgcctttgcatgagctcttgtcctgcgtccaggaagaataagggacatagacaagtgaagggtgagcaagacgaagatgagctctattgagtgttacaacagctcagaggacacctgcattgggtagctcctcttctaggcaggtcatctgtcgagtgttcagttctcagtagagaggaggcccaggagaggtagctcctctctgcaactggtcatcctgatgtttgcagctctcagcagagaggaagccctggagagggtggttcctctctgccagcaggttgtcgctgcagctatcagcagagaatgtggctcctctctgtgggttgtcccatcatctccagctatcggcagagagggtactcctttctgcagctggttgtcccatcatctctctgccctcttcatcctctagctatcctctgccctgctctggctgagtccagggcttttatggacctcagaagggaggaagtgcatgccagttgttctgtgggtggccatgggtgggttaggaagaggcaccacaagtccccactctggtttccgggactggcagcccaggccccagccttcaggcccttcttggcctgaaggtgggccttactagggacacacctccttcttcccaggactctgtctgcctcctgctgccattcatggccccaggtctcaaccccaaccctgctctgagatcggagcaggtgctgggatgggagaggggccaggcagtgggagcagactcttctgagcctgggatggggactagtggggaggccttcccaggcccctgaggttgcaggctgcagagatgcccaggtcttgtgcctgggagggcagccacagctgcatccacggaactcccaccctgccaactcagaaggggtggggttcctgcttgtccctggctcctgcctgctctgtggagtgagaggcccaggtctgcagccacaggtcaggtggttgcagctgcatccaggcaggcagatctggcctgctgctggccccctccaagagcacaaggaggcttggatccacagtcccaggagggtggggcttccatcagctccgtggagtgttcagccccagccacgcctccctgctgctgccatcatttccccctctgaagaggtacacctaactgctgttagggtagggacaatgaccactcttaactgcttcgtgctgaccagggatattgttttgggaaaacaacagtcaagtctctctcagagacctatctaagaatatccagtacaaggcagccatcatctgaggctccattttcatgaccatttggagtttaacggcccatcccttgtttcttctgagctgtagtcagatatcactagttggttcaccttcacaattgtcaaaagctacaaatagctcaaaagaaaagcttccttgattctgaaaaacaagataaaggatcaacagtattccaagcaaaaggtcaaaacaagattgcttcagtcttctattagttcagctcacccagtcaactcctattcacaatctccaaaattatcagaaatctgcatttgaagactataatccatcccttgaagaggatcaaaacatgacaacaattgtctgtgaatgtcaaaatgtcctagcgtattcatagtcaaaaacacaattgatgaagaaatctggtcacctctgtgatttacaataacctaacacaataaccctagctatgattgataacacaaactcaggcatcagaaatctagaaatcccatacaattttgaaacacacattaacatttttcactaaaatataacctgaagatcaaacaccttattttggtaatcctatgtaactaaacttgtcaaataaccctgtttacctctccctttcgatgctccaggtgtcttctgtagcatccaaaactcaggggttaggaaagaaaattttgaagctgtaaaggctcaaaacacttaacagaatttttggttactataagtcattcatttaaatgactcaaagcaaaaaccttcagtcactaagagggaagacctaattttccaaacaatctaacttttaaccatcgcactcctttttaagaagtccttttaagtctcttattatccaactttagccatgccaaatggccagttgaattcatggaggggcagagaatatagtgatttttttattgttcctgcaaccagtttgcacagagagagaaaccaaaagtctgactggtaagaacttttaccctttcgccagcatgtcaggctgctgagctcccttcccctcagctatggagccctattgaccctggagtcctgttgatctcttgtccttcccttcttgtgtcagtagcttattcacaaagaaaacaaaatctttcattgcatgaaaatcttgttcaagtgaaagccaaattttacccttacattagtctattaatgtcaaccccaattaaaaaaaataaaaccttacagagaaatccatccaatcttaatcagtttgatcatgaactgagattgttataaatcttttataaccttttacaaattttttttgttaaacagcatgtaagtgcttcaagaaaaccttgttgtgcttgtattccattgttcaacttatggaaaaccaaataatatcctttttagtgtagtcaatatgtttacacacaggattccttttacaagattaattttttacaaaccttccataacttgtttgaaccttaagctttatcttatataatttaaaacaatcatttaaccctctgaactaggcaaaaatttacattcccatgccttcttatattattttactaatgatacattttactctccttactcacctcacgtgtagatctgttttcagtagtcatcactacatgttataatggtagctcttagtaattgttaattttggtgaaatacccagtaagttattttagttacgtacttaggtgcagatgaggtctaactatttccagcatagctagggcaggccctaccaaactgcaaagcaggaaagttgaacaattttcaaaagccaaagcagtttatgaccttaaagcatttagtcaacctagtttctgacttgcataatttagaccatgtctatattttgaagacatttctattttcattttactgataatttaaaagacagcctatttagcaaagtcatacttaagtgaatttgaaaattgcttagacttatttacttaatttatgaacactcttttacttataagccaatttggtagacacaacatataacagtaagtgtacatacaagtaaacacatctagacatgtatacacacacacaaatgaagaggtggagcttaaaacacccaaattgggtgcagtgtatactgcttgggagatggatgcaccaaaatctcacaaatcaccactaaagaacctgctcatgtaaccaaataatacctgttccctcaaaacctatgggaaaaaaaaactaaaaaaaatacttaaatggtatcacagaactaattagccgaatacagtatctagtacctggctgtcacccaatacttgcctcataccatcacatctagaaaacaagtagatattctttttggaagagccctgagggagctactaggaggtttgcacggcctgctctcctgccctcttcttgctctgtggctgaacttcaattctcttcgggcttagaccccactgactcgctcccgggcaaagcaaacgatttgatcagatggccacgtgcattcttccttttcctgaaaccagcaccatagggtaaaagattatttctacttggttgccttccagatgtttcacacttggacagcaaactgatttcaaaccactccttttcaaagatctctgagggagacattgcacctggccactgcagcccagagcaggtctggccacggccatgagcatgctgagccatcatgcccaccgtggatgacattctggagcaggttggggagtctggctggttccagaagcaagccttcctcatcttatgcctgctgtcggctgcctttgcgcccatctgtgtgggcatcgtcttcctgggtttcacacctgaccaccactgccagagtcctggggtggctgagctgagccagcgctgtggctggagccctgcggaggagctgaactatacagtgccaggcctggggcccgcgggcgaggccttccttggccagtgcaggcgctatgaagtggactggaaccagagcgccctcagctgtgtagaccccctggctagcctggccaccaacaggagccacctgccgctgggtccctgccaggatggctgggtgtatgacacgcccggctcttccatcgtcactgaggtaaaaaagcctctgtaacatgggagttcctgggacagggagaaatataaagcaaatcctatgaagttcagttccatatcaggaaagaggtagggggctatgtttattgtgcagttcgtgggtgtctggctgtgtcccaggcacggggcattctcttctctagtttaatccaccacaaactctgggtctttgaggaggaagctgaggcaggagagaacagctagcacaagtcgggggccaggttgccaggttgcttgaatgggagttgactgggagaccaggagcctctctgcctgccccactggcttctcccagaactatcaacttgctctgggtcccgcttccccaccaatagtactgtgggccccctccttctgctcaagagtgatgacgattgacctcaatgatggtgttgaggtggcctggaattgccctggcttggaagtgagaatatttggtggaatcccagctgtgccccttattagctgagcatcactgggtaagtcactgcctctctaagcctcatttcctcatcagtcaa

SEQ ID NO: 11074 - DNA, 6000 bp, Homo sapiens
acggatgtttcaaagatacaaaattgagagtgattcggtttttctctcaaaatgcctacaatgccatggaagaaaaaaagtgcatacgtgatttaaaactaagacttcaactgatttttgtggaatttgataaaatgtaaaggttgtgtggaagaaaaagagtccaagaatagtcaaggaaattttggagaggacaaggtgaggggagaggaaaggtgggatttgtcttattagatattaccagattcagtaggacagaatgaaggctcagaaacagatggaagcaggggcaggaacctaatttaggagacaggcaatagtgtaagtcaagaagaagttcagttaagtggcatctgggcaagtggttgtccattcgaaagaaataagtaaagttagatcccaccattctctgcacaaaaataactccagagatattaaacctcaatttgaaaaataagatttaataagaatatatagaagaaagtacttaagatctcacactagagcaggatttttagaacaagtctaaaaaagcagaagctatgaaggaggatgatcagttttactatacgacaatttaaaatttgtgtagcatccaagatgctaaaagttaaaagacaatccccagactgagaagattgtatatatacagctggcagagaagcagaatacacaaatatgcaaataatttcccaaaaatccaataagaaaaaaaaccgccacaaataacaaagagagcataagcagatgataggaagaagcaactcacagaagagaaaacctgaatgatgaataaatatgtaaatgtgttagtcacatccctgactagatcagaacaatggggccacatttttcatccatagtatctgctagcgtggttgagtctaacaagaccaagtgttggtatggacgtgaagcaactcatgtgttgctggtgggatgtcagttgaggacagccattgacagcaatgtctagtaaagttcaaacatgcacacttatggttcatctagtctacttctaggcatttatctttgaccaattcttgcataaatacataaagaaatatgcacaatatgttcactgcagcacaatttgtaattgtgaaaaattttaaatgagctaaatgttccccagtaggggaatggaaaagtcataggatgacctttcaatagaaagacacaagaagttagagtaaacgagcccgatctctatatatcaaggctaacaggtctcaaaaatatattgtagagtaaaaaaaaggagggacagaaagctacatagagtatggtaccatttatgtaaaattttcaaagcactctaaatactatctactgtttcgttgcaatacctgtgtgttaaaggcttcaaacagataagaatcatagcttcctgcgaattacatctgggcaagagaggcctggggccttgcgggtgcccactcaggccctactcctgacctcctcaaggggcaagaggttgcgctcacctcaagccaatcaccctcactccccaacccacttccaaccacactctgagagctgggaccctgggattccctgcccggtagctctgagccccatgtcccaaagaaaagacctaatggctgccccaaggaggaagggaggagacagaggataggatctgaagcaacaggaaggagactccagtcgtgtctgtgatatgtcaggactttataacaatatatccaaagcaaacataagatgatgtttgctaattctgggggtgggtggtggttttatcgctctttttattattagctgactcttacctagcacttatgtttcaaggcctgttctaagtgatttgcattaaaaatgagagggttctattattactcagtttcacagaagaggctaaataacttgcccaatatcactcagctataaggaggagagggggatttgaatccagtgggtctggctcccaggtccaccatgtagctagcaactatactggatctatctgtccataggctgagatgacttcctttaaaaaaaaaaagtaattaaaattaaaataccctgacaaccacaatacaaaaaaaatatagtgaacttccatgaaaattttcttagatatgttaggagcactgatggggactgcattgctgagggaggaaggccgtggtggtggttgcggaagactttaaagaggggctgttgacatttgaaccaggccttgctgggtgatgggcagggaggaatagggggatgaaattctaagaaaaggaaactttgtgtgtacaggcatagattttaaaaatttcaagaagaatgtgaagattggcaagtagttctgtttggctgtccacagggaacaatttgaggagaaatacaggttaggagctagaaagggagagtgagaaaggaggattttagaaaacaaggcaaactgctgaaggtggcacccccaagctgcactgtgggaagatgatcccaagtgcaggctggaccagaggacaggtgctgcagggacagaaccctgaggggagcccaaggcaatcacatagctgagatgaggggacatgtgagtgtgtatgagtgtgtgtgagtgtgtgtggtgggggagtcaagaagcatctgtttatttcacaaatatttactgagcacctacaatgcaccaagcactgttccagaaggtatcgatagaagaaaatacaaaactgtctgccctcatgaaacttgagttgtaatggagagacacagataagataaataaataaaatgaataagtataaatataaatatatgataaatgaataaaaacatatctatgacaatatatggtgatgataagtgctttggagacaaagcaggaaaggggggaatgtgctagtgtatgcagaggttggggtgggttgttgactggtcccagttccctgaaaattcactgacaagaggcagatggctagaagaaaaggtgtacttatttatttaaggtgtacatgggggccttcagaaggaaggcccaaagatacaggggaaattgcctagttttatgcttaggttcaacaaaacatggagagccctgtcgaaataggattggaccaaaagggtgtgatctgatgctgatactgagtgaggaaacccagcgaggccggtggctctagattcttcttggcctctctgagcagcctttttttccttctgggtaaggggcaggttcttctgtggaatgggaggtcttaggactgcaatcaacaaggtagaacagttgatttctttatggccagtttttacacagacaagtgagggaaaatcacagtgatatttttgttttatgactggctttggggaaaagcgttctggtttcgatggctagcctgggggagaatgggaccgagagacaggagggcagaagatgacacagagactgcttctgaggccttcattttggcgtattgttttctgagctccaacattggcaaaaggggttccaagccgagatgacctaagagtacaggcctgaggagtgagtggtgtccccgccatactgaggttctgagtctgggcccaggacatggttgcaccgaaaggcagggcaggaaaggggagctgggttggagggggacagactgagtctggggtccagcgggcagttgaaactgctggtgaggacatgaggccagtttgaatccaagcagcctggcttcaaactccttgttccggaggaggaaccgcaagtcctcccaaggccttggagaaaagtgagctaaaggcagaacgtgggccgataacgtgggggcgtggggggaccgcgacccagcccggggaaggcgtcccagcatggacccagcagcctgggcagcctgggcgggaagttctgatcgcgctctgccgaattggcaggcgcaataagtaagcggaaaaaccaggattcaaaccaaccaccaacacccttccctggcgttcagaccgaaggtgggtgggaaggccctggcgaaggaggtctgcatcaggcctggccttgaggcgatcccttctcaccccaaacctcctggacgctgagcaagccccttcgcctgtgtgggttgcccggctgccctctggggaaagttgggtgatcaaatcccaagttgtagctctcgatgggtcgagggcgatggccagcgctgtgctgggaacgggcagccctgccctgccctgccctgccctgccctgccctgccctgccctgccccacatgggcgcaggaggcctccgcacgcgcaagggccaagggctggagggggctctcccgggcacaggcaccggacccggggcgcgcgcgcgcgtccttagtccccgggctgcactccgggccgctgagagatcgggtcccagaagttccgggagtggtcgggtgaccctggaactttcttcttctggagcccgacctggggctgactgcagagcaggctgctggcagggaccaaaaggagctccgcgccaggccggaggctgcgcccgtcactcgcggtcccggccgggtccctggcgcgtagtcaggccgcaccgcccgagccccaccgcgcgcccaccccggccgggtgcgtccggctcgcggccgtccctcccgcgacctgtggcccggggctgctgcgggcgcccggggaagagaggcgggggccgcggggggcaggaggagcggctgcggccggcacagcgccagggcgagtgaggcgggtggcgcgggggaggcggcggagtaaagagaggccgccggctgggtccgcgggtcactccgaggcgcgggctgcgggcggcgggcggcgggcgcaccatgccctccttcgacgaggcgctgcagcgggtgggcgagttcgggcgcttccagaggcgcgtgtttttgctgctgtgcctgacgggcgtcaccttcgccttcctcttcgtcggcgtggtcttcctgggcacgcagcccgaccactactggtgccgcgggccaagtgccgcggcgctggccgagcgctgcggctggagcccggaggaggagtggaaccgcacggcgcccgcctcccgcggcccagagccccccgagcgccgcggccgctgccagcgctacctcctggaggcggccaacgacagcgcctccgccactagcgctctcagctgcgcggacccactcgccgccttccccaaccgctcggctccccttgtgccgtgccgcggcggctggcgctacgcccaggcccactccaccatcgtcagcgaggtaagggcgccccggccctttggaagccggcgggagaggacgatgctggctcccaggcggacaagccgcgtgtgagacgctggccgccaggggaggtcggtggagacggggaccggtcggctacctctggggacagacaggattcagcgcacccttggaagtgccgcgtcgtaaatgctgggaaaagcctttcgttatctgcctgagcccgtgagttaatgcacagatactttggtttcgggtgtgaacaaaaactttcttcgaagccgagttgtaaacgcctggcgcacgcctgctcaggagtcaaagacccagcaccgcgttccttatctttgaggtgtgcgggcgccgtcattggaaattatggttaggtgcgcgatagggaacttcagtctctggggtgagcgacgttggcagttccggattcgcttatggtctccagggtcaaaggaaagggcgaaccaacgtttgaaggcagcagcagcttttttccagttgcccaaatggttactcaaaatgcaaggggacaaaggtcgaggctttcccggggaatggttttggtaaaattgctttggggcaaagagcaacatctgggataagttgggaaaactgaagtattggataaattttagtttttttttctggtaataaattttaggaacatagcgggagggccacagccttccaacgcaaatccccaacccatttacaggcggaggctgctgccggcgggtgggcgggggcgatccccacattttgggcagtcagtgcatttggaagttaggggag

SEQ ID NO: 11075 - DNA, 6000 bp, Homo sapiens
gccacgcgctgcaatagcggctggagcgaagggactgcaaataggtcacgtcacccaggatggcattatctcgcttggggacaaagttcaaattgtatggatgtttgtggttgtgagagcaaaggcacgaaattatctttggagatttttgggcgtaatttcccatcactgtatctttgtctgtatagacaaaaataattgatagaaaaaatacctagaaaattcaagcatcagccgggtgctgtggctcaagtctttaatcccagcactttgggaggccgaggcgggcggattgcctgagctcaagagttcgtgaccagcctgggcaacacggtgaaaccccgtctctactgaaatacaaaaaattagctgggtgtggtggcgggtgcctgtaatcccagctactcgggaggctgaggcaggagaattgcttgaacccgggaggcggatgttgcagtgagccaagatcgcgccactgcactccagcctgggcgacagagcaagactctgtctcaaaaaaaaaaaaaaaaaaaaaaaaaaattccagcataatcagcactttctgcccctcatccaggcttagaagacatgtaagtggttggctctcggctgtacaatcacagcccggcttcctcggctatccaatcacagccgtatttggctctcagctgtccaatcatagccatacttggccctcagctgtccaatcacagcccggcttcctccactgctcgctgcactcagctggatcttttccacccaaagtgccacttgctccagtttgcagggttcatagaaacggctgctgagctgcagacctggtgatgcttgggtccagccgagctgctctctccaaagctggacactgctctgccgcccgtgtggagatggggtgtggatagcgtgtgtaccaccccatactccctatcgtcccacctgctctagttttgggatcgcacttcttctctccatgggaatttcagttctctattttgcttagttgttcactgtttggttcctccactagaactaggcttctgtgagaatggagacccctggcccttttatcagtgtggtaccccagtacattaggaaggatgcctggcccagggtagacgctcaataaatagtgtggacgactgtagaagtgggtgctgtatcccaggctgcagagggctcatgggaaaggaaaaggacctacgaacttggaaaataaaaagggtgtgtgtgtgtgtgcatgtgtgtgcatatgtgtgtgtgtgcatgcgtgtgtgcatgcgtgtgtgtgtgtgtgtgcactgtgcacatgagtgtgttctgaaccaggacctacacgatccccctgactatgagagtggaacaggccagattctccgcactcgggctcacctagcgttgccgccctgacagggagagtggaagacggtgatcaatcacagagctgctgctctccttcattctggtgcaaaatgagggtgccttagcccaatcagatgctgttgttcagggaccctgcaggcccttgacggtcttggctgggtggtcaggccactcacatgtcccaggtggagacgtgggctgagagaaagacccagaatcccaggacatcaccagcagctttaaccacaccgtggaagctgggaggattcacaaatggtgtgaggatgggagtatttccagccaggcttgccacacgatgggtctctgccctctctgataagtaatggaaattagctaagggtcttggctgagggcctgacatagccaactggccccaaagctttttctctgattggctctctgggttctccttggccgaggaagaagccagagccccgaatgcccgctcagctcaggaggtggcctgtctagccaggggaaggcggagtggtcagcccccgccaagatttaagatgctttggaacatttgctaagagaaaatactctctcaagccatggttgtgttagcacaaattgttcttccttacacacacacacacacacacacacacacacacacacacagcatgagtacatttatttccaaagtgtgaaattccctaaagtagccaagaactcattctactccctatagataccttcttcatctttatgtggataaaaagatgtaagatacatttgagtttatttggtattgcttttattaacaaagatttcagatgtaaatgtcaagaaaattgatattaatttgcttacatgagtacattccttaaaaaagcaaaccattgggtagacttcccttaaattaatctttagattcttggcaggaagtttggtgatttacaaggtgattctacagcatgaagaacgcatggcgcctgtggtgaactcagccgtagcaaaacggtgccatctagtggctggtgaagtctcggttttccggaacacgcgtgctctgagctttgtatcacccagggcatctgtcattttaacgtccaatgagtgacctgcagattcgagcagatctacagaaccacctcttttctcaagctgatagagcccagatgttaattttaaggactgaagtggctattgacaccttttaaatcctttacacgtacccgtctttggcctttggcaggtcagccctgggccaggccatggctccagtgcacacacagagctcataacgccaaaaccagctctgagagccaagccagctctgggtttctagaggttgcactctcttccctcaggcaactccatgtctgcaggaatgtgtaggctgcgggaaggcagcctcaggggtcgggtaagataagagtgtccctttgtttatgacgagaccactgggggaccatgtctaagacctgccctggtcacaggaacactgaggggtgctgggaattatctcctctaagagaagcattttattctgctacagagaaaaggcagagagtgaaatatactgttcatttaaaaaaaatcccttttaacatagataaaggggaggaactgggaggaaaagagagaaaaagcagacgtaactgaagccatggtttcagaaattcaatcctagtagaagtgctggagggacagggagggtgtggctgggaaggatggaaacagaccaggtttatttgtgcacaaagggaagctccttagaaggcataggctggtgaaggggaggggaagagcagcctctggaaacagcccccagagccagagagcgagtcctagaggatggggctggtgagttgaagcaaccaagggagaaagaccagcagacagtgcaataaaacatcaggaaggtcctctaatatcaaaatacaggtcatccatgggaactaatgagaggccagaactgaagtaaactaaagtgttgccaaaaaataaaaataaggtccaagttgattgatcgataacacggttagtatgaagaagtccacattatgctaatttctttacatattattctaatttgtattgtctctgaaagtcaaaatatcatcttagtcaattaacatttattggtgataacatttattggtgaagttgaaccatatatgtatcttgaagttaacatttttgctatatatcgggtgctgttctaggggctttcaaaattatccaagtcttgaacttttgcaaccctcctttttaaagaggaaacaggttcggtgactcagtgacccacctgagatcacctagctaacaaattacaggattagggtgtgaacccgtggagctcatctgtttccatgctcagaatccctttgctagactgcgtggctcttatgtctatgtaagcatgatagtccatgtttagttaatataaaaagctattgttttcataaaactttcattttcactgaaatacattaagtgacaagaactttaccccatttatcattggccctgatcttctgatggtctggcaagcttccctgagtagtgttgccaggatgctagacttacctgcgagatttgccttatagatctaatctagacagaaatggctgacttcacagaactttggaaacaatctgcagacatcaagttttacttataattgaataaaaataatttttcttgcttattagctatgacatttgtggtaagttgcttaaagctccagacttaccccgtctaatacagttgtctctagccacatgtggttaaattttaattgtaattaactaaaaggagatgcagttgtgaactcattttatcagttgcacttgccacatttcagaactcaatagtcacatgtggcgagtggctaccatactggacaacactgccccagaccaaaataccaaatcatttaacttttctgaagctgtttcctgtcttataatgggtctaagatttctaatgatcattagcatagcactattgttggtaacatgaaataatgcatgaaattctttgcatattgtaaagtactatactcatgtaagttgttttttcttttaataattgctgtactgtgttgtgaaactgtacagtctttgcaatactaagactttggccccaggatcttacaatcacgttagctctttttcagaagttgaactatgtgtcttgaagttgacatttatgctttgttctttaagactgaagtcctcattctgcaccactgacaacttctgacagtttctcttactgtggaaggttctattctatatacacataaaaagtgaaacatatcactttaccatctggaccatgtctattagaatttaataggaaaaaagcgcaattaactagaagctggtaagagtaatgatcttttgccccatacaaagtggacattgtggatcacagagaaggtaaatgagtaacagagctcccgtatgcttcatggggtcagtgataaccaagttcattaacgagtgacagtcttaatgactaacacacctctaacatttcacctctagctcagatgagagagagaatgggacttcttggtactgattgtttttcccatgcctcaattggtttcttttagggagctacaaatttacgtgttcactggtgattgatcttttcatccagcacaatggacagaagtctaaggaacgtccttgtggtttcctttgggttcctgcttctctttacagcctatggaggtctgcagagcctgcaggtatgtgtgtccggtcatcaaattacctgaacttcttggcctccaagaatccctgtggtcacagacaataatgaattggaaatttgaaaaatctaattcacctggtgtttctttttcactctgtaccaaatcctctaaaacaaacagtggttctcagatgcagtcctacagtgagcagttcccactcacgtctcaataggattgcacaacagcgaggtgcacgttgctcttggacaaggacagcaggggtcttgggactgtgatttgttgggacattctttgcctttgggtggttaaaaggagacacaggaaaagtcattgtgaattctatgattgattggatgcccttggctttgtggttaggggcagccatgtgaatttatcaaatgtcactagaccttatacattccaagcctactctaagctaaactgtgaactttgacaacatgatctctctatactttgaactccttatggcatgctctcctccatagttccgtgagcccatgaaaaagccaaacggcattctccgaaaggctgcagcattcatcatgtgcacctagacatagacctgacacattttcccaagctggttacatttcaagtctgatctttacctggattccagtctgaattccagggaattccaagggctggtcaggaagcagggctattgttactcccccggcttattcattgccacagtgttgtaccctgtggcctggtgtggtcacataaaacatttcagagcttctgatgacaaattagtgtggtcttacatggttcgtcaatgaagaataagaattgggcacctactgtgtgcatagtatggaaccagaaaagcacacctgggaactcagaatccgaggtttctcctctcactgttg

SEQ ID NO: 11076 - DNA, 6000 bp, Homo sapiens
cctagaccctgaaagacttgggtggccccttcccggcactcaatggatgccacctggaaccaatcaagccacggatcttcctgtccccatgctagtcacattcgtgctttaacctccactgcacttggacattggagcttttctcatccctgttttatagatgcagaccgaggcttcgggaagtgaagctggtgggcgggggccaggattctagcccaggctcatgggctccagaactcctgctcccagccacggcactcgcacctttgtggcagcaaaagtctgttctgtagctcactttgggctggctctttttatgtgggtttactcaaggcttggaggctaatggctgatgccccagtcttgacaatcatctaatggaataaacattaacgaagaccctgtaccagaaggcatctccttcctcgagaaatgcacagacggcgccctacccaggtagcctgtgggagctcggctgagccagcataggccaacctcacagagcgagcaccagacagagctgagggaccccggtgccatgagtattgggactgaaaggcagaggacaggaggaagaggtggggcccccaggacctgtgcatcaccttgcaggcaggagggagccattggaggactctgagcagccaggtgatatgattagctctgtgttctaggaaaatcggtttggcaatggtgaggaaacaaagtctagggggtgcagaagatgcgccagggaggagcgcagacccaggcggcctggagtggaggccctgaggacttggtcatgggctggacaggaaggagctgggaaagggaagaatccagcgagtctttgtcccctagggctgcaagcctggcaaggctgcccttgtgcccccaagccctgtgcccatggtggatgcagatgggtggactgcaaccaacagagaggcagtcatttctacattagagggagaaaaggcagagcaaagtgtcttctcttattttgttacaggacaaaagcccccaacacacacacacacacacaatcaccattcttccattgcattctgagaaaaaggctccaaatctgtgaatcttcctggggttattagcatagacctgtgtatatctggtttatgagggccacctgggaaccctgggactcccatcctccctgcccaggtcacctttgcccaagcctctttgggcatgagccactgtgtctggcctgcccatctttttactggattatctgtcttctttttgagttataagagtggcgtggtggctcacgcctgtaatcccaacactttgggaggccaaggcgggtggatcacgaggttaggagatcaagaccaccctggctaacacagcgaaaccccgactctactaaaaatacaaaaaattagctgggcatggtggcacgcgcctatagtcccagctactcaggaggctgaggcaggagaatgacatgaacctgggaggcagagcttgcagtgagccgagatcatgccactacactccagcctgtgcgacagtgagactctcaaaaaaaagttctttatatattctagttacaagtcctttatctgatatatgcttcacgaatattttctcccagtctatggtctttttttcttaaacatgtatcttttgaagggtaggagtttttaatcctaatgaagtccaattgatcagctttttcttttatggatcctacttttgatgttatgtgtaagaaatctttgcctaacccaacgtcataaagcttttctcttgttttcttctagaagcgttatagtttgagctaagttaagcacttagattttattatccattttgagttcatttttttacatgatgtgaagggtccaacatcattcttttgcacatgaatatcctgttgtcccagcaccacctgttgaaaaaactatcccttccccctcactggatttgcctccatctacagtcagttgaccataaatgtgaaggttagtttctgaactcccagttctgttccattgatctattgatatatacaccaacaccacactgccttaagccgtatggctttatagttttgaaactgggaaggcaagccttctttgttcttttccaaaattgtttttgactactctgagtcttttgcatttccatataaattttagaattggctgttttctgaaaaaaaaaaaaagtcacctggaattttgatagggattatgtggaatgtatagatcaatttgggaaaaattaccatctttataatatttagtcttctaattcatgaacatggaatgtcactccatttatttttatcttttaattttcagcaatgttttatctttttcagcatacaagtcttgcattcctttgttatttatttctaaacattttattcattggatgttattgtgaatggcattttcatttttgggtgttgctagcacgtagacatataattgacttttgtatgttgatcttttatcttgtgaccttgtaggacagtcttttggtgagttaggagctacctatagtgccaaccaagagaaccacagactagtcaagagctggagttatctacctgcctcctacctgttgcagggacctccctttcagcccactcagcctcagcagttcaaaggatacagccctcttcacttcaagggggtgcctaacgagcagcccattagaaagcttccccaaaccaaaggaccagtctacctgctgctgtggagcgaggcacacaactccactccctcttccttgagacaaggccacctctgcctacctccttcaatgaggccccagaactggggaccaggcagccctctctagcctggcctgacacctgagcgccacggtcccactgcagcctggtacagcactgctttctcaggggccacagaacacctttgtcccagtaatgtgtttttaggtcaaagtggagaggtttgagggataggggttctgtaagttttgcgtatctactaatccctgggactcttggctgctcccgtacaaggcagggagtggaaatcaatggcttgccttctggactttggttatcctgagctcagagctgcagtgagttcctctctgtcagtgcacagcttcatttgggggacccttcaggcacaatcctcagagatgggaccgtttccaatggtggtatgtgagcaatttcaggagacacgtgggccatcaactcacagtgaggaaactactcttttaaagtatcttgcagtctctccagttatgacaaagagaaagtctctgttcgtgttggtatgtccttagtaccctctttaacccttggtaatcccccaggccttcaggaaatggcataatttcaatcccttttgtttttccttgtatactacttatggcaagtaatatcagcttcccatttacagtagtattatataaggctgcctttcaaaataaagttctcatggtccccagccctgaaaaaacaataaaaataggaaacattaaagaaaaagataaattaagtaaaagcttttgatttgatgaggaaaaacagtcactgccgtagagtggccttgtacagacacagccagggtgctggtgacatgggacgtgtgaggtcggggtatactgggcagtgcccagggcagcagggcccctgcagaggtggcttcctggtccaccccgagctttcccgggatccagcccgctagcccacagcagcaatccctgtgcttccctccccctgcaggtgtggcgggctggggctggtgctggccagcgcgggcttcggcatgctgacggcacccatcatcgagctgcacaaccagaaaggctacttcctgcaccacatcatctttgcctgctgcacgctcatctgcatcatctgcatcctcctgctgcccgagagcagggaccagaacctgcctgagaacatttctaacggggagcactacacgcgccagccgctgctgccgcacaagaagggggagcagccactgctgctcaccaacgccgagctcaaggactactcgggcctccacgatgccgcagccgcgggtgacacactgcccgagggtgccacggccaacggcatgaaggccatgtagcccggcctgcggaacccggggctccagggtctggggcagcttgggcacaggtttacagaccagggaccgaacacgcagccaggggtgggaaagctgcctcagccaagctgagcctctcaactggtgtggggaaatcctgtctttccaaaagtccaaggagcgcgggtcggaggagacaaactctttggaaataaccctttcaagactttcttttctgccgttaaatgtgtgtatttattttggtcatttttacgagaagcactttattccctctccctctcactgatcacaaatggaatcacctccctgggcagcgagacgcagttgctctgggaagatgccacagtgaccagggccatggccggtccctctggggagatgggacacggctcctggcagcacccaggagccccccaggctgcctgcctgcgtgcagaggcaggagaggaccgtggagcgtttccgggactgcattttagacggagtgaaatgtacatgaatttggcttttgctagagtctgtgtatggttttttaaggtcctttttccctttctgtttgtaaggtaagagcttctgttcgtgtgcagggaaagcagctcacagacgccgttaaaaccagcttcatctttccttcaggatcatccttttgtacttgatgctggaagctcttggagaaaaagcttaaacatttcaccagaaatcttaattgagcagcagtcatatcgccacagctttgtgagtacacagctaacagatgcgtcgagacctgagatgtgctcgtttttattcctcctctcccagattggctccagcagaaaagtccctcgtgcacaggcagctcttgtgccggcactacttgaaaacatggctactttctaagctacaaaccattagaaaataactcaaaaagatggcagaggcaaatccacagaaggggggctgccctccacacacacacgcccgtcacccacaccttgagcacacaccatgaagatcaccagcttggatggccgtcacctcagacatcactccagggagcacccgcaggagctgggccccctcacgcctgccttcctgggccagcttcctgcttgcagtcactcgcatagcacagaggtggggcttcgggcagggagcggagattcctcataggtgagtccaaatgacctccagcctctcgaaggcatcaagacaaattgaaagaaagcaataactcaccaaagctcaacgctgcccctgcctcgacctccatgggtctcttcgtgttcctcgtttcaccccagaaagtggaggtttcctcttggcattttcggaggaaacttgtaggacacccaaggcgactaagagacagcctccttggcaagggcaggcaccactttgtagcaacttgggcaccagcttttctggacagcctggcttcttactggcattgtccaactcatcccttctcgaagcatgtctttgccatgggctgtgtccttccagggaaattgtggtctcgggcctgggtgagacaatgaagtgacttccaaccgacagttgctagaattcacagggcagaaaaggggttgaccttctccccttctggctttccacccggcctgctgcttgctgtcgccactcatgtctcctccacatgcggtccacacatcagtaagggcctggagatgtgtaaagacacagcaaggggcaagcagactcttggccacgtgtttccagtggctggaccacgccgacacctgggatcttgagatacccaggaagggaggctgtctggccagcctctccctgcctccacttgctccacgtccagctcctcaccttccctcttttttaaagtcacatttccatgtttcaacattagtttgcattcacctttacaaaggcctttctttagatctgtgcagcctttgcgtgc

SEQ ID NO: 11077 - DNA, 6000 bp, Homo sapiens
atagattaaacctgttctgtattggaaggatattggttacttttattttttcactcctacagatgatactgtaatgaatattcttatatataaatttataggataacttcttaaaggtagagtaactaggtctaagattaaatacactgaatttttatggaagggaccccatttccctcctaaaaggggaaaaaaaggtagtgccaatttatgttctcaaccatgcacaatattgcctatttaatctgtcggtatgatataaaatgagtgtcttactgtttcatttgcatttctttaagaatgaggttcagctcctttatacatattcatagttgacccttgaaagacacaggtttgaactgcttgggtttcactttatatacagattttttcaatataattgaccctcggtatattggtgggttccacatctgcaaccaaaagcagataaaaaatacaatatttggccaggcgtggtggttcacacctgtaatcccagcactttgggaggctgaggcaggaggatcgcctgagcccaggagtttgagactagccttggcaacatagtgagaccccatctctacaaagaatgaaaaaaaaatacatgtgttgacgtgcgcctaggctgaggtgggaggattgcttgagcctggtaggtccgtgattgctccatgatggtgccactgcactccagcctgggtgacagtgagactctgtctcaaaagaaaaggtgggggtggggaggaaaggaaatcattgaggagctaagctctgaggacgcagaggcataagaatgatataatggacttttgggactcggggaagggtaggaggggggtgagggataaaagactacacatgggttatcgtatacacagcttgggtgatggatgcgccagagtctcagaagtcaccactaaagaacttacccatgtagccaaacaccatctgtccctcaaaactagtgaaataatagtaaaataaaatctattaaaaaaaaaaaaaggaaatcacagtttttgcaggataccaaacctaagtacagggaaggctttttgtatccaccggttcctcagtgctgacagcggaacttcagtatgcctggatttgggtggggttgccgtgggggagtagtcctggaactaatttcctgcagataatagagatgactgtattggctagggtttcttttcctgtgaattggctgttcaggtccttttccatttttaaattgttttctctactgctttctgtgagctagctgtctctttctgtgagctagctgtcatattgcagtatagcagttgctttatgaaaggtgggttcaaagtaacaagagcacaggaggaggtcagcactagacccgagtcttgaaaggttgggtgagaaggagtctttaaggttttatgagctatgctaacaacttttgactcctaggtcaaagagccactttaaaggagaggaattacaattgtgttttaaaaattatggtaagctgggcatggtggtgtgcacatgtagtctcagctactggaaatgttaaggcaggaggatcgcttgagcccagaagttcgaatccagcctcggccacatagcaagtctcccatctctaagagaaaaaaaagaaaagaaaggaaaaattaggatcactttgtggaggactgcaaaggagctgctggaagcagggttaccagttccgcgatttcagtaaagcacagaagtcactggggcctaagcagaggcagtggtgataggagtaaaagggagtagaaggatgtttcacaggtggagtagatggggttttttatgactggatgtgttagtgagggaggaatgaaagagcattctgaacttaggcaactgggtgaaagctgatcccattaatgtcccataatctaggaaagagaagcatggaaggatgaggagagatgtgtttggattagctatgctgagtgtgaaaaacctttgggactcccagataaggatgtccaggaaacatttgaaagttctgtttcagagcacaagtgaatcaagatttggaaacattgggacatatagcatcagtggtagctcaagtcatgggagctacacatctgtttttttttcttttgagacaggatctcactctgtcacccaggctggagtgcagttacgtgatcatggctcactgcatcctcgacctcctgggctcaatccgcccacctcagcctcccaaataactgggactacagacgcacaccaccatgcccagctgaatttttatatttgttgtagggagggggtttcaccatgttgcccaggctggtcttgaacttacgggctcaagtgatctgtctacctcagccgcccaaagtgctgggattataggtgtgagccaccatgcccagctcacatctgcatataacagtgatgctcacacagatggctgttaaatcctagagtactttttgaatcctcaaaagactatgttcagcatactgcttatttgaaaaagttttatttagagattggttgtctgtaagggcagtagttcctagtctaacctttttgaaaatctgataaaagttgtagactttcttcatcagaaacatttgtctgtactcacagctcagttttaggtaagttgaagagcccctgaaaccatctattagtaacctacttaatgaagtagtgagagcagttttctgggtttttttcacacttgaaaagtgagggcagttttcctgtgatatgtaggctctgtcttaatattttagcccttaactttttttatttttctgagacacggagtcttgctctgttgcccaggctgcagtgcagtggtgtgatctcggctcactgcaacctccggcccctcggttcaagtgattctcctgcctcagccttccaagtagctgagatcacaggcgtgtactgccacacctggctaatttttatagtttagtagagatgggatttcatcatgttggccaggctgggctggtcttgaactcctgacctcaaatgatctgcctgcctcagcctcccaaagtgctgggattacaggcatgagccactgtgcctggccttagcccttaatcttaaggagatttctttgaaaaatgtgtagtctttaaatattcttggctgggccaggtgtgatagtgtgtgcctgtaatcccagctacttgggaggctgaggcacgaaaatcgcttaaacccaggaggtggagagcggagatcgtggcactgcactccagcctgggcgacagagtgagactctgtctcaaaaaaaataaatattcttgataaacatttactcattttctaggcatggtgatctcataatttggggggtgagagatcttttgaacagattttttttttccattttatgaaatgcttacagataagccccatgctttggtgaaaatcactttctagcccttcactttttttaactggaaaaaatgatttttatttctaacttattctacagtatacaaacataccaaaaaaaaacaatacgaaatcaatgaatgcaaaatcaatcaaaatcaatacaaaaacaattatacaagtaatttctaacttattctaaaatcttcctaatatgtaaagtaccccccagaaagtaagacaagacaataatagagggaaggtacatacatccagcctttcactggttgaggaaacttataaatgacacctcttaccaaatggaagtagaaaaacccaccacaaatgtattttctgttaaatagaccctactgagaatctaacaaacatatgggagatacagcttgtgtgcatagaattgttttagcattgaaatactgatttcctttattctgctgcttattccaggtaaatttatgaaattgaaaaattatgcaaactgcatgactgcatttgtaaatacaaaatcagcagtttttaagcgtttacttatgcatgtataaacttggttaagttatagaattgaagattttgcatggtgtcttcagcagtacaataaccaagtttaaatctcttacccaccctaattgcaaaacactttcattttaattggggttacctcttgaaggattatgttaaagattgtttttaaaacctagagctagataggaggcattcattattagatggtgttcacccatgtgtgtgtgtaacttagtggtaaagttgaaggtaaatactttttaacatgtcttttgaattcaatatacttataataggcaagcttaaaactttctcttttcttccagataaagcttcaccaagaaggttgcccaggaaacgggcacagaagagatcagtgggatctgatgagtaaatgttcctttgtgcaacaattcggtctttacttaacctgccctaatatttttcggcctgatgggaattagtgcagagaagccatgtcaccatagaaggcaactcctacttgtgtgtggactgagcaatcagagtctgtggcgataatattgctgaaaatgcactgcattcatttttctaaagtaacaaatttggtttttttttaaaccattaaaatctatgtgtgtgcgtgtgtatgtatgtgagcagttggtcttaccagaatcattgttgaactacctgaaacaagtctttagaatactaaatataatgctgttgtctcttcctttttgacattttctgattttttcccccaaaactcagttaatatttacccactatgattattgatgtcctgccttgaacagttttaaagaaaacaatttttggaatagctcaaatttcaattgatggcacaaatcagcattttgttgttgttactgtattacaattagtattctaaaggcagaagcagaagtagctgctttttagcaatagaattgtttcagtattttgctgctgtttaatgcgcatcttcagaaaacttcccagtggcttcaaggaatttggggatctctctggcaacaaattgtgaaacatgaaatttctgctgactttaatatatgaaacctaatcctacccccttttttaacaaaaagaaactagtacatttgtgaaaattgtgttgtgttgtccattgttgctctagttctgacccagaggtagctctggagtgattttagacctactcactcagttgtgtgtaggtttttttgttttgttttgagagagaatttttctctccttaatagaagcatcctttttaaagagaagttgccttggtccacacactaagcagaaaaccaagttatcaggacagagatatttcccagttactcctaatcaatgaagaaagtgagttggatatttttaaagcagttaactaattttttcttacctaatcttttgggagttttgcttgttgatataacctttttagttaacctgaaagattccaaaaattgttcttaagtgcttgagactggaaccaaaattaaattgtacttcataaaatcctcttatagagttactcttgccctagattgtaaattaagtttggcattattgtcagactggatggagggtgaagtaaaatagtatgaacaattaagaggctctccccctcttgtctttaagccatattctcctacatgtattttataagaaaatgttaagtcaaattttagtggctctttaattcctgacctcttcattctccttttcagtataacctcccctatgctcatgcccacacagacaaaaaaacaaaacgaaatacacacagaaaaaagtctttccaaactgtttaagtatttaaacatctgagccaaagcagatagaagttattgtataattgttaatcactttgcaaataggggctatcaaattacctatattggcattgctggattataaactctatatctgtaatataaagtgtttgagtttttaattgggctgttatgatcagtagttgattttgagaaagctctatgagctctaagtaactgcatggttttttgtttaatgtaatataggagacccttcacattcccaaggaatatattccaaaacatttttgtgaat

SEQ ID NO: 11078 - DNA, 6000 bp, Homo sapiens
atcttatccttaactggatagaatccaaattgtcgcttcttcaccaggctggattccttcaaagccaactagttttgtaatagaatgatgctttgagatattggtcaaaagacatattaacccaaaggacagcagtgtagtaagtaaaagatccctgaaaaattctcttcagaagattcataaagttgtcatttaaccacctgttcaagtcacataagagttcataaacaacactatgcttttcttccttggcccagtggggcattcatttctctttccagatcagtaaagactattcatgtttcccccaatgtcttattatgacaaatttcaaacataaagcaaggttgaaagaattttacagtgaacagctgggtcacctaccacgtagattccactgttaatagtttactgtttttgctttctcacaaatctctccacctgtgcatccatttattcatcttgtttttggtgcatttcagagtaaattgcaaacatgactactccttgccatataacttgcgtttgcaggctggggaacctgtgatagcccacctaggttgacagtggagatcaaagagaagtcagtggctctttctgtgggtggtttcgctccccaatcccttcctccccacgaattttaatgttgactctttaatgacagtagtgtctagcctgtgcacttgagttcctagaaagtagaaaagggaatttttacaaacccaattctctttaaaaacttcagtctttgagactgaaaagactcctacaggtagcatagttggaagttgttgttttttaagtcccatagagacataagctctatagcctacgtgcacatttccagatttccagatatcagatttacttaaagcaaaactgtatctttaatgatgtaagaaacatagagaatacagatggtctctgctttcagatacaaaatattcctaaaaatgtcaccgaccatcaccattgtctctacctgtagggagttagaggcagaaattgtagcacaggaagttagtgaggaaggaggtaaaagtttttagctggcaaatggatggtattatcaaaaccagagattgccttactggaatttacaaaacaactattactgcatgcctttatcgcatgcaattttcaagcttaagaaatgtgacccagcagcgtaataataagcctggatatgatggcattcgattaaggtttgttttgcctccatttctatgtctattgtatttacatttatgttttaattgatattttggtcatgtgttttccccaaagagattttgtgaaggcttccattttctaaaattaaaaaaatgatatatttgatatattgtaaacaaaagaaatcctccttaatgtactcagaaatgagatcttgttagtgcactaaaacttcacttaaaaatatttatccgtaagtaccataagcaaaccaaaggtattattgcagagacttggaggaaaggacctcagtttgggaagagccaatatcaggaactaattcgcagatcggaatgtggcctgaatagaggagagggagagagtattaaggcaaatatgcagcaggtgatatagaaacaacatctgaaggagaaagcctcttgatgacccatctgagagggtcaaagtcagtgtatttatcttggtcaactcaaactcaacacaagagatagtccagaagggaaatgaaatagaggaaagaagcagagattatatattttttatgttatcatctgattttgcaatatgtaggctctctgaattttttttcactggagaaaattaagtgctcttgtccccgcaggaaacttaggataagagtgtgatcagcctagccttaaagattcagtttctggagcttccatgacagtgataaagacctgtcggatccatgtgttacctcaatgattaaggcttgcttctttctcaagggtcaggcaaacttcatcctactgtaagtttagcctcatatgcagggaaattgtttaatggagccacttatctacctgtagggggtgagtacaaacaagtgctcaaatcattatcactattttccatgttgtcactcatgcaaccctgtacaaattttccatgggctggtaaatcttagtacttatcatctgcaaggctattttgtaagcagagaatctactgtgattattacactaatacttaaatcaatacttcatgcttgtagttctcactccaagatatttaggtgaaagttggcattttatggaggatggtggggggaaggtataattgagtagaaaaggatgggagaagaacatctctttataaccgttgcatttggaaagagacatttaaaggaaaatctaccaaaatggtgactttaaggacaaggaaagatagctccactagatcccctctgtttacgcatgctattgtttcagcccatgatgttttgtttactttggaaggaaatattttaccccctctgagataattaatttttgtcagcttcactgtttgtaagggaaactgagaaactgttaattgaaatacagagtgagtcagtgtttccagtaatttttggcagcattctaatttgtgtcaatcgcagcctaattattagattttttggaagcaaaaacatattttatttttctcttactgaatttgttcttcctttttttttttgaaatatgtgctgtctgacaaaggtcatatgatttatgtcaaagtgaggtgaaatacccatacgcttgaaacaccagaaggcttattgcatcatgtttagctcttcactgccgctcaatatttagaaggctcttttcctacttcctaccccagccccgaccggaaaatgtgattcttgcaaagaccttttagctaggatgaagtcgaggtatatggcccatcactaatgacatcactgaagtaaatttcccagaagccatcagggagaattcatttggaaatccaattgaatgtcacttgcaaagggcaggctcctgaaagaggtgaccagtcatgcattcctgagttgtttgttataaaagcattaagcactgcgaactcatttactcctaacgcgaacacactacattattccacaggaattctgttccaaatgatcgttaatgtagaggacgggagctgctgattgtgggcagggttaataaaattcatcagatcaatggccagtataatgggcttgttaatggtttttaatagaggttggatcttcctggcttcagcagagtgaaggctgggagagaggggcaggtggctgtgccaggagacagctccatctcctgcctgctgaggtggcctctggatgaagagagcatccctgttggtcactgagcatcagcagggctccaaggtggccttgactgggaacgcaggcaccagctgtgggctggggagggagccccagggacaaccatactccagcagctggcatgccacagcctcttgcagaccacaggccagggttcatctaagcacctgaagccatggatatcccaggcccttgcttgcaccccaccctgggcccaccgatgagatgaaagacaacagtcacactgataatagtgacaaccccagcaaatgctcactgaagctctccagggccaaagactaagcatattacacgcactcacgtcaatccccatagcagcatcactagaggtatgtactatttattgtccccattttataactggggaagctgaagttcagagagatttggtcactagcccagggttagattagaaactgtgtgcctttagatgccatgctcttttattagacggagagacacagaagctgcagcctaaaatcagactgaagaaatatgcaaggtgcgacgggggcctgggagtctttccatttgtttctccaaccagtcagtatgttcaggaccaaccttgagcaaattatgtaaaagctgtagcttgtctgcaatgctgttcctctaggcatcgttagtaaaattcagggtgcccagggcccttgagatgcccaggtgctctgggccaccccactgtggccttaactggggcaccctgagaggtcctcttcacccagtgctgccctgtacttacagcttggtccttctcaccctgctcctgcctcaccaaaacttgacccatttctggtcatctgtgggtcattatgatatccgactgccgtagccagatcagctcggatgggaggaagctactgcttcctggggatgcctcctgagcacaagtcttttgtgaatgacagcaaagactgcccagagccagcacccagagttccagctgcactgctgggcatgggaacgcaatgacattcccgagctccagagactgccctaactgaggggccaacaccgctgccctggggctcaggaacaagatggggcgggagcttgcaggtggagactgtgggtgaaagaggcagccacgagctgaggaaattggcaagcaggagtgaaggaggaatgatagctggaactacaaaaaacgcaaaatactagcactactagatgtttccagtaagctcagagggtggcagaaggacttcataaatgttatcaataaatgaaaacacatggcacacatactccagtgacctttcccaggtcagcttctataacccaagatgggagcaggctgcagcagtctttgcatctgaaaacgccatcattcctaaagttatttccttgattatgtcattttaaaaactctactgttaagggtttggaggatgtaagaaaacagatggttataaggagggggtgatgcagggaaggagggggaggacataggggtttcagagggaggctcacgcataccccacacacttaccaccctcagcaggactgagctcagttacaccatgctaaatgcaacaagaaacgcagaactgggtggaacgtgttctccggccccccagagcgtacgaatatacaccataagtgctagactacatggcacaggatataaatgcagtcgagttgactgagagaaattagcaagaggaaaattcagagacagcatcatggaagattgcactggctgcaaagaacatagaggatttgaatcccagggagagaaggcacagtccacacagggagaggaagcagggacaggaggctggaagtgcgagcgagcatgctgagcacaacggagggtgaaggagacagcctcggtctaacaggggggttgtgtgtgtgtatgtgtgcacaaatgtatgaatgtgtgtgagagtgcaagagtatggatgtgtgcatgtgcatgtgtgtgcacaaatgtgtgtgagaatatgccgaagtgtatatgtgttagtgtgcgtgtttgtgcacaaatgtgtgaatatctgtgagagtatgcatgaacatgtgtgtgtgagtgcatggatgtgcatgactatatatgcttgagtgcgagtgtgcatgtttgtgcatgaatgtgtgaatgtttatgagagtatgcatgagtgtgtgtgcgtgtgtgtgtgtgtgtgttttaggagagggccaggcacggtgacttacgccaagccgccaagccagcactttgggaggccaaggcgggcagatcacttgaggtcaggaattagccgggcttggtagcacatgcctgtaatcccagctactcaggaggctgaggcaggagaattgcttgaacccgggaggcagaggctgcagtgagccaagatcgtggcactgcactccagcctgggtgagtgacagagcaagactgcatctccaccccccacccccgccaaaaaaaagtagggagaggggagcagtgggcaataagcaggaccagagagagggtgagacacattgcaaagtccttggtagccagacagaggagtttggactaatgtggtaggtaagagggagccacggtaggtccttgggcatctagggagcatgacctggaaagcttcatctagcagtgtgtaagaggtagactggaaggggaacagagaattatgggcactgtaggcaccctggacaccctg

SEQ ID NO: 11079 - DNA, 6000 bp, Homo sapiens
aaaaactagaacccctctccaaactagaagaatgttagtataaatatttaacataaataaatgaataatatcagaaatatatgctgacatacttaaaacaaaaattagatatgtgaaaaggaaggttttcttagaaatgacaaatatccttagaattagggaagaaggaaagaaataagaaaggaagggaaagaggaaggaaagaataagaaaaaaatgaagcagggaagaaggaaggaaaggagagaaggagggaaggagggaggaaggaagaaggaaagaaggaaggaaggaagggaaggaaggtaggcaggtgatctcaggaatttggaagaaaattgatacaggtgaaattcacagtaatgccaagatacaaaaggaagaataatgagagggaaattttataggaaactgatgttgaaagttggtttcaatgtttgcgtaacagatgaaatagtctggagggtaagagaatggacacaacagccagactttctgggtggttggattcctgactccgtagcttactagcaagttacttaacctctctgtaaactggcataataatagtacctaccatagaagtttgctatgagaagtaaaagtgttattgtatgtaaagtgcttagaatagtgttcagcacgtatttagtgttaaataggccttattacaaggagtctctgaaaagggggtgaggggcagagtagaagaatgattacaaagaaagagataaccaccatctttatttgaggatatatttagtaaattaaattatatggaaaattattttggaatattggttggaatggcatatggattagtctggagagacgagatttttacatttttgaatgttcctgttcataaaaatgttatgtctctttatttagttcgacttcaataccttacaataaagctttacaattttctgcgtaacgatcttctacatcttttattagatttattcctaggttttatatccttttgtggctgttacattcttttattgccattgtgaattgtatctctttttataatatctttttttttgttttgggctggtaattaaaatgcagtcagtctttgaatatcacttttccatctgtcaaatttgccaaactcacattagttaagtaatttatgtacagattttttttgttttcttatgtagacaatcatatcatctgttaataatcatagttttacttgttttctaattgcttcacatttctttcttgtgttattgtgctagttaggccttccagtgaatagatgtagcaaacacctcttttatgtatctgattgtaacaggaagattcaccttcggaatgtttgttgtaggttttacagatgctgtttattaaatacagggaattttattttattcattgtttctagggaatgctatccctttacatttctttttggaatgcatacagtaacaatattttttgactgatggctgactgcctccaactttttaattaaattatatttgattattttgaatgaatttgatttttaattgctttatttcaatcatgaatattaatcatgacgtctcagaggtggtcatagaaataataatggtaatgataattatgacagatgaccttcattgattgattttctgttatatgcaaagtatggtggatggtttcattttgtttcatgatttattcctaatttttttcaatgatctccaagtgagactcaacaaagtaaaatacatttactctaagtccctggtagtaggtgaagttgtcttgatatgaattcagcatggtataattttgtaacttgtgctggttaaagaatgcaacactttctcacttgataattatgacatcctttatgcactacagatatcaattttgtttactattctatctgaaagcatataacacctcagcccataagcactcctgattttttttttgtgtattctcctagagattatacttgtcacaattgttctttcttcttttccatagccattgtcctcaatatatgattttgcagttttagctgggcattcctggcaaaatagttgctgaaagaaatggcatcgaaactggaaagtagactagaaagcagacatgtgtaaggaaaaaagtaagacgtgttttcagtatggcaatctaggacataagttaatgcattgtgtagataacaaaaaatgcaccattttgctcagcgatagaagacaaaataatagagatggagtgttccactagtgttctagatggacttccaagcccatgaccagatgatgtcagcctgataactacagtgaccagattgaccccatttgtcatagagatggtaaggcaaaacaggagtctgacttgaacttggagaaaaaaggatttgccagaaccatgaagatgtaaggttctgagcagatataacatcacatatgggttcattgtttagaccagagtgtgtgtgaaaaaccagccaagctccagtgaatgaccactgccatttagtcaagtcttctgttttaagacttaggctcattcagtgtgtttgcttgacagctacccctgattcatcagaatccctgctgacattgtgagctttgagggaaggtctgactcttaaaggtgcttcctctccctggacccatcctgggcttcctctaggaagactagagacaggtttcctatgatcacaacaggattgtgcactggagtcctctgaaatgtaacccagaatcagagcctgcatcctgctgagctgtcatgtgactgattattaacaacaatgttcacagtcttatgaaacaagtctgaagatagctgtttttttttttttttttggttgttgttttgttttagagagagtcttgctgtgtcatctaggctggagtgcactggcatgatcatagctcactgtaaccttgaactcctaggctcaaggaatcctcctcatcagcctcctgagtagttaggactacaaatgcgtcctccatctccagccaattttctaaaaaaaatttgtagagaggaggtctcactgttgcccatgcttgtctcaaactcctggcctcaagtaatcctctggccttggccacccaaagcactgggattacaggcgtgaagcaccacgcctggctaaagataactgttaaaggagaaatgtgtactctatcttttctgatgatccccatggctaaaacaaagcagtttaaaaataaatcttattcaaaaggaaaatgtaaaattctttttttaaaagagatggatattacaacctaagtcaaggaaatatctcaattcatattcaagtgtttaatcatagaggtgaagaaaagctgaattgttattctttctacacagagacaatttgggtctatttctaccaagtcaaaccaagtagcatgtaaagaactcaggagcactttaaataaagttaaacattaaattgcaaaaccaagtaacgttttctgacttggataattcagggtcagaaacatttcctgtgatatgtgaatcccaaagttgatcattatttatcccagggtccagagtccttcagaaatgactcagggaaaaatcttttacctagaaaggtgaaattgacactacccccacacgataacgggcttaaattttccatacttaaattcttaaagtgcagatggaagaaatctgttttttttcttttatgttataaagaatataataaaacttacctgaaagcattgtgaggatgacatgtaataaatgcgcagtaaatggtagctctgactccccaggacccgggttcctccttctgaattcttgatctgtgatatatactgccaggctcccacttctcagccagggtgttgagaggtagtttactcactctcctctcacaatacagttcaaataggtataaagagtcaaacttagaatctaaaggagatctcctcagggccataaagtaagaagggatttaaagtcaaagtgatgagtatgagctaaggccaggaaagccattaaagcacagaacaaggtgtaaatttccatggctgactctaatgctcatataaagaaaggagtctggattatgaacccaaggcattcagagagctggaaataaactacagaaagctaggagtctgaaggctttgcctcatctatgagacaaggacaagcagaactatacacattcttggaaagcagtgacagtgcttttgacttcctgggtgttagcgcaagagttaaccacaagaaactgaaagagtttggccttcactgtgcacatgtaggtatgccaaatttatgccacttattttccaaagtggttacagaatggcccataaatgctacatgatagcatgtgtgcaaatttagaaataatacaaagcattattacatatagtttgtgaatactcatataaatagtaagaatagaaaaaaatggagaaatcatattatatttatgccaggcttgtttggtttggtttggtttggtttgctgagaaaaggacaaggacccagggaaagagaaagcaacagagtgaatgaagttcaagtttacccataatattacaattcacatatttcaaagaagaaaaaaattaacaaaatttcaattaagggggaaaatcaaaaatagcaaagtaaaaaacacaaaaatactgaactctttaattataatttatctctttttaaccttttcaaaaaagactaaagacattgaagacaccacaaagcaaagcaaaatagctatatgcaagtgtctgaaccagaggacacctatgaggtcctgaggagacactcacaaggggaaggtggagaagcttacatcagccaaaaagcagaaagaactgcagaggggattgggctggatttccgaatgcttcttcaaagcctatttggcaagaagcccttctgagtcaactttgtagtttgatgacttttattaatgattagcaacttaagccctagggtggcaaagaatcctcatctctctgctccaaaaagtccaagggagtaagcttggaggaaacgctgggttcaacttgaagcccttccacagacattaagtcggtaagtcacttctcttggtattgagatgaagacctccaaaactcttttctgtatagcaatggacaatttttatatactccccaaccccaagtttcctcatatgataaaaataaaaatgaaaaatgtaaaaatccatattaacaagactgacaaaagtgagggagaagtggcaggaagctgaagctttgtatctgatcatccatatgctttgaaactagctagtggagacagtagcagctatggaagataattccaagaaataggcactcttgcgaggtgtttaaaagcaaaattttgcaggtcaaactggcttctgaacaaatatcatctctttcatttaccaactgggtgacctggaggaagagggtcagtaatatctccatctgggattgatgtagactggctggtgcagtaatttataagagtggcaataataattatttctattataccaatggctagggtggctctggtccaagaaagcatctggagaaatgctgcatcaagatccagtgagttggtgtgaaatttaaccaaactaaaatggctagggatagaagaggaaatggagagatgaggcaatgggacagtcaccagagtcagcagaagatggtaggtgggctgagggcagtgggaaggagggaatcagggagtcctcaaggccagaatggagaaggtacaactttttgtggcagctgcaacttcacagatgtgtgggaagatgctgttagaacactccctgcctttaaactaaccatctctactgaaagctgatcctcaatgtggttctctatgaacactgctttggaccagaaacttctcagagtgcaatatatagtttctgacccagataaccagcatagctttttagtggaaaataaagagagctgttaaaacaaaagggatttacttgagtaaagccaaggtgtagacaggctataagactgattggaa

SEQ ID NO: 11080 - DNA, 6000 bp, Homo sapiens
aggttgcggtgggccgagatggcgccattgcactccagcctgggcaacaagcgaaactccatctcaaaaaaaaaaaaaatttactcatgttttttaaatttagggctgaaagaatcaggattcctgaaccttggatcacacctccagatttgcaagagaaaatccacatttttgcccaaaaatgtctattcttgacggagagtctaaagcagttcacaggtaatgtgaggagaggtgtcatgaggggaaatggatttatactgagtatctgcatattgcctgatgaagaggataattttccagccagatagtgggatgcagactgaatattttcttgttttcttttcttagaaaaaatgcagtcagatatggagaaaatccaaggtaaatttatctacctactgggcttttgatgtaaagttgcttggaaaaaagaacatctgcactgaaagtgggaaacgtgggataagggtgatacccattggccagccttccctgatattttacatcttccctttggtcttaattaattttctcaattaacagcttcttgttctaatttgaagtttgttaactgtatttagtcaattcgcagtctgcattgatggaggagaaaaataagcaatccaaaaattaatcaatccagaattaatttgattgtttacttcggaaagaatgaacaaaaactaccttggatacgtttcacttgagccagtgtttatcattgtaatttactgagttcctactgcttgtgggcacaggtgccagctcgggctggaggaatccagcagcactgacaggcagcaccgccagggacatggttaggagcgggcagtcaggagtcaggctgcctgggttctgggcctgcctctaccacttagtaaggattcaacaagtaatttcctcatctgtaacagaacagtaatagttcttacctcctgaggtataagaattaaggttagttaccatttctaacacttctagaatagaacctgacacataataagtcctatatttatgtttattaaatcgttctaggcatttggagaagcttttccaaattaaaatttttctgctcacgagccacattcagtaaagagttggccatatattattccacccaggaatactaaaattcctgggcagtctggtggattctgaaatccttatatgtaggtaaacccttctcttaattattagaaattacaaacccccacaatctttgataattttctattttgtatatgctgggttcatatatgcattgcatctattcagatatatactttttggggcatctagcaacatagagctagcagatacatgtcctctacaagcaagacaaatggggagaaactccactcaatacagtggataataccagaagtggttagttcaggcatgactttccttgatctggctcttcttttcttgccacttaaaagtcttagtgggataatgtgtgagaaattctgtttcaactataaagtgccttataaatgaatggtcatgtttaccccagagtgtcagtgagtgtcacttgagccattcagctcttgtacacagatgacttatgcaactcaaaagttatgtatgacgtggggttggaaccgcgtttccctctgcagaatcagctgactcactggaaggtggaattcttgatcttggctcagttttatcccatattctaccagtctcaggcatgtggttatccctgtacttaagattcccaatccctctccccttaaagcttttggttggatgatagagccatacatcatatgaaaaaattagtgcatgactaacaacagaggttctggggtttctggtggagaccactgctttatgatgactaaccaaagcccccttagttatgtatttcctggaaaccctcatgacttccataactttgctcttttattctttcagaattaagagaggctcagttatactcaggtaggtgatgagagacaaaaccatattagggtaaggagtaaaaatccttgtgaacctaactactattatgaatgatttggaaattgcttagatttggattcttttggttacatgtataaagatgatacacaacaaccacaaaaatcctcagttgtttctatgtgttaacagtatctttgcctcctgaaatgtctcagagctgaagccatagggtaaaatcaatctcaggtgttaaagaaggattatagggtggaaaccgcagttccccaaaagtagaacagagctggtacactagtacactgctctgcccgcccagcttcagggtcaaaccatggtttgtgacaagcaggactgattgagctccacaatagtgctcttgagtgctagaggaagtctaggagtcttgtgtcatcccatcactgtgcctcagagcaaagtttgaaacttcccttccccctcacaaccgctttcaccctactatagagcctgggtaaatttaacattgcagaagtattcaaatctaaggtgtattcgtcccatagtcacagtcaccttctgttatgaattatcctctaaatgaagagaaggactctacatacagtggatctgcagtccttggtgtgcagtggctctgatccatatttattttcaacaagtattaaatgagtactttgcttgtatcctacactgcctaacattgtgcagggtattttagaggaacagaagagcataagtcatcctactcttggggtttacattgtctggttggaggtatacccatgacacaagaagaaggtaggcagctgttgtagacagattgttgaaccaggagccaagggttctggggttcttggttacctctatcagttgcctgtcttttgtgggagtaaaaatttgtgggcttaaatttctgagaggtaatgtttgggactcttcctcctgaacaagatgtgaggagcaaatgagagaatacatatcagtatttttatttatttatttattattttaattttttaaattttttattattcattttagaggcaggttctctgttgcccaggctggtgtgcagtggcatggtgatagcttgctgcagcctcatactcctgggctcaagtgatcctcctgcctcagcctcctgagtagctggaattacaggcatgcaccaccatgcttgcctaatttttttacttttattttttgtagagacagggtctcaaactcctgtatgcaagcaatcctcttgcctcagcttcccaaagtgctgagattacaggcatgagccacatatccagcccattatcagtgtttttgaagcaggaaaacacttgatgatagcaagatgctgtaatactaaatgccagaggagatgacatgggtcatacacagttttagatttcagaacagtaagtgtaatggcctgggcagattaagaaaaacttggaggatgtgtgttttggactggacattagaagaagatgaatagagcttcgatgtgcagagtaaagatcttatagaatggataaaagagtgatttgggctgggtgtagtggctcacacctgtagtcctaacactttggaaggctgaaatgggaagtctgcagtgagccatgattatgccactgtactacagtctgggtgacagagtgagacctcatctcaaaaaataaaaaaaagtaaaaaataattttaaaagagtgatttaaaaagtaagcatactgatacaggttcccagtcccttacccacagttctaaaatcccaaatctctgaaagccaaaacctttttcattattttgtgggaaattaattatagcatcaaaacctgaatttatgtggtactgtttagagcctttatccttcattatgtaaacattcatgaatctcacagcagatctattaatacttcattatagaatgctgcctgtctaaaacctgtaatattctgaattctatgaaacttggggcccctggaattttcagaataagggatgatgagcgtgtaagaaaacctcaattcagcgtatctgccaggcacagtggctcatgcctgaaatcccattgctttgggaagttgaggtgggaggattgcttgaggccaagagttcgagaccatcctgagcaacatagtaagacctcatctctacaaaaaattttttaaaattagggtggtagtgcacacctatggtcccagctacttgggtgtcttaggcgggagaatcacctgagcccaggagtttggggttacaatgaactatgaccacaccactgcgctccagcctaggcaacagagcaagaccctatctcttaaaatcagttcatgatggatattgtggcttcagatgtgaaagaaaagatacggggctaaaattctgtattttcagagtattctggtaaccagctaatccaagcagtaatttttgaaatgtgaagtttagaatatattctaaataaaatacgtgcaacctccagtgggaacctcttattattggggaggtagtagaaaggcgctgggtgttctaaaataggctctcctggcccacggctgactgtcttccttgtgtctctacagtggacgtgactctggacccagacacggcctaccccagcctgatcctctctgataatctgcggcaagtgcggtacagttacctccaacaggacctgcctgacaaccccgagaggttcaatctgtttccctgtgtcttgggctctccatgcttcatcgccgggagacattattgggaggtagaggtgggagataaagccaagtggaccataggtgtctgtgaagactcagtgtgcagaaaaggtggagtaacctcagccccccagaatggattctgggcagtgtctttgtggtatgggaaagaatattgggctcttacctccccaatgactgccctacccctgcggaccccgctccagcgggtggggattttcttggactatgatgctggtgaggtctccttctacaacgtgacagagaggtgtcacaccttcactttctctcatgctaccttttgtgggcctgtccggccctacttcagtctgagttactcgggagggaaaagtgcagctcctctgatcatctgccccatgagtgggatagatgggttttctggccatgttgggaatcatggtcattccatggagacctccccttgaggaggtgaattcaggccaaaagggctgttggctgtaatcctacgccaggcacaaggcatcttgttgccttgccacgtcctgtcacagctgggtatccttaccatgttccacgcccttgcagtgggagacaggatgtccatgttctctaccatccttttccttcccatgcagattgtgaaatgtaatgagatgtatcaagatatcctagaaataaaaaccagatgtccacctccagtgtttcatactttctggttttacacatcgctggagggataaagagtatggataatctttggatttggagagccgttcaagatacttccagcttcttggctcagcctggcttcctctggttcagccccacataatgattatggctatttgctgtcatttctgggctagggctcctttctaacaacctagactggaataaggccctgtcagcatggctccctttatcccagttttccgtctgggaacagtacctctgcccctgattcccaatgtgccatagttttattaactccattaaagaagcctgtatgtgttttggttagttacagttattttacaataatggtgggtaatggccccacctctgttatgagataatgttctaatcaatgtctctgcctttgtatcttttctgagggctttgtctgttctcttcattctaatgaaaggtgtattctagtgctgggtgcatatcatccaggataatattctgcccaactccatcctctgttactagatcccttaccagtcacatttgtggactggtggccagtcgtataccatccctggaaggattctgggacaatattccagggattcattgacttcttggctccttttctccatttcctttgggggaaggg

SEQ ID NO: 11081 - DNA, 6000 bp, Homo sapiens
agtgaactacgttggttaatatgttttcagggctcccagagtgttaaattctgggctatatgctctcagggatggatggaagatgaggcagaagagagaaaaggaagtagaaagaaagtatgggaggccaggccccgtggctcatgcctgtaatcccagcactttgggaggctgaggcgggcagatcatgaggtcaggagtttgagaccagcctggccaacatggtgaaaccccgtctctactaaaaatacaaaaaattagctgggcgtggtggtggggcgccggtaattcccagctactcaggaggctgaggcaagagaattgcttgaacccaggaggcagaggttgcagtgagcgagatcgcgccactgcactccagcccgggcgacagtgtgagactgtctcaaaaaataaataaataaataaaataaaaataaataaataagaataaaaaataaaaattattaaaaaaaaagaaagtatgggaactaaaatgaataagatttgtcattttccagtaatctgagtaggaactccactatctctatgaaaaaccgtcaaaaactacaaaaggagatggcattgccaaaggcacaaattgtacagaagtgagagaaggatgggatcaagcctggggatccttccagaggaaagaagttttgtgcttgatgtaaaaggaaaagaaggaagtagattgattgtggggaggatgaaattaggatactcaagtagtggttctggaaggacctctacaaatatcctgaaaaatatggccaggaatcctggcagtgacattggaatatgaaaagatgtgaaagggggaagttgtagctactggtggaaaaaggtgagtggtttgtataatgaacataattggagcccttgtctgtaccctcaaatgcctctgcctcccaaacaagtaacagattttagctatactgatgcaacttgctaggaaggttttctttaaacctttataaatcagttaaaaatgatttatagaggagacacttgtaaaacatttgaataaaagttgaacaacaaatatgacgaaagaaaagtgtgcaggccccgcacagtggcttatgcctgtaatcccagcactttgggaggctgaggcaggtggatcacctgaggtcaggagttcgagaccagcctgaccaatattgtgaaaccctgtctctactaaaaatacaaaatttagccagccatggtggtgtgcacctgtagtctcagctactcgggaggctgagacaggagaatcgcttgaatccgggaggcggaagtcgccgtcagtcgagatcacgccattgcactccagcctgggtgacaagagtgaaactccgtccccccaccaaaaaaaagaaagaaaaaaaaagaaaagtgagggtggagggagggagagcacgacgtgcgcgcaccctctccccttgtccactgctgccgcctccttcttctgccgctcctggtgctgcttgtgtgctcgtttggagcggacctggtacctcttttgtgaagcggcagctgaggagactccggcgctcgccatggccgaagaaaagcccaaggaaggagtcaagactgagaacaacgatcatattaatttgaaggtggcggggcaggatggttctgtggtgcagtttaagattaagaggcatacaccacttagtaaactaatgaaagcctattgtgaacgacagggattgtcaatgaggcagatcagattccgattcgacgggcaaccaatgaaacagacacacctgcacagttggaaatggaggatgaagatacaattgatgtgttccaacagcagacgggaggtgtctactgaaaagggaacctgcttctttactccagaactctgttctttaaagaccaagattacattctcaattagaaaactgcaatttgcttccaccacatcctgactactaccgtatagttttctctattctttcatttcccccttccccattcctttactgtacataaagtaactggtatatgtgcacaagcatattactttttttttttaaaactaaacagccaatggtatgttttgattgacatcaagtggagacggggcggaaaaatactgattctgtgaaaataccccctttctccattagtggcatgctcattcagctcttatctttatattccagtaagttattttgctctcactgttttaacaacaacaacaaaaaaacaacaacataaaaatccttgcataccttgttcaattggagaattttaatgtttttcatttatcattgtaaaaccaaggacaattttataacttttttgtacttagctgttacatgcagagcaatctgtctttaagtagggataaattactctaaaacaaaaaagaatcctagatagttttcccttcaagtcaagcgtcttgttgtttaaataaacttcttgtttaaaaaaaaaaaaagtaaaaaagaaaagttatgcaacaattaatggcccagaggcaatccttgttaacattttgatgcatcttttagctgtttttttttgttttttttttttgactgagtttgactcttgtcacccaggctgaagtgcaatggcatggcatgatcttggctcactgcaacctccgcctcccgggttcaagtgattctcctgcctcagcctcctgagtagctaggattacgggcatgcaccaccatgcctggctaattttgtatttttagtagagttggggcttctccacgctggtcaggctggtctcgaactcccaacctcaggtgataagggaaggggcactattgacatttatggttggggcagaggtgtaagatattcttcaaagcactacctacatgttgaagaattgttcctcacccagattctcaaaagtcccccaggacattcacgtagtgaaaacctgtgtttaattatctgagcctataacttaatacagttttaaaatttttttttaaatatacagtgaactttctaggaatgcaattatagttgtgtgtaaaattagggaaaattaactttgctaccaagagttgttcaacattttgttaaatcacttcattgatggcaacatgctggaggtagttgagtcaccaactcagcacctggatcagcctgtgttggtagcagtttcatccccgtggttctgtgaataggtggaagcatctgcttactccatcaggacttctagggtagtcgggccttggcactcacacattaaaatactgtttatgttattttattgcaagttacttttctttcatttcccctttacgttacagaaagggaagcattttgctttctgtttaaagttgtgtatgtaggtaggttatatcatctatgactttctctccctccttccctttctttttgtttgagatggagtcttgctctgtcacccaggctggagtgcagtggtgcgatcttggctcactgcaacctctgcctcccgggttcaagcgattctggtgtctcagctgggattacaggcgcacaccatcacaccacgctaatttttctatttttagtagagatggggtttcgccatgctggccaggccaggctggtctcaaactcctgagctcaagtgatcagtccgcctcggcctcccaaagttctgggatttcaggcgtgagcctcatctatgaatctcaatttaggacagtaaaagtgtcattacaaaatatttattgtaaaaaagggttggaggttgagaatctcaattctagtcagtctctcagtgtttggtttcttcctaccatttttccccctaggaccagccagaaagcagctttttttttgtcccccccaacaaggagcccactgtttcctctcccagcccaaactcaggcctacgaacaacaacagcacaacacacacacacacacacacacacacacacacacacacacacacacacacccctccacttcaaggtatagccaagagcttctggagccgtcaaaaaggtctgtacctgctgtctttagagcttccagtttgcccttggtcaagaaatactgtttgctaggctctgctggagtacatcaggtaatactggcttctaaaccaccctgaggttcttttctcttgtccttttactcccttcgtacttcaatttctctccttgatgtccccctccctgttttgttttttgcctccaatccgttctgcgcgttccctgcagagcaggcgagtagcaatgctgctggaccatggagctgctctagtctcccagaaatctcttctacacccaacccttcttgcgcttaggtggtcctcagtccccctcccccacctccttctgacccaggcttctttctcgccctccggtcgcagttctcctgggcatctgcctctgcctctctcctctcacccggatctagggctgccttctctttgtgcagccgtctttctccaccttcatcccagactccctgtctcagcgccagctcctctgcctttggctcgggttccctctcccccaccccagcttccagttgtttggcccgcaggtccctcggcagtgaccggcgccccccgacgagtgcgtgtgcaccagggcacctccctctcccccacctctcagccccgcgcctctccaccgcccgccccaccgcgctgtgggcggtccagggcggggctgggatccggggcggctcccggggctcgggttgtgggaggcgccctctccccggtcttcccctctcttccccccgccctgccttcccttgcaccctccttcttccctccgcccgggagctctccctggtccccggcgccgcctccttccctcccggctccccgctccccgctcccgtggctgccgccgccccggggaagaagagacaggggtggggtttgggggaagcgagagaggaggggagagaccctggccaggctggagcctggattcgaggggaggagggacgggaggaggagaaaggtggaggagaagggaggggggagcggggaggagcggccgggcctggggccttgaggcccggggagagccggggagccgggcccgcgcgccgaggtaagagccagggccccgggttagcagggctcggagagggggcgcgcggcgtggtgggggagggggcagtgggcgcagggcccagctgggggaagcggggctgggggagaggaggaaccgcggggatggaatcggggagcgctgaggcggccgatgccgggagcgtgggtaagccaggcttctgcgagccgcgggggccgggggagaggaggtggtgagaggtggagtcccgggagggttgggggccgagggaggcaggaggagggtggggacaggctttctctcctcctctccccccaccccgcgcggggctccgcccccgcctcctccgcggggcgctctcttggtccccaggctgagcccggtcggagcctgcgaggcaaccggcaagaggtcgagtagtctccgggtgcgggccgcgccggcggggctcggtccagtcctcatggccgcctctcacttagatgttgctgctgctgctactggcgccactcttcctccgccccccgggcgcgggcggggcgcagacccccaacgccacctcagaaggtgcatccttcttcgacgacctccggccctccttcgctccacttccctttccctgcatctcctcatttctggtcctcatcactatcccatcagtcccacatatcatcccggtctggcaaccccttctgctcggcccgactttactactgctgacctccttctgtcaccccacgttactatccagcacctcttttctctgcccacattgctacactataccaccttcctgtgcattttctccgcctcaatcccctttcccagccccacattactacctcaattactcccttttcttggtcccactttgctgtccagatgatcttattagcctccctttatcctcctatcctaattcaactcgaatatcctcatttagcctttttttttaaagaaaagctccacccacatat

SEQ ID NO: 11082 - DNA, 6000 bp, Homo sapiens
attgactaagcaggtatgacacagctgagcttgaaacctgcaaaagggaaaacaatgaaatgatctgaggctcaggagctggcagcacccagtgcttctccagctgtggtagactggttaaataagaggaacatgtgaaaagcaccttctcagagcccctcactgcctctgggtaatggttcctgccctgctccaacagacatctggaggtttattatcttatttatctattttatttatgttttttttgagacagggtctctcactctgttgtccaggctggagtgcaggtgcagtggcgcagtctcggctcactgcaacctctgcctcctgggttcaaatgattctcgtgcctcaccctcccaagtaatcctcaactgggattacaagtgcccaccaccacgcccaggtaatttttgtatttttttttttttttttagtagagaggggtttcaccatgtcggccaggctggtctcgaactgctagcctcaagtgatccatccacctcagcctcacaatgtgctgggattacaggtgtgagttaccatacctgccattggaagtctattatctgaagagagtagactagaggatgtgatgggggctggcccagcacaggtgaggacctagatagtttaccagtaacaggggcatgaaatgactataactttcatgaatgctaaatactgagagccaaccccaaccccaaccccctcaaccccactcagctcccagaacttccatcttccaaaaaagagatcagaagactgctctggggaacatgaccaatccaaaaagaaataacttaaaatcctgaatcagatgtttctccgtacatggcctatccagatcaccgtagggtgaagctcaaagtcagcaagcctcacccacatactcagagcttcctttcagtgttgagaccttcttccctctgagcagatgacaaaggagtttgaaaccagcctggccaacatggtgaaaccccgtctctactaaaaacacaaaaattagctgaaatggtgactgtaatcccagctactcaggaggctgaggcaggagaatcacttgaatccgggaggcagaggttgcagtgagctgagatcgtgccatttcattccagcctgggcaacagagcaagccatcacagatttgggagcaaccaagaaagccagggacagggtatgcttggtaacctggcaagagctgacaaaggggaaaaataaaaccccacagaaagaagcagggaagtaagggaaagggactaataagagtcaagcagggccaggggtgttggctcatgcctgtaatcccagcactttgggaggccaaggtgggtggctcacgaggtcaggagatcgagaccatcctggctaacacggtgaaaccccaactctataaaaatacaaaaaattagccaggcgtggtggtacgcgcctgcagtcccagctactcgggaggctgaggcaggagaatcacttgaacctgggaggcagaggttgcagtgagatgagatcatgccactgcactccagcctgggtgacagagcgagactccatctccaaaaaaaaaaaaaaaagtcaagcacatgcaaatgtggcatgacttattgggagcagaaacattctgagaaaaattatataaaaatgaggttttagattgaaatggtctactaagtgcccaatgcaatgaatgaaaaatatatacattgaaacataacactgtgaaacttaagaatgctgaggacaaaaaatatgaaagcttctagagagagagagatctcaaagaggcaggcttcaaaatgacttcagattccttttttttttttttttttttttttttcagagacagggtcttgctctgttgtccaatacagtggcataaacaaggctcactgtaacctcaacctcccaggctcaagtgattctcccacctcagcctccccagtagttgggaccacaggggcacaccaccacgcccagctaatttttaaatttttttctagaggtgagatcttgccatattgcacaggctggtcttgaactcctgggttcaagttatcctcccaccttagcctcccaaagtgctgggattataggcatgagccactgcatcaagcccagctttcttttctttttttttttttttgagatggatttttgctcttgtcacccaggctggagtgcaatggcgtgatctcagctactgcaacctctgcctcctgggttcaagcgattctcctacctcagcttcccaagtagctgggactacaggtatgtgccaccattgctggctaatttttgtatttttagtagagacggggtttcaccacgttgaccaggctggtcatgaactcctgacctcaggtgatctgcccacctcagcctcccaaagtgctgggatgacaggcatgagccaccatgactggcccaagcccagatttcttaaaaagctagaaaaccatggaggaatgccttcagaattctgatggaaagttaatcccaacatagcagcctgctttcagcctaactggtattaaaatagaagggtagaggccgggtgcagtggctaacgcctgtaatcccagcactttgggaagccgaagcaggtggatcacctgagataaggagttcaagaccagcctggccaatgtggtggaaccccatctctattaaaaacacaaaaattagctgagcgtggtggcaggcacctataatcccagatacatgggaggctgaggcaggagaattgcttgaacctgggagatggagattgcagtgagccaagactgcgtcactgcactccagcctgggtgccaagagcgaaattccatctcaaaaaaaggtagaataaaaatctcagagaaagcaagacctcagaaaaaatattgtctttatattctttctgaggaagcttctggaggttgagtttcaccaaaaggtgggcatagacaggaaggaaaaagaaacagacaaatggttgcctaagggacacaggagagaggtgatcctgcacaccggtgtagagggcaacgaggccagtttggaacgggtttgaaaatttagggtgaaagacagtacagagtgccgtctccagagctatgcttctctctggagtgaacagatgggcccgggggaaggtaggaggcaggggaagcatcacatgtattgatgagacctacaatgatgatggtgcatggctgagcctgagcaatgggacaacgaaggcatgtgttctggctgggtgtgatggcacatgcctgtaaccccaacactttgggaagccgaggcaggtggatcacgtgagcccaggagtttgagatcagcctgggcaacatagaaaaccctgtctctacaaaaagtacaaaaaatagccgggtgtgctggttcacacctgtagtcccagctactctagagggggaggcgggaggatcatctgagcccaggcaggtcaaggctgcagtgagccatgattacgccattgaacctgggtgacagagtaagatgatgtctcaaaaagaaaaaaaaaatgtgttccttgcctggcacctctcctcactagcatcttgataagagccttctgattccctcacactgcaaggaataagaagatgaaatctaggctgggtgcgatggctcatgcctgtaatcccagcactttgggaaactgaggcggatggatcacttgagatcaggagtttgagaccagcctggccaacatggtgaaaccccgtctctactaaaaaaaatacaaaaattagccagacatggtagcacatgcctgtagtcccagctacttgagaggctgaggcaagagattagcttgaacctgggaggtgaaggttgcactgagctgatcgtgccactgcactccagcctgggcaatagagcgaaactgcctcaaaaaaaaagaaagaaatctgcctaaataagaggaattctatgaatacacacattcttgtagatgttcagagtatccctggaaggatacacaagaagctggtcttggtggtttctctgggaaagggacccaggtggtttggagaatgaggaagaagcctcgtggttcacttttttttctgttaaatctgcaccatgtgcaaaagacaaaaaagatcacctgtccccacccccacaaaaaataagtcagctattgcagtagcctaggctagcactaaggttatcgcagcaacagtggggggatttgagcaagactggagatagcagaaagccaacatgtgctcagtgccctcaaggtatttatactctagaagggggcacacgtgggaaaaatagattaaacgggggctcatcagagaaacactggactccactggactggccaagcagacaggagggaacccaccttcatgcacctgctcctttttttttttttttttttttggagatggagtcttactctgttgcccagggtggagtgcagtggcgtgatcccagctcactgcaaccttcgcctcccaggttcaagcaattctcctgcctcagcctcccgggtggctgggactacaggcattcgccaccacacctggctaattttttgtattttagtagagacagggtttcaccatgttggccaggctggtctcgagctcctgaactcaggcaatccaccctccttggcctcccaaagcgctaggattacaggcgtgagccaccgcgcccggccaccggctcctatttttatatcccactctggagctctggttcccgggcacttgctcttcacctctgactcagagcgtgaacctgacttcaccctcctacccaggtggccaagactaagcagcagattgaggagcagcgggtgcaggtgcaggtggtggagcgggcccagcaggtggcagtgcaggagcaggagatcgcccggcgggagaaggagctggaggcccgggtgcggaagccagcggaagcggagcgctacaagctggagcgcctagccgaggcagagaagtaaatgtcccctccctgaccctgcctagctcacttgccacctaggcaccccaagatggagtgctgaagccttcaccacctggactcctatggatttcaggtttcaggagcgtctgcctctgcagcactgggcctttctcctgggagtaagggctgctgggctccaccctccacttcccttctgtccacaggtcccaactaattatgcaggcggaggcagaagccgcgtctgtgcgggtgagttaagaggcagttccatgctggcttgtggagagggtgggggttgctgcttgatcggggatttcttgttcttaatgatttccgtcaatctcacaagcatccttaaccctcagatgcgtggggaagctgaggcctttgccataggggcccgagcccgagccgaggctgagcagatggccaagaaggcagaagccttccagctgtaccaagaggctgctcagctggacatgctgctagagaagctgccccaggtctggaggtcatgtgggcaccaagaaaggaggaaatagaaccagggactaaggggtggggtgtagtgaggggcttagggagaaacagcctagggggactctaaattaggggtgggaattattagtgaccaaagtgaggaaggatgatcagtggaacgaggaccttaaaacccagagtaagttgttttatgaggaatgtggtcagatcatgggcactgagtgggtgtctctctcctgccaggtggcagaggagatcagtggtcccttgacttcagccaataagatcacactggtgtccagcggcagtgggaccatgggggcagccaaagtgactggggaagtactggacattctaactcgcctgccagagagtgtggaaagactcacaggcgtgagcatctcccaggtgaggtctcaggttggagctgaggagaattgctaggttcctgtgttgtgtgacacagtatgcctagcatttaaccagcatccaggcctgggagtcattgatgtttattaatcactttctgtgtgccagacacag

SEQ ID NO: 11083 - DNA, 6000 bp, Homo sapiens; identical to SEQ ID NO: 1205

SEQ ID NO: 11084 - DNA, 6000 bp, Homo sapiens
attgcatatgtagaaaacactagggaattctgaaaaagtctctggaattaatcactgaatttgcaaaatagttcataaaatatatgtagtaagtcacttagatgaacatgaaaagacagcaaacaatactagtcatcaaagaagtgcaagttaaaaccacaatgagaaaccatcacacatcacctagaatagataaagttaaaaagacattggataagtctaaatactgtcaagaatatggaaaaaataggaatgtctgatattgctggtaggaatgcaaaaaatgtggcagccaatttgtaaagtggtatggcagtttcttatacagttacccatctattaccacatggcccagcaattccacaaatatgtatttatccaaaagaaataaaaatgtaaggccacacttgtaagcagttatttatagtggcttcattaataacaaaccctaactggaggaatccacatgtctatcaactggaggcagagaaaccaatgaataagctgggattccagcaatactcagcagctgctcagcaacaaaaatgaatgaatggcatcatctcacacatcgttatgctaaaggagagaccaaacgaaggactacataacatacgactgcacgtccattacattctagaaatttcagtattgcagtgacagaaaacagagtggtggttgagtgaagggaaggggtgagggtgggaggcaaggattaaatagaaaggggcagaaagaaagtttttagggaaaagaaacggttctctacagcgccacaactcagaggtaactgggtggtgggaactaaggggagaggagggtgtgagggaagaggacagagagaagggctggggaagcaggaggtgaggacaaggagcaggagaaaggactctaaagcagtggaggagcctagcaggggattctttgcattctgggtttctctactgggcagtgtggtagttacatgactataaataattaccaatattcgccaaaaaagcgcagctaaaactggtgaattttattacacataaatgccctaataagcaaaaaaaaaaaaaaaggggggggggaggggaggcaaaaataaagacatttttagataatcaaagccataaaattaatttcctaggggtcctgtactacatttaattttaaaggaagtgcttcagggtgaaggaaaatgatactagatggtgacccagatatacagaaaggaacaattaacaacagaaatgatgcacatacacatgtcacattcacactcattttcttaatttcctgaagacatatggctacttgtttaaaacaaaaagtattgcactgtatcactgagtctataatataggttgatgtaatatatacaacaataatagcacaatggtaggttacaagaaactacactgttagaagtgtcctttattttgctggatgcagcttaatataacctgaacttcactgtgaaaagtcaaggaatcgggtttccattctttgctattgtgtaaagaaatatagccaaaagccactaggagaattaaaaccataaactaaaaaatgtttatttgacacataagaaagtagtaaaggaggaacagaaacaaaaagatatgagacaaattgaaaacgtatagcaaaatggtagaccaaaacccaaccattgcaagtgaagaaatgacatgacctgagtcacattagcaggactgctgagcactgtggggagaacagatatgggcaggaggtgagggacagtgttagtgccacaattcaggagtgacagggtggcggggactaaggggagcgggggtgtgagggatgagaggggcagacagaagggctggagaggcaggaggtgaggaaaaggagcaggagaaagaattctaaagcagtggaagagcctggcagagggttctttgcattcggtatttaatacattttgttggacttcctaaaaactaattggctccttatgattaaaaaaaaaaagagttacaaaaataccaagtgttcagataaaatacgcacactgcttggatgtgcagagttcaggaaaacaggcagtgcttcagcgtcggtgaagagcattgggactgcatggagcactcgcaactttgaggtgatgactacaggctcccggttgcaatagacagtaacaaaccctgcttctttatattcaggagatgttctggactcacacagggaaactcagggtggggaatgaagataattttaaatgcaacaacccagagttacagatccacagtctgggaaagtaaaacttaggagctttgagagtttaattgtaatgctgttttgacacaggtcttttacaaattggaattctaatcattcagggattaccaatattgtgctacctactgtattaacaaacaaaaaggaaactggtctctatgagaatccctatgcggtgccttcagagaaaacttcaccaggtttaaagagaaaacccctgtctctacacctccattcccagggcgagctcactctctggcatcaagttccccgtgctcagtttccctacacaagagtccaagaggagaggtaaggagtgggaggcagggagtccagttcagggacagggattccaggacgagaagtgaaggggaaggggctgggcgcagcctgggggtctctccctggtttccacagacagatccttgtccaggactcaggcagacagtgtgacaaagaggcttggtgtaggagaagagggatcaggacgaagtcccaggtcccggacggggctctcagggtctcaggctccgagggccgcgtctgcaatggggaggcgcagcgttggggattccccactcccctgagtttcacttcttctcccaacttgtgtcgggtccttcttccaggatactcgtgacgcgtccccacttcccactcccattgggtattggatatctagagaagccaatcagcgtcgccgcggtcccagttctaaagtccccacgcacccacccggactcagagtctcctcagacgccgagatgctggtcatggcgccccgaaccgtcctcctgctgctctcggcggccctggccctgaccgagacctgggccggtgagtgcgggtcgggagggaaatggcctctgccgggaggagcgaggggaccgcaggcgggggcgcaggacctgaggagccgcgccgggaggagggtcgggcgggtctcagcccctcctcacccccaggctcccactccatgaggtatttctacacctccgtgtcccggcccggccgcggggagccccgcttcatctcagtgggctacgtggacgacacccagttcgtgaggttcgacagcgacgccgcgagtccgagagaggagccgcgggcgccgtggatagagcaggaggggccggagtattgggaccggaacacacagatctacaaggcccaggcacagactgaccgagagagcctgcggaacctgcgcggctactacaaccagagcgaggccggtgagtgaccccggcccggggcgcaggtcacgactccccatcccccacgtacggcccgggtcgccccgagtctccgggtccgagatccgcctccctgaggccgcgggacccgcccagaccctcgaccggcgagagccccaggcgcgtttacccggtttcattttcagttgaggccaaaatccccgcgggttggtcggggcggggcggggctcgggggactgggctgaccgcggggccggggccagggtctcacaccctccagagcatgtacggctgcgacgtggggccggacgggcgcctcctccgcgggcatgaccagtacgcctacgacggcaaggattacatcgccctgaacgaggacctgcgctcctggaccgccgcggacacggcggctcagatcacccagcgcaagtgggaggcggcccgtgaggcggagcagcggagagcctacctggagggcgagtgcgtggagtggctccgcagatacctggagaacgggaaggacaagctggagcgcgctggtaccaggggcagtggggagccttccccatctcctataggtcgccggggatggcctcccacgagaagaggaggaaaatgggatcagcgctagaatgtcgccctccgttgaatggagaatggcatgagttttcctgagtttcctctgagggccccctcttctctctagacaattaaggaatgacgtctctgaggaaatggaggggaagacagtccctagaatactgatcaggggtcccctttgacccctgcagcagccttgggaaccgtgacttttcctctcaggccttgttctctgcctcacactcagtgtgtttggggctctgattccagcacttctgagtcactttacctccactcagatcaggagcagaagtccctgttccccgctcagagactcgaactttccaatgaataggagattatcccaggtgcctgcgtccaggctggtgtctgggttctgtgccccttccccaccccaggtgtcctgtccattctcaggctggtcacatgggtggtcctagggtgtcccatgaaagatgcaaagcgcctgaattttctgactcttcccatcagaccccccaaagacacacgtgacccaccaccccatctctgaccatgaggccaccctgaggtgctgggccctgggtttctaccctgcggagatcacactgacctggcagcgggatggcgaggaccaaactcaggacactgagcttgtggagaccagaccagcaggagatagaaccttccagaagtgggcagctgtggtggtgccttctggagaagagcagagatacacatgccatgtacagcatgaggggctgccgaagcccctcaccctgagatggggtaaggagggggatgaggggtcatatctcttctcagggaaagcaggagcccttcagcagggtcagggcccctcatcttcccctcctttcccagagccgtcttcccagtccaccgtccccatcgtgggcattgttgctggcctggctgtcctagcagttgtggtcatcggagctgtggtcgctgctgtgatgtgtaggaggaagagttcaggtagggaaggggtgaggggtggggtctgggttttcttgtcccactgggggtttcaagccccaggtagaagtgttccctgcctcattactgggaagcagcatgcacacaggggctaacgcagcctgggaccctgtgtgccagcacttactcttttgtgcagcacatgtgacaatgaaggatggatgtatcaccttgatggttgtggtgttggggtcctgattccagcattcatgagtcaggggaaggtccctgctaaggacagaccttaggagggcagttggtccaggacccacacttgctttcctcgtgtttcctgatcctgccctgggtctgtagtcatacttctggaaattccttttgggtccaagactaggaggttcctctaagatctcatggccctgcttcctcccagtgccctcacaggacattttcttcccacaggtggaaaaggagggagctactctcaggctgcgtgtaagtggtgggggtgggagtgtggaggagctcacccaccccataattcctcctgtcccacgtctcctgcgggctctgaccaggtcctgtttttgttctactccaggcagcgacagtgcccagggctctgatgtgtctctcacagcttgaaaaggtgagattcttggggtctagagtgggtggggtggcgggtctgggggtgggtggggcagaggggaaaggcctgggtaatggggattctttgattgggatgtttcgcgtgtgtggtgggctgtttagagtgtcatcgcttaccatgactaaccagaatttgttcatgactgttgttttctgtagcctgagacagctgtcttgtgagggactgagatgcaggatttcttcacgcctcccctttgtgacttcaagagcctctggcatctctttctgcaaaggcacctgaatgtgtctgcgtccctgttag

SEQ ID NO: 11085 - DNA, 6000 bp, Homo sapiens
aattaacattatttgttctatttttaaagtgttcccaagtttatttactcgtagctgtgtatttagtaaatgtttattgatgtgatcatatctgaggtataataattataaaaaagaaatatttattaagcacctactccatgccagatactgagcagcatgctgggaatgcaaagatgaacaagacctgaccaccatgctgactttcaaaccctgtgatttggtaatgggagaaagacaagtaccagtcaatacaggtgtggtcattctaggatagaaatcactagaggtggggctgggtgtggtggctcatgcttgtaatcccagcactttgggaggccgaggtgggcggatcacgaggtcaggagattgagaccatcctggctaagatggtgaaaccccgtgtctactaaaaatacaaaaaattagcctgtagtcccagctacttgggaggctgaggcaggagaatggcatgaacccgggaggcggagcttgcagtgagccgagatcacgccactgcactccatcctgggcaaaagagcaagactccgtctggaaaaaaaaaaaaaatcactagagggtaccatgaaagctcataagaggggacatttcatccacattggcgctgaatctgggatgtgcccctggaagaagggtttcctgagagttttaaaggacacgtagaaattagccaggaggacagtgtgggggttgacttgtgtctgaggaccctgcatttcttcagagtggatgtaagaaggatttggggagtgatgtggaactgcaggggctacagggccaggtggggcccctgctaaggggctcttagcttttatcctgtggataggtgggggcctttggagaattaagcagggaagtaatatgattaggaagatgattctagtggcaaagtagagaatgggttgcagaggggcagggccagaggcaagagaaccaaggaagaagcttatgcagttgatcaagtaagatattcggatgtcatgaagaaagcagacttgagaaagaatgaagtggaatagatgagttgtgacctcctggacattggagagaggtaggagtcaaagaggtttgtggctaggatggctgtgggtgggtgatgttactgttcactggatggagactgcaaaagcaggggctttctggtcagggaagatgatgaattcagcgttggacatgttgattctgttgttgttgttgttatggagcttcactcttgttgcccaggctggagtgcaatagtggtgtgatcttggctcactgtaatctctgcctcctgggttcaagcgattctcctgcctcagcctcctgagtagctgggattacaggcatgctccaccacgcctggctaattttgtatttttagtagagacagggcttctttcatgttaggctggtcttgaattcccgacctcaggtgatccacccactttggctcccaaagtgctgggattacaggcgtaagccaccatgcccagttgacatgttgattgttgatttcaaagtaccttctggatctcctggcaccatctctcactggctgaactccaaccagggagcccgctgatgcagtccattcagattctccctggatctcagggagcacagcagggagggatggaaagtggatttggagggacaaacagattatatctagcagattaatacatgttataaaaaagatacacaaaataaggattgaaataccattagcaggccaggcacagtggttcacacctgtaatcccagcactttgggaggccaaggcgggcagatcacgaggtcaggagatcaagaccattcgggctaacacagtgaagcgccatctctactaaaaatacaaaaaattagccaggcatggtggcaggcacctgtagtctcagctactcgggaggctgaggcaggagaatggggtgaacccgggaggcggagcttgcagtgagccgagatcgcccactgctattagcagcaaaaggattgtaaggattgttggtggctttgcattgcatagtgttattagagtcagattctcctccatacttaggtattttttgagggcctgtactttaccctcaatggacatgagacatagttcttgcttttggagagttttgtgagggttataatacatcatggttaaatagttcccttttttttttttttttttttttttttgagacagagttttgccctgtcacccaggctagagtgcattggcgtgatctccactcactgcaacctccgtttcctgggtttaagctattgtcctgcctcagcccccctaatagctaggactacaggcacgtgccaccatgtccggctatttttttgtatttttggtagagacagggttttgccatgttgttcaggctggtgtcaaactcctggcttcaagcaatccacctgcgttgggtgtcggcctcccaaagtgctgggattacaggcgtgagccaccatgcccagccatggttaaatagttctgatagtggttatctctgtgtagggaatctgagtgactggaggaccgggaagggaagttttttttttttttttttttgagacagagtctcgctctacccaggctggagtgcagtggcgcaatctcggctcactgcaagctccgccccctgggttcatgccattctcctccctcagtctcccaagttgctgggactacaggcgtccgccaccacgcctggctaatttttctatttttttagtagagacggggtttcaccgtgttagccaggatggtctcgatctcctgacctcgtgatccacctgcctcggcctcccaaagtgctgggattacaggcgtgagccaccgtgccccgccaagattttttttttgacttaattttcctttgttcgtttggatttgtatcatgactgtattatctattcaaaaatataaattgaagttttaaaaagcaatcttagtgatcatataattaagtaccaaagtgaacggtatggaccagaggtagtggtggactgttgacctgtgggctgaatctggccctcagaagggttttatttcaccgacatggggcctagcattttctttcatggagtgatcaacaagtcataaaggcagatttattggaggccatggaggctcagaggtgactgaggctttgctgtttggtgcctgggaggaaaacttgtgtgacggggcaatcaggaagcctcatttatggccagttagatttgggtgactggtgaggcatgagaatggaagggaccagcaggcagcttggaagtcagaatctggtgcaggtgagcagccagggggagatgcacacttggcggttgtcagcatggagatgcattgggcagggataaggtggaaatccagcaagataggaatttgggccatgtgaatgctggagacccccctgccacttcccctgctcaggcctattctatgtgaatagacaagttctgtgaacaagaaagagggaaacgcagaagggcaaagacagctttgaggaacatggagcagggatgagaaaaatcagaggagccactaaaggagaaagggaagcactaggcgaaaagcggggcggagagccagcaggtgagcagctctgtgactgcccctcctggatggcctgtaatctagggccagaagagttttattttcaggttcaaagagaaaggacccatttccccatcttaaccctcttttttatttttttgagatggagttttgctcttcttgcccaggctggagtgcaatggcgcgatcttggctcactgcaacctttgcctcccaggttcaagcgattctcctgcctcagcctcctgagtatctgggacacagggatgcgccaccatgcccgactaattttgtatttttagtagagacggggtttctccatgttggtcaggctggtcttgaactcctgacctcaggtgatctgcccgccttggcctcccaaagtgctgagattacaggcgtgagccaccatgcccagcctcccatcttaaccctcttaacccttcagtgtttacatgatatccagcttttgcctcatcctgcctcccacagatgtccagaccaagatagaacctgtctctccatgttcttccgtcaactctgaggcctccctgctctcagccgactcctccagccaggtgagcaccaccttccttccttcctccaggttttccagtgagttcctcctgacctagaggtatgagagctttcccttcttcagctccttctcctcgacactcttcctgactaatgtatctctggaatgccccacataggcttttataggagaggaggtcctggaagtgaagacagagtccctgtccccttcaggatgcctcctgtgggatgtcccagccccctcacttggagctgtccagatcagcatgggcccatcccttgatggctcctcaggtaatggagtctcctgacacttggaatccctagtgagaggcctttggtcctgacatttcttgttcttttctctcaccttccttcaggcaaagccctgcccacccggaagccgccactgcagcccaaacctgtagtgctaaccactgtcccaatgccatccagagctgtgcctcccagcaccacagtccttctgcagtccctcgtccagccacccccaggtactgaagaaggagaaaagggccgggcatggtggctcacgccggtaatcccagcactttgggaggctgaggcgggcgaatcacctgaggtcagaagtttaagaccagcctggccaacgtggtgaaaccttgtctctactaaaaatacaaaaattagcgtggagtggtggcaggcgcctgtaatcccagctcctcgggaggctgaggcaggagaatcacttgaacccaggaggcggaggttgcagtgagccgagatcatgccactgcactccagcctgggcgacaaagcgagactttgtctcaaaaaaaaaaaaaagaaaaaagaaaaaccaaaaaataaaaataaaaattaattaattaattaaaaaaaaaaggccaggcacagtggctcacgcctgtaatcccagcactttggcaggccaaggcaggcggatcacaaggtcaggagatcgagaccatcctgactaacacagtgaaaccccgtctctactaaaaatacaaaaaaattagccaggcgtggtggcgtgcgtctgtagttccagctgctggggaggctgaggcaggagaatggcgtgaacccgggaggcggagcttgcagtgagccgagatcgcaccactgcactccagcctggtcgacagagcaagactgcatctcaaaaaagaaaaaaaggagaaaaggaggcgggctgcattgaccctgtcagagagcttgcagccattgaggctgcccaatccttgggtgctcttgtgtgggtgtggacacaaggaccccacccagcgcacagccctctgacctctgctcacttgccccagtgtccccagttgtcctcatccagggtgctattcgagtccagcctgaagggccggctccctctctaccacggcctgagaggaagagcatcgttcccgctcctatgcctggaaactcctgcccgcctgaagtggatgtaagtgttggggaggagagaagtagggcgagtgatgggaagggaagagggaagtcttgccatagagagaactgtgggatgaggagggagtcgatacctaggagaaaaaagtgaggaaacggacccattagatcattctgagggtcagaatggactcctgtttctatatgaatatcaactccaggtagttttagggtcctttaggtttgctgtcactgcagatggagaaatggggttggtctccataaattaaaggcaaggaagtcgtactgtactatacgactacggtcatggccatagttggggagggaggctgcctcctaggggaaaatcaggtaaactgtataagcagtataacaaggttaaactttgaaccctacaaatgtgggctgacaggaagaaa

SEQ ID NO: 11086 - DNA, 6000 bp, Homo sapiens
tgcctcccaggttcaagcgattctcctgcctcagcctcccaagtagctgggattacatgcatgcatcaccacacccagctagttttgtatttttagtacagacagggtttctccatgttggtcgggctagtctcgaactcccgacctcaggtgatccactgcctcggcctcccaaagtgctgggattacaggcgtgagccaccacacccagtctattttttaatgggtatacggtttcagtttggggaaaaagaagttctggagatggatggtgctgatgggtgatggttttacaatgatgtgagtatacttaatgccacaaaactgtacatttttaaatggttaaaatggcaattttatgttatgtatattttatcacaaaaaaaagaaaaaaaaatatcaagggccttaccttgacctgctaaggtttgacatgcctggtcccctgctaccacttttagctcctctcctgtcctctccccagctccttgtgcactagccatgctggcctccttattgctcacacgtgcttcagggcctctgcaggtgccagaccttctccctggggggttcttccacccagagcacaactccctccttcacttccttcagtctctaattgaatggtgacttttccaggaggacttcttcggccactattgaaactaggccccggacatcctctaatcctttcccctgccttattacctgacatatatatttgtatgtatgtatcagctatcttacaaactagaatataagctacataacattagggacttctcttttatttaccactgcatccctagggcccagaacaagcctgcgcccataatgttgaataaatatttgttgagcaattcaagtagctcaggtgacattacagatcacacatggtgacctataacacaggcaagcacatagtaccatggagccatggatttttttctaaggaataggatggaggggacaaagctggaggctgttataatagtccaggtaagtaaagaggtggtaggaaatgtgataaaatggtataaaactacacacacacattgaaccaatgtgaatttcctggttttgatactgtgctataattacataggatgcaaccactgggggaagctgggtgaagggccttgctatactatctttgcaatttcctatgaatctataagaatttcaaaattaaaagtttttataaagtgggggagggggtgatagggatggagaggagaagagtcagcaggacttagtgactggcttgatacaaggggttgggatatgactcccaggttttggtcttgggtgacatgatgaatggggggaggagcactaactgaacagtggaaggagcaggccagtttaggcatgagataaagaccaactggggttgggggatgtctttagccaatcttcaggccacaaaatcccttattacctggactgccagggagtaataacaccatcatcagggcccccaatcagcaccaggtggcccacacgcagaaagttcttccgccatactgtaggatgggaagaagagaggctgagtcagccacaggggtcaggccaggttggagagggagacatagggagtcaaagaagcagaaaaagcaacacaggtaggagcctgaattctcacctgtggcattgggatggtctctttccccattgatcagggccaggaagctgctggcattgaggtacaagtcatcgtggtggggatctgggtacaaacagcagttagaaaaagaagcagaaaagggaggcaagactggtggtgaaaagcccaataaggaagctgcagcaatagtcaaggtggatagtaataaaatagtagtgataatgtaggccaggtgcggtggctcacacctgtaatcccagcactttgggaggtagaggcaggtggatcacttgaagtcgggagtttgagaccagcctggctaacatggcgaaaccctgtctctactaaaaatacaaaagttagccaggcgtggtggtgcatgcctgtaatcccagttactcggggcgctggaatcacttgaacccaggaggtggaggttacagtgagccgagactgcaccactgcactccatcctgggagacacagtgagactccatctcaaaataataatagtagtgataacaaccgtaaacatagtaacaagtacttttttttttttagatgaaatctcactccgtcacccaggctgaagtgcagtggcaggatctccgctcactgcaacatctgcctcccgggttcaagcaattctcctgactcagcatcctgagtagctgggattacaagcgtgtgcccacattcagctaaattttttttgtatttttagtagagatggggtttcaccatgttggccaggctggtctcgaacccgacctcaggtgatgcgcccacctccccctgccaagatattgggattacaggtgtgagccaccacacctggcaatagcaagtacttctatctagtatctactatatgagccaggtactattcaaagtacattgcattcatttatttatttaatccttacaaccacctggtgaagtacatgctataatattttacagataaggaaaactgagtaacagaatggttaagtaacttgcccaaaggcacccaatagggtcaagattcaaacccaagtattctggccccatggtctggtctagaggttggcaaactgtgaccaaaggaccaaatccagcctgctacttgtttttgtaaatgaagttttactggaacacaggcacattcattcacatatggtacatggctgctttcacactacaacagcagaattgaggagttgtgaaacagactatatgtcctacaaagtcaaaaatatttactctctggccctttatagacaaggtttgctgactcccacatcagactaaaccttctaaggcaataaggtgacacacttaaaacattctgggccaggtgcaatggttcacacctgtaatcccagcactttgggaggccgaggcgagtggatcacctgaggtcaggagttcgagaccagcctggccaacatggcgaaactccatctctacttaaaatacaaaacttagccgggcatgatggcgcctgcctgtaatcccagctactagggggactgaggcaggaggatcacttgaacctgggaggcggaggttgcagtgagccaagatggtgcactgcactccagcctgggcaacagaacaagactccgtctcaaaaaaaaaaaaaattctgaacagagcctgttcaaataactcaataaatgtaagttatctttattgtcatcactgctattggttgtagcagaggtggaagcaactgacctgatccatggaagccccagttcagcatccccactcaccatgccagtagttgcagatggagaattcctggccccaggggctatagcagatccgatagaggttagaccgcatggaggtggggaacagccacttcaagtagtccgtgtctggcaagcgaatggcaatgctaagtgaccataaacctctgttcccccaaaactcagggcattctatggagtctagtgcccactcacctccatactgtcccatctgtggagaggagagggagatgaaagaatccacgttgtgatcatccatgacagaaagcagagcccggcacacaaggccccctgtaagcagaacaccacattgggcaggcacttaaggacagcaaagccagcagcaccccccacccccaccacacacacacacacacacacacacacacacacagagacacacacagacacacactgtacacaaaggagactgaggcttacagaaggcaggcacaccctgtgccaaaaggtcacacatcatataagtgactgagcccgaattagatgctgggcctcctgcctctagttctaggatgtttttacctgccccattagcccttatgtccaagaaccatgggtaacaggaagcaaaagggcagcagtgtagggagcctccctcccattcaagacagagatgagacccaggtgctgagggaagtcagaaaggaagggctcaggtaccagggttgtgcctggagcaatgtggttcagaaaaagggacgctaggaagtgtccctcagataaggatcaagcctcagatagggcttaggagttaggggcaggggagtcgcctaccctgcgagtagcagatgagatgcaccccttgaggggcctttgccatgatggggaccacagcctctcggaacccttgcacctgttcccacaggggtcgcaagctctctctcccatcgaagagatcgagcactgtcaccacagtcccggggtgtgtctgtgggaagggggcaatgcagccaccggggataggctaagaagctcccacacgccaccccctggcccgcgtccacaggtctattgtaccctgctagaaccagggatcccgtcccccaactctcccccacgccagcaccagctccctgaggaactgggcaggcccagaggggtggctttcagttccccgctctccctcccctgccacagtagacgcctctaacgccctgcacccaggtgtcccctgccagacctcattgatgtattccagcaggtggcggaagctgtacgagctgtcgaagagcccatgcaccacgatgaccggcttgtaggacgcgcggtggggcgcgggggctgcaagcagcagcagcggcaggaaaggcaacagaagcaggacccacgccgcggggagccgctgcccgcagagccccagcatgctcccgcctgagaaaggggtgataagggcatgtgagggagatggcaacaccctcctccctcggaacagacgcccggcaatcaagccacctcctctcgctcccacaccaggtccgtgtcacaaaatagcctacttttaacttactccagccctctccctacaaacacacccccccaccacgttgacgcaccaacgcgcacccgaagtcccgcctccaactcagcgttcgggggacttgttctctaggtccaggatcttcctaatgcatcgcctcagccatgaacaacgcggagttctttaatacccgtgagcagcagcccaggccccttgaagagtgcagactcccacctggcctgggtccgtaggcctcgctccacccgctgtttacttatcccaagtctggaacccacggtggcggggggaagggtgaggaaagagagcgcaggggaatgacggatgggagggggaagggcgggctgcttggggtcgcgcaaatccgtcacgtccggggctttctctggcaaccgcgcgagcgttccccgcaacacagacccaggacaggaggggcaatggaatattccattgcgccctaggtgctggggaggaaacaggcggagcgatccatttaggccagtggggagaggaaaaagcagcaaacatattctgggaatggaaagaaggcctctccaggcttcgttgcccccagcgacccaaaagtccgatttccccgccttgattctccccacttcccaatacaggcgtctggctccgcagcagaacacgaagtttgcattccccaaggggcggccagggggcggaccagggaaaggtagtcctctgcattttgccgtgtgctgggtgagtggcagggtggcctggagggctgatgccagcccgggcgtgcccctcaacacccaccccaccccaccctccagtccgccccaggtcagcgacttacaactcttcattctgaagtgcgtgtagtgcccttgtctccagagacgcagagagtcctcgaggccccttgagctaagtgcagcctggcccagtttctcctgccctactctactcccctccctataagcgacccaccctcaaggggcggagggcgcgtagggatgcgctgactcatgcccgcgtaatttcgaccagtctttcaacctgaacgacccccagaatctggctgtctgagttatctgtgggtggctccctaccgaaacccccaggcg

SEQ ID NO: 11087 - DNA, 6000 bp, Homo sapiens
tcttccctctgagctaaaaaaaggaacagacggctgggcgcggtggctcacgcctgtaatcccaacactttgggaggctgaggcgggcagatcacctgaggtagggagttcgagaccagcctgaccaacatggagaaaccccatttctactaaaaatacaaaattagccaggcatggtggcacatgcctgtaatcccagctacctgggaggccagctacttgagaggctgaggcaggagaattgcttgaacccaggaggcatagattgcgatgagccaagatcgcaccattgcatgccagcctgggcaacaaaagtgaaactccatctcaaaaaaaaaaagaaagggaaagactccactggggctcccactaaataaccctctctcaacccgaagtcttcctttctgactggatccaactttgtcttccagaaccaggcgaggaggggccaactgcaggtgaggggtttgataaagtcagggaagcagaagatagcccccaacacatgtgactggggggatggtcaacaagaaaggaatggtgagtggtggtggctgtgctctcaattttccctgtctccgtacaggctctgtgggaggatcagggctgggaactctagccctggccctggggatcctgggaggcctggggacagccgccctgctcattggggtcatcttgtggcaaaggcggcaacgccgaggagaggagaggtgagtggagaaagccagacccctcagacctagggcttccaggcagcaagcgaagaggggtcggggggtggaacgacaacgtgccgcattccccccaatctttctcctcaggaaggccccagaaaaccaggaggaagaggaggagcgtgcagaactgaatcagtcggaggaacctgaggcaggcgagagtagtactggagggccttgaggggcccacagacagatcccatccatcagctcccttttctttttcccttgaactgttctggcctcagaccaactctctcctgtataatctctctcctgtataaccccaccttgccaagctttcttctacaaccagagccccccacaatgatgattaaacacctgacacatcttgctcttgtgtgtctgtgtgtgtgtatgagacacaacctcacccctatacccttgagggccctgaaggaaagggactcacccccatacttcaccatactataccaaacatctactcaagttggggagaagatgcttctgtcgggggtgggggcgaacttgggaagagatcccatcaatatatttcaccttttttattgaatttgtattaaaggaggtagtgagggggcggaagcacttaagagtcagaatccatattagactctggggagtgaaaaattaaattaaatcagtaagatggggagtgggggaagagtcagagggaactttgcccacctttgaagatcaaatcaagaaatcagggaaagcaaagacttaggagaggagaaagacattctctcaatccatcctccttccccagggcagagaattaaacaacgttactgagtgagcctctgagcagaaggctctcccatctatgcacagacttcactcctcctccccaggccttcctggacaatgtccagggctggccttagccaacagaaatagaggggtcaagggggtccaggagtacggaagggtcagcagggaccctcaatactgattcttctctggctggaggtgggcaggaagcagacatagctcaaatactgagcagccaaaaaaagaagaagatggcgagaaacaggaagagggaatcctgccagctggaggctgggtgaccctgtcccagatccacacctgtgggagagaggaaagctgtggaagcatatgctcctaggctgggagggggcctgaggggattcacagggctccctgatgggagctgagtgtgactcttacctgtaccccggcggaaaggctcatgggcattgaagacggtggtgaaaaagccaaagggaaaagcaccaacaccaaatgagaagtggaagcccccggtatcaccaaatggctggaatccctagggaggcagaaaaagtcagacaggaagccggcaaatctgtcaaggaagggacacaactggacaagaagactcacccctctgctctccggagctggtctctggccctgggggcggggtggagtttttaatctgaggaagtggagagagaaagttaacagggatttttctcctcccatcttccacaccgttttccaagggcagaagccttcaatcttccctaagcaacacctccagtctctcacctgggatcctggggcttctggctccctcgcccataaagcgggacaaccttctctctgctgatcccagctttacatactggacactcttgccgttctggccgtgtctccagccactggggagaaaaaaggtggtttccagtatacaagagggtcttacagctcctcagacctccccatttccctcttcatctcctgagtacgcacctgatgaagacatggccaactggatgggggagaaaaaaaaaaaaaggtcaaactagctacagaaaagagagacacagaccctagacttcgcagaatcccatctaacccctcttcccaagcaacctgctgttgcttttcagattttctgcaacctctaccatgccagccaacttagttagccttcctgcttgtctgatcttccaacacctaaagctctgtccatcctcaacacactcaaccctctcctttctcctctccccaacaaacacatacaaattttcgtgccctctcttttctgcctttcaagttaatttctaatttccttcagccacctctttctgggtctcctcttttcaaccccaaccccatcactccaaaccaaacccctttactagcacattcccccattactcactttcaagctcaataatgtccctatctttatgaccctttaacctttcaagtctgcctctccacagtgcccttataccagccccctcccagatctcatctgaatgtgatccatatttcctggttctccccgactcaactgatgcgtgcctcccttaacctttgtgtctcacttgtttccacctgcacagctaagacccctcacttctctggggtaaggtggctcgggtctcacattgtcctgccactccccgccccaccttctcttctcagcacatcacgtgcctcagctcctggttcctaagacctttctttccacagatctcgaccgttatactcccacccacacataccagcaaagtcttatgtctcctgtcgggcttcacctatgggaacgtgccctccgattatctgtatgactgtatgattattcgctcctagcctctccagtatataagcgagacccaccacctcccgcccccctcctcgattctcaccagtacaggtggccacacacactgaccacagcttcccgagcagtctccaaacatatattacattcgaaggtcgcgcccgccccgccccgctcgcgatttggcccttcggggcccccgtcctcctcctccgctgctgccatggccggttttgtttcgccccacgtacccttcagtccccccaaatacacatacacacgccccaacaaaccagaaaccacctcctgcccacgatcgttgggcaggcttcaaggtttcctaatcactattggtctgaatgcctgccagtcacaaagaattcaaaagaaaggattggcccaaagggtaggggcgggaaaaggttagtgcagtcctgccttcgcacaatggctattggctgatacggtctaagtcaatgtgcaatgccaagggattggtaataactcgctacacgctgtcgcctggccaaggagggctttattcgtctgagtagttgtcagtcataaccaaagccataagcaatttgctcgggactacctatagacctcgcccactataagcccctttctttccttcgcttcctcttttagagaatgtccggattgctattggactttggagcgtatggctccaaatcaactcattggctaaaacttgacggaaaatggtggttaggtaaaacgcgcctgcgcagcacgcggcgggacgggggtgggccaatcctgtgagggtttaaccttctctttttccacctcttcacccctatcttgtcgccatggtgactgctctacaattggcgaggcttgcacttcaaagtcctaggctcgcttcatccgggtccttcagctgtggactttctgctgattgggccttttccttttcccctgattggccgacatcgggaaagacggcgaagagctaggaaaagagggaaaacactagggtcgcagggttcaaaatggctccaacctcctttggtgacgtagagagcagaacttgggtctgcccctcccttttagttaagggagcagaactgggattagcccgacgtttggatagtgggaacatcgatctgcggcgctggtgttaacccaactcattcggctggacgactcagccctccccatattaggtgatttacagagcaaaactgaactaaaggcccacccctttcttaatgttgtacacagagtagaacaggattgacttcaactccgttttaaaccttcagagcaggaaagctctgggctcaacccctttgtgagtggtgcaaaagggacaaagcccgccccttttaaggagacccgcggaggctagacccgccctttcctctttataatttgcccatcagaaatagggtcttcttcccaggttggaccccggggagtttgggcttttcctacaatcactgaccctcactgtgactaaaggagcagaattaggtaacagtcctcccactaccaatcctcttcccgagggcatgtaaactaatgcagggtaaaggtgtggctagaggggggaccttgataaaagatcccatgtgactcaagagtaaggaaagatgagaagttagcagttgcgtaaagaaggactggggcagatgaggattcaggaagcttgaggtttaggaaggaagatattgagagggaaaggtggaaatgaaggagagtgaagtgatggaatgatcctagtaaagggataatgggagtggaggaagagaagagggggtggaaaactagatacatggctaccaaattaaggaggcacgcgcattccagaggaatcggcattcttcctcactttttatttttctagaaagcacccctgaagccaaatttccattggaagaaaagatgtacccatattgtatgttgtgagaaggggttgtctcagcttgggcaagtaaggagactgatacgaaggaagtaggaaagaaaaggtacagaggtaaaagagcatggaaaaggaaagggtcagggataaggccaaagagatctcttctctttaaaggccagagaaggcaggtggaggggggagctggactgctgggagatagtgagggacaaagggcaaaggaaaccagaccagaggactggagagtgagatggagtgagatggagtcctggagagaaaaagaagagaggtgaacttaatgcttgtcatatggtaggtagatgcttgataaatgtttagaattgaatgggtacgggaaaaggggtccttaagaatagttggggggaataagcagcagataaccggagttgagaaaaaaagagaccaagtaaaagtggcagttaaaagagagctgatggagaataaaggaaggaatgtgcggaaggaggaatacagcaccaggggatccagagctgaaagggagttagagaaaaaaaagatgcagctggagccagagatgggggcaaagaccgagggagagccctggggcggggctcgcaagaggacactggtagatgtggggaggagatgccagagtttctgggagacgattggcaaaacaggctgcccatcaccgccctccacttcctggccggccccggaaaccagcaggcgttggggaggggtggcgggggaatagcggcggcagcagccccagc

SEQ ID NO: 11088 - DNA, 6000 bp, Homo sapiens
cgcgccactgcactccagcctgggtgacagggcgagactccgtctcagaaaaaaaaaaaaaaaaaagagaaaaccactgccctggaatgtcagagaattaagctgcaggttccttttacagaggaagaaactgaagtcagagaaaagcagaaaagtcacttggctaaagccacacagagccagaacttagcttcccaacacctcaggttttgattctctctgagcttacatgttgtcccttcccccttgttgtgtcctttagattgacccattactctgtcttaccaacagatggggtgacacccctgatgtcagcagtttgctgtggggaagtacagtccgggaccttccaaggggcatggttgggatgtcctgagccctgggaacctctgctggatggaggggcctgtccccaggctcacaccgtgggcactggggagacccccctgcacctggctgcccgattctcccggccaaccgctgcccgccgcctccttgaggctggagccaaccccaaccagccagaccgggcagggcgcacaccccttcatgctgctgtggctgctgatgctcgggaggtctgccaggttagcacacactgaggtccctacagggaatggggcgagcttacaagtaaagctggacagaagcatcccctagagtttgacaaggaggaaattggtgtgattgggaacctgacagggaaactgcggaggatggctgaatatggattgcgagtggggttaatagtgtaaggaactcgagttggcagtccaaggtaccccaggggtcactggccctctgtctccccagcttctgctccgtagcagacaaactgcagtggacgctcgcacagaggacgggaccacacccttgatgctggctgccaggctggcggtggaagacctggttgaagaactgattgcagcccaagcagacgtgggggccagagataaatggggtatgtagaggaaggggtgatgtatgctatagagaagttgagcagatggggtgggagatagcgtgcaaaatataggtgcagcagaggggcattccctctcatcctgctgttacggcggtcaatctgagatgcggtggaagtacgggccgcgtgagtttccccccccaactcccaccctcaacaccacactggccctccgctccagcttactggggaactggcatggaacacagtgtctgtggaaaggggggggaatctcgtggggggagactgtctcccggtctcaccgaccccagaacaatgccccattgtccctcccgcgcactggtgacgtcaccagggcaacacttcctgcaggccggtggtctcctgggcaacgcttcccgcctttgagggaccagccggcccgaatagcccttcccccaaggccagaacccgtgggaaaccggaacccaggcgtctggcccccaactggggtaacaacctcccacgtcgtcccctagggaaaactgcgctgcactgggctgctgccgtgaacaacgcccgagccgcccgctcgcttctccaggccggagccgataaagatgcccaggacaacagggttagatgggacagagggcttcccacaaaacagtcaggcgcacgagagatggaaagtgcggtaacccgcaaagcctgaagggataggggccagtggtcgcgcaagtgaaggcagaaaggcccagtcctgtgggcgtggccttccctgatatcggccctggctcttctgtacaggagcagacgccgctattcctggcggcgcgggaaggagcggtggaagtagcccagctactgctggggctgggggcagcccgagagctgcgggaccaggctgggctagcgccggcggacgtcgctcaccaacgtaaccactgggatctgctgacgctgctggaaggggctgggccaccagaggcccgtcacaaagccacgccgggccgcgaggctgggcccttcccgcgcgcacggacggtgtcagtaagcgtgcccccgcatgggggcggggctctgccgcgctgccggacgctgtcagccggagcaggccctcgtgggggcggagcttgtctgcaggctcggacttggtccgtagacttggctgcgcgggggggcggggcctattctcattgccggagcctctcgggagtaggagcaggaggaggcccgacccctcgcggccgtaggttttctgcaggcatgcgcgggcctcggcccaaccctgcgataatgcgaggaagatacggagtggctgccgggcgcggaggcagggtctcaacggatgactggccctgtgattgggtggccctgggagcttgcggttctgcctccaacattccgatcccgcctccttgccttactccgtccccggagcggggatcacctcaacttgactgtggtcccccagccctccaagaaatgcccataaaccaaggaggagagggtaaaaaatagaagaatacatggtagggaggaattccaaaaatgattacccattaaaaggcaggctggaaggccttcctggttttaagatggatcccccaaaatgaagggttgtgagtttagtttctctcctaaaatgaatgtatgcccaccagagcagacatcttccacgtggagaagctgcagctctggaaagagggtttaagatgctaggatgaggcaggcccagtcctcctccagaaaataagacaggccacaggagggcagagtggagtggaaatacccctaagttggaaccaagaattgcaggcatatgggatgtaagatgttctttcctatatatggtttccaaagggtgcccctatgatccattgtccccactgcccacaaatggctgacaaatatttattgggcacctactatgtgccaggcactgtgtaggtgctgaaaagtggccaagggccacccccgctgatgactccttgcattccctcccctcacaacaaagaactccactgtggggatgaagcgcttcttctagccactgctatcgctatttaagaaccctaaatctgtcacccataataaagctgatttgaagtgttacctttttttggaggaattggggagaagaatgggaaaaaagatgggagtgactgcataatgtcagcattttgtgcttttggctcagcatttggattggatggaggatgtaagtatagtttaaaagcaagaataagtatatttaggggccctatgataatttagggtattatctgaaagcaagaatctagtagccaagggagaaaccgcacacactaggtcaggggtccccaacccttgggccacagactggtactggtccatggcctcttaggaactgggccacacagcaggaggtgagcaagcattactgcccaagctccacctcctgtcagatcagcataagcattaaattctcataggaactcgaaccctattgtgaactgtgcatgcaagggatctaagtttctcgcttcttacgggaatctaatgcctaatgatctggggtggaacagtttcatcctgaaaccagccctccgtcgccaccgaccatggaataattgtcttccacgaaactcttccctggtgccaaaaaggtaggagaccactgcactagatgatgcacacactttgtccctcatcctagggcttttacttatggccacttaggagattcctaaggccacaagtcaagtagatggagagagtatcttgaaactttgtccaccttgcagcaatatgttgctaggtttgaaacatggagtcatgaggcattttgaaagccaataatatctacagtttattaagtattcactatgcatcaagtgcttcattacattattaatacatcaaccctatgaagtaggtgctattaaaaccctatttcactcagaaattgaggcacagagatctgcccaagattgcaaggaataagcggcaggaccagatctcttcatcacatttcacattccaaatcactcagctataaactccctaacatgacaggttgccatttagaggtaccaaatggttgtctgccctgctccttccttgatgccaaccagcctgattagcattgatcaaagaccaagccagagaggtagtcctctcccttttcaatttcatttcatttctttctttttctgaaacagggtattgctctgttgcccagcctggagtgcagtggcacaaatggctcactgcagccacaacctcctgggctcaagcaatcttcctacctcagcctctcattgttccatatctatatctcttatgcccaaaataaaatttcccctgccccttgtctgcactaaactataagtttccaaaatgaacccttcccgtactctatttggtacacatcttgtctcctgaatagagtgtattttttattttattttattttggagacggagtctcgctctgtcacctaggctggagcgcagtggcacaatctcagttcaccgcaacctccgcctcccgggttcaagcaattctcctgcctcaacctcctgagtagctgggattacaggcgcatgtggccacgcccagctaattttttgtattttagtaaagatggggtttcaccatgttccccaggctggtctccaactcctgagctcaggcaatccacccgcctcagcctcccgaagtgctaggattacaggtgtgagccaccgcagccggccatctcctgaatagattttaaatacctagaggtcagggatgattattcaatacatatatattgaatacttactatgtgttggacccggtgctagggttttatgtatatatttgagagctccacatccctggatctgaatcctccacttcccactggaaccatgcccctcccagtcccggtaagtaagagggaagatcgggagggccaaatcctacaccagggtctatcttagggagggaagggacctggctggggggagggggattctgaggagtgaaaccacttcctgtgtagctagttcctgtgttgacagaaagagcagaagaggaggtggggtggagggagcagagccagggattaggggactactgaggctctggagatgagaccgccaggagtccttccccaccatgagccccctccactcctgcagctggaggagtttttcccagtctcagtgctgccctggggcgagagagactgaacaagctgtttgggtgggaagagaatggaggaagttgacagggatgggcggggcccgtgggggggctgaccaggaacccagcttcctgctcagtacccaggcatccagcccccagctcacccccaccccttccagcccccactcccctcaggaacccaaggttccagccctcctcccaaatcccagccacccctcccccaccagtttctcccctctaggggatggaggctgagagaccccaggaagaagaggatggtgagcaggtgagctgggcacggggttggggaggctgacactgggaaagaagggaggtgagaggacctggggcagaaatgtagggacacaggggccttgaaaggcttgggcaaactgaggcaggaacagagacacacagagaggaaacgggccactggcctagccccctgtccactcctcccgcttcaaccaccactgcttgactagaatggacatattttggcatcagggcccccctcaggatgaggaaggctggccccctccaaactccaccactcggccttggcgatctgctcctccatcccctcctcctccagggacccgccacacaggtacccctacccacccagggagagccccgaccctagtgcccacatcctgaccccattaccaaggcccactccattgtgggccctctccccacctcctccagactccccttgggattccccattgcaccccctctcctctgatccaaagtccctaatcacgtcaccctgtccacactcccccacggctcctgtctgccaacctctctgggtctctgagccctccacacccctctccccagccctgggaccccgctcggcctcc

SEQ ID NO: 11089 - DNA, 6000 bp, Homo sapiens
ggatggaggtgactgcaggcctgaagatggggacccagagtgggggccctccctggccctgctggtggtactgagccccccagccctagaccagcagctgtttgccctggcccgggtgctgtccctgactctgagggtaggactctgggtaaggaaggatcgtgatggcagggacatggtgtacccctatcctggggcccgggctgaagaaaagctaggaggaactcgggaccccacctatcaggagagagcagcccctcaaacgcagcccctgggcaaggagaccgactccctcagtgctgggtaagaagctaggtggagggaagggccagacaccagtttttttaagagggcagagggaggaaagggagccagggaccaatacagaggtctctgaggtgcctcctctacaggtttgtggtggtcatgggtgtggatttgtcccgctgtggccctgaccacccggcatcccgctgtccctgggaccctgggcttctactccgcttccttgctgcgatggctgcagtgggagccctggagcccctgctgcctggaccactgctggctgtccaccctcatgcagggaccggtaggtgaccccttgccactttctctgacctctgttcccaggccagctctcatgctagcaacaggcaatggaggctgaatcaaacaggacagctgagactgaaaatgttctttgtggggacttactttccctaaccccgctttctctaactgaatctcccactggcccatttgttctacagtctccttccttatttccctaagcacattatcctaacctctgtcatagccctccaacaaagggatggtttatcttctctaccagactgagaatacctaatagtctttgtatcagacaattcatagtacatgaaagaataataggctgggcgcagtggctcatgcctataatcccagcacgttgggagaccaaggcaggtggatcacgaggtcaggagattgagaccatcctggctaatgcggtgaaaccctgtctctactaaaaataaaaaaattagccggctgtggtggcgggtgcttgtagtctcagctactcaggaggctgaggcaggagaatggcgtgaacctgggaggtggagcttgcagtgagccgagatcgcgccactgcactccagcctgggcgacagagggagactccatctcaaaaaaaaaaaaagaaaaataactgctatatcgtactttgtgccttactctaagcattttacattgttacctcatttaatcctcccccacaaccccatgaggcacgtactgctggttgagtatcccttatctgaaatgcttgggaacaaaagtgtttcagatttcggatttattttggaatatttgcattatacttactggttcagcatccctaatacaacatccaaatgctacaatgagcatttcctttgagcgttatgttggtactctaaaagtttcagactttggaacatttcagatttgggattggggttatggatactcagcctttttttgtgtgtttgttttctgagacagtcttactctgtcagccacactggagtacagtgacgccatctcagctcactgcaacctctgcctcctgggtttaagcaattctcttgcttcagactactgagtagctggaattacaatggcatgccaccatgccctgataattttttttgtttttgttttgttttgtttgagacagagtcttgccttgtcgcccaggccggagtgcagtggcgcgatctcggctcactgcaagctccacctcccaagttcacgccattctcctgcctcagcctcccaagtagctgggactacaggtgcccgccaccacacctggctaattttttgtatttttagtagagacagggtttcaccatgttagccaggatggtctcgatctcctgacctcatgatccacccgcctcagcctcccaaagtgctgagattataggagtaagccactacacccagccactaatttttatatttttagtagagagggggttttgccatgttggccaggctggtctcgaactcctggcctcatatgatccacctgcctcagcttcccaaagtgctgggattacaggcatgagccactgtgcccaacctcaatctatattatcatccccattttgcagataaggaaaccgaggcaaagaccggctactaaacttgtccaaaggtctcccaatagtaatcagtctcaccaggagtggcctctctttgtgactctgtctctcccaccagcaccccctgccaaccagcttccctggcctgtgctgtgctccccagtggccggggtgattctcctggccctaggggctcttctcgtcctccagctcatccggcgtcgacgccgagagcatggagctctctggctgccccctggtttcactcgacggcctcggactcagtcagctccccaccgacgccggcccccactaggcgaggacagcattggtctcaagtgagaatgaggagaaacccaggctcaggaaggggagtctctcctatggcgatatttacaatcagaaaagataagaaatactattgcagaagtcaaagataggggaaggagagaggggtgggaagcctgctggaaattttggagaccctgatggtcataattccgtgtaacctctacccacccattcctttccagggcactgaagccaaaggcagaagttgatgaggatggagttgtgatgtgctcaggccctgaggagggagaggaggtgggccaggtgaaagggctggggcaagaatggtctggaggtgatggaagggatgaaagggcaaatcaaccttcactgatccttgctgttacccaaaggctgaagaaacaggcccaccctccacgtgccagctctggtctctgagtggtggctgtggggcgctccctcaggcagccatgctaactcctccccaggaatctgagatggaagcccctgacctggacacccgtggacctggtatgtgagtcaacccagaccaagaaaaaaaaaaaaagtcctttgaccctattagaatcagagagtcctttaatatcagaactagaggaaataattttagactgagtgccttagaacaatgattctcaaagtgtggtcctcagacagcaaaatcagcatcacctgggaatttgtcagaaatgcaaattattgggctccactacagagctactgactcaggaatttaaaatgttaggcaatctgttttaacaagcccttcaggtgaatctgatccagactcgtttgagaaaaccactgctaggccgggcgtggtggctcacgcctgtaatcccagcactttgggaggccaaggcgggtggatcacaaggtcaggagatcgagaccatcctggctaacacagtgaaaccccgtctctactaaaaatacaaaaaattagccgggcgtggtggcgggagcctgtagtcccagctgctctggaggctaaggcaggagaatggcgtgaacctgggaggaggagcttgcagtgagccgagatcgcgccactgcactccagcctgggtgacagggcgagactccgtctcagaaaaaaaaaaaaaaaaaagagaaaaccactgccctggaatgtcagagaattaagctgcaggttccttttacagaggaagaaactgaagtcagagaaaagcagaaaagtcacttggctaaagccacacagagccagaacttagcttcccaacacctcaggttttgattctctctgagcttacatgttgtcccttcccccttgttgtgtcctttagattgacccattactctgtcttaccaacagatggggtgacacccctgatgtcagcagtttgctgtggggaagtacagtccgggaccttccaaggggcatggttgggatgtcctgagccctgggaacctctgctggatggaggggcctgtccccaggctcacaccgtgggcactggggagacccccctgcacctggctgcccgattctcccggccaaccgctgcccgccgcctccttgaggctggagccaaccccaaccagccagaccgggcagggcgcacaccccttcatgctgctgtggctgctgatgctcgggaggtctgccaggttagcacacactgaggtccctacagggaatggggcgagcttacaagtaaagctggacagaagcatcccctagagtttgacaaggaggaaattggtgtgattgggaacctgacagggaaactgcggaggatggctgaatatggattgcgagtggggttaatagtgtaaggaactcgagttggcagtccaaggtaccccaggggtcactggccctctgtctccccagcttctgctccgtagcagacaaactgcagtggacgctcgcacagaggacgggaccacacccttgatgctggctgccaggctggcggtggaagacctggttgaagaactgattgcagcccaagcagacgtgggggccagagataaatggggtatgtagaggaaggggtgatgtatgctatagagaagttgagcagatggggtgggagatagcgtgcaaaatataggtgcagcagaggggcattccctctcatcctgctgttacggcggtcaatctgagatgcggtggaagtacgggccgcgtgagtttccccccccaactcccaccctcaacaccacactggccctccgctccagcttactggggaactggcatggaacacagtgtctgtggaaaggggggggaatctcgtggggggagactgtctcccggtctcaccgaccccagaacaatgccccattgtccctcccgcgcactggtgacgtcaccagggcaacacttcctgcaggccggtggtctcctgggcaacgcttcccgcctttgagggaccagccggcccgaatagcccttcccccaaggccagaacccgtgggaaaccggaacccaggcgtctggcccccaactggggtaacaacctcccacgtcgtcccctagggaaaactgcgctgcactgggctgctgccgtgaacaacgcccgagccgcccgctcgcttctccaggccggagccgataaagatgcccaggacaacagggttagatgggacagagggcttcccacaaaacagtcaggcgcacgagagatggaaagtgcggtaacccgcaaagcctgaagggataggggccagtggtcgcgcaagtgaaggcagaaaggcccagtcctgtgggcgtggccttccctgatatcggccctggctcttctgtacaggagcagacgccgctattcctggcggcgcgggaaggagcggtggaagtagcccagctactgctggggctgggggcagcccgagagctgcgggaccaggctgggctagcgccggcggacgtcgctcaccaacgtaaccactgggatctgctgacgctgctggaaggggctgggccaccagaggcccgtcacaaagccacgccgggccgcgaggctgggcccttcccgcgcgcacggacggtgtcagtaagcgtgcccccgcatgggggcggggctctgccgcgctgccggacgctgtcagccggagcaggccctcgtgggggcggagcttgtctgcaggctcggacttggtccgtagacttggctgcgcgggggggcggggcctattctcattgccggagcctctcgggagtaggagcaggaggaggcccgacccctcgcggccgtaggttttctgcaggcatgcgcgggcctcggcccaaccctgcgataatgcgaggaagatacggagtggctgccgggcgcggaggcagggtctcaacggatgactggccctgtgattgggtggccctgggagcttgcggttctgcctccaacattccgatcccgcctccttgccttactccgtccccggagcggggatcacctcaacttgactgtggtcccccagccctccaagaaatgcccataaaccaaggaggagagggtaaaaaatagaagaatacatggtaggg

SEQ ID NO: 11090 - DNA, 6000 bp, Homo sapiens
accaggccgtaagttactctggccccaaaggacgctcctctgagtatgctttccgacggaccgacttatcatgaatagagggtcaaagaacagggttaacttcaagttagaggctattcctctctaacaaagccgcccccaagccacgagtggtggcagtagtccagagcagaagccagccagccagtcttggggctgccatctgccccaggcgcccatcctaagcaaagtccccccagtgggcacatgggagtgggcagggaagacacagggaagggagtaaggcagcatctgggccaaggagaggccttcctgggtcaagctagggaagggcatcactagttaacacagaacgcccattatcagtgcttgggctaagagttgcccagtggcaagtttatcaaaagtctgtgtgatgagttggtccttctcaataagtgcctatatttccttctcccaagtgctgttctacttcacccagggcaccatttcctcatctctttgcaccatccccaaccccctttcttgatttaaccagcccccactgtccgggaccagagtgaaagcgaaagcgctttagagtagcttcccgttgacgcttccagctaagagtcaaagcacccgctttttccaccagcctcgcgtgcctgttcccttcacggacactctagacgacccccctcagaaaagaaatactctatgctcattgcgggttgcaagcgctggctgctacaggcgacctccctgcgctcccgttggtctctgcattcacttctccgcgcgcgcttccagggtcccctggccgctgcatctcctccacccctctgccaaccctcaagcccagacccattaccccggtgtggacttctcccgcccggggtaagtccccggttggtgctcccgcccgcagcatccctgcaaggcaccgctctcctcgccgcctggggcactggtttccaacctgggacagcgcacaacgcgcagccgacagccccgccccttcgcggcgccgccaggaggcgcctgggtgctgcggggctgctttgcgcgcggcgctaacgtgtgtagggcagatctgccccgagacaagtgacgaggcagccccgccctgaggctggggtgggaaaactggtgcaagtggaaaggcaggaggcagggagaggcgagaagggtgtgcgtgatggagaaaattgggcaccagggctgctcccgagattctcagatctgatttccacgcttgctaccaaaatagtctgggcaggccacttttggaagtaggcgttatctagtgagcaggcggccgctttcgatttcgctttcccctaaatggctgagcttctcgccagcgcaggatcagcctgttcctgggactttccgagagccccgccctcgttccctcccccagccgccagtaggggaggactcggcggtacccggagcttcaggccccaccggggcgcggagagtcccaggcccggccgggaccgggacggcgtccgagtgccaatggctagctctaggtgtcccgctccccgcgggtgccgctgcctccccggagcttctctcgcatggctggggacagtactgctacttctcgccgactgggtgctgctccggaccgcgctgccccgcatattctccctgctggtgcccaccgcgctgccactgctccgggtctgggcggtgggcctgagccgctgggccgtgctctggctgggggcctgcggggtcctcagggcaacggttggctccaagagcgaaaacgcaggtgcccagggctggctggctgctttgaagccattagctgcggcactgggcttggccctgccgggacttgccttgttccgagagctgatctcatggggagcccccgggtccgcggatagcaccaggctactgcactggggaagtcaccctaccgccttcgttgtcagttatgcagcggcactgcccgcagcagccctgtggcacaaactcgggagcctctgggtgcccggcggtcagggcggctctggaaaccctgtgcgtcggcttctaggctgcctgggctcggagacgcgccgcctctcgctgttcctggtcctggtggtcctctcctctcttggtaaggggaacgcagggcaagaggggaggacacaaggggactgggacaggaatcaaaggtaattgtcagtaaggtagagtagcgtgggttctgggaaatgtggagcaggagaaggactcctagcgtgggtcttggaacaccacttcggtgtagaagaaacggcactggactggcgggggccagaggttctgggctccattgctgaccgggtcttgattctttgggccacgccggaagcggggaaatcctttgctctggggccgaagggcggggcatcctcatctctaacaggaggcttttctacttcatgatctccagccttcctaataaaatcctgaaagttctggtagagcaaccacagggtagtgagttccagggcagcctatttaggttcgggattgagacgtcagtgtttcctttctgctgatgccctccaggataatggtgagggggaggaggcgtggtggggccagtctgactggaactgacctacttagacttaatatttgtgcgtgacctctcttctctttctccaggggagatggccattccattctttacgggccgcctcactgactggattctacaagatggctcagccgataccttcactcgaaacttaactctcatgtccattctcaccatagccaggtctgggggctgaaaatggggcaccctgcaaatgagggagttggaagttggggctgctgtccgaaatgcacttatatggggatacctgggaccttcagtctgttccctgaacacaccctgatcccctttttttccgggttctttatagtgcagtgctggagttcgtgggtgacgggatctataacaacaccatgggccacgtgcacagccacttgcagggagaggtgtttggggctgtcctgcgccaggagacggagtttttccaacagaaccagacaggtttctcctgaaactctttcattatacgccatgtactgttcatatcctcatacatctgctttgatctcccccctccccgctctctctctctcacacacacatacacacattgttccttctcattcttgatataccctctccctgtctctctctctctgtctctgtctctctctctctctctctcacacacacacacacacaattgtttttctcattcttgatatacctcaggagcaaaatattgtcctccttaccttaagaaaaacctagagttttcatctagcattttcttataaatctattcctatgtatccttagatagaaaccatagaatttcaaacctggaaattttgagctcatagagaccaactgcctcatctgacagagaaggaaactgaggccaagaccctaaatgctgaaactgcacagttacatatggctagagacacacttggggttagaaccctggtctcttgagtgctccacagacttcggcatgctttctagcagcactagaagctgtacagttacatatggctagagatagacctggggttagaaccctagtcccagtgagtgctccacagactttggcatgcttcctagcagcaccctcctcctccatctctgttatgtgaccagtttaagctcttcctgcctgtgtgtatagcatgggacatacaggttctctagggaacagaaagctttcaggaaaatggaaattcacatgtgcattaatgactttataattaaaatgaaggtcaggcctttcctctttaacactcatcttccctgcactgagatttgcagacctctggagaaccctaaccttgtttcctgcagcctccttagaaccccatgttgacacccctgaccctggcatcctggctcattgttagttcgtctcatcacttggaacctgtctgattcacctcactctcttctccccaaccctgcaggtaacatcatgtctcgggtaacagaggacacgtccaccctgagtgattctctgagtgagaatctgagcttatttctgtggtacctggtgcgaggcctatgtctcttggggatcatgctctggggatcagtgtccctcaccatggtcaccctgatcaccctgcctctgcttttccttctgcccaagaaggtgggaaaatggtaccaggtatgttcatggagttggcccgctctacacagaccctcatctcccagacttggcagactcagttcctctcacattgctttcagtccagctttcctggcacccttactgattctccatcttcatggaacaccctgtccctgtggtccatgttcccaggttgctcaacattaacctccatactctctgggtcttcttttctagcttctccccacaatctgtctttaagaatttgatccccaacccgttctgagtcattttcctcttcctcgtatttctttagcatccaaggggcatagctgtgtctctttctcttttctccttttcctctgtctcttctcacctttaatttccaaataggtaactcaggtattagtgtccctgatggtttgccaacccgtgtgacatctcttgtccatgtatccacagttgctggaagtgcaggtgcgggaatctctggcaaagtccagccaggtggccattgaggctctgtcggccatgcctacagttcgaagctttgccaacgaggagggcgaagcccagaagtttagggaaaagctgcaagaaataaagacactcaaccagaaggaggctgtggcctatgcagtcaactcctggaccactagtgtgagcacctgaagatgaatacccattcccttgtccttaagatgccgtgactccattcccattcctatgaccctgctcccactcctcctttactgggaaatggttggttcagtattttcgtcctagcaacctgaggctcaatgactctactcagtgtccctagccccctccctctctttaaagatgctaggtggcttcctttcagtatggtacataaaatccacccaaccatgtggattggagagatgcgtgtcttccagtcctagggccttcctttgcctctcaggggaagtgcagggcgccataaattcttgcacctgggactgcttcatgctggtaccttgtagatttgttagtgagagtgatgggaatagtggaagccagggatgagggacatctgtgatgcactggaaagagagctacgccagtgatccgaagatcctggcttgatgatgcaatttacttgtcttgtgatcatgacaacaaatttaccttctctgagactgtttcctctttatttatttatttgtttgtttgtttgtttatttttacttattattattatttttgagctggagtctcgctttgtcgcccaggctggagtgcagtggcgcgatctgggctcactgcaagctccgcctcccgggttcacgccgttctcccgcctcagcctcctgagtagctgggactacaggcacccgccaccacgcccggctaattttttttttttttttgtatttttagtagagacgaggtttctccgtgttagccaggatggtctcaatctcctgaccttgtgatccgcccacttcggcctcccaaagtgctggaattgcaggcatgagccactgcgcccgactggttgtttcctcatttttcaaaaatggagtgatataaccttctttataaggctcttcatgtattagctgacatcacatgaatgaaagccttttgtgaagagtaaaatgctccccagacaaggtgatagtggtgatggtggtgaagataactgtgacttgcatgatgtgcattgagtcagactccatggggtctctggttcattctcctgtctgcctattgagcctgccgatgtcacttaggagacagggacttgatatttccttcaggttaatgactgcggttctttgtgtcccctccagatttctctacctcagtc

SEQ ID NO: 11091 - DNA, 6000 bp, Homo sapiens
cctgatgcagcatatcgggatgaggacagtgcagcggaaaaagcttgctaagaggaaattcagaaagagccaccctcatatctggaacaggggtgtgacctcaacaaggtggcaaatgctgattctggaagttgcctctcaaaatgcctgagaagaggctaaaatgctgaaggaagagaactgttcctatgtgtgaggtcagttcctaagtgtgagggtttcgagaccagtcagtgtccctagattctctgacaagggggagaactatgaatcttcaggaacccctaagccaaggtcaggaagtctccatttccctggcttcaaactatgctcaggagctggtatagaagaaagatggggtttggacatggccccagggtatagatgcagaagataagatgagtggaccccagagccagagagtcccctgctcttcagaggtggggtctagagggtcatcagagactcactccactccacggtgacaggactatccaggctggtgtgctccacttggcaggtgtagacatctccctgctggggggtcatttccagcatcaccaggatctggaaggtccagtctccattacggatcaggttggtggacacgaccccagctgtttcctcctgtccattcaggaaccatcggacttgaatgctgcctgggtagaaatccgtcacgtggcagacaagcaggttgtggtgctgcaagggccccttcttggagggggaaacattcaccctaggctggactaggagcgtggaagaaaaataatgaaatagaatttgagattgtccttctttccttccttccttccttccttccttccttccttccttccttccttccttttttttgagacataatctcgctctttctttctttcattctttctttttgttgagatggagtgtcactctgttgccaagtctggaatgcagtggcgcaatattggctcactgcaacctccacctccgggcttcaaccaattctccttcctcagcctcccgaatagctgggattataggtgcctgccacttcacctggctaatttttgtattattagtagagacaaggtttctccatgttggtcagcctggttctctaggagcacttgaccaacgcctgacctcaagtgatccacccgctcggcctctcaaagggctgggattacgggcctgagccactgcatctgcccagattattatttcttaggcatgttcactatgtaattgattcctagatgttgaaaataggaataatgtgattaggctagtgggtaagggtagcattgaaaagatagaaatagaccttcaagtagagcatgcatgatcttgaataaaataatagttagtaagtatatagcggaatggcagggagacagagtttgcactctgtagcacatttaggagaaattttaaccaaaagtaatttgggcaaagaatatttgatcaactgtgaaattacctaccttttcaaagttctatcttgatacaaaggaagcaaaatttactcaaataatatcttgaaattaagatatacagacaatggcattatggtggcctgtgaatctaataacttcatgaaaatacaaagaaaatgaagagagctttacatgtcttattctgtaaaaaacctatgtatttttttacctcacctacaaaaactcaaaatcttcatatttacagaatatcctgagctcctacatgcttgagtagtagaaatcccgtcctttttcaagttcctcctctgtgctgcgtcttcaggtcccatgaaggtctcacagatgaccaggtgttgcctccctctgcatctttgcatttgtgccccagcttgtcctgttgttctcaggtgaatttccacactgccactggcaacttttcttttggatctctgccaccagtacctttttcctcctcagaaagcagaaaaggccaggcatggtggtcatgcctataatcttagcactttgggaggttgaggcatgaggatcacttgagcccagggttttgagaccggcctgggcaacatagtgagaacccatctctaaaaagaaaaataaattagccagacatggtggtacgtgtatctgtagttctagctacatgggaggctgaggcaggaggatcacttgagcccaggaggttgaggctgcagtgagccatgatggtgccacagcactccagcctgggagacaaagtgagaacctgtctcaaaaacaaacacaaacacaaaacaaaaaacaaacacagaaaagggtcaagtgctcctagagaacagttcattcagggagatccactagagaacagctctttcagaggactaccctagagaacagctcatcaagaggaatgtctcaaattagtcttctaggtccctaatcactcagttctttcctttctacttcctggagaacacaaataccctaacatggcgctgggccaggtaaaagtacagtcttgaactgacacacaacccttactccctattgtatttttgccttgttttcagactgatccacattgtcagcctcttccctcaatgtgagtttatttcaggggcacctgtgtctcactacttcattacctcggttaactcaatgtccattacactattcaacttatgtctaaatctcagttgtgaattacctacaatttcttccccatagagcttctgggaaccatgaaatcagggggaatacttgggtatctgttttaaggtcccagaacattccacgagaggcatcttgctcaatattctttgacaggagcaggtcagcctggagccacatcagtgacctccagggtgcgctggagttaaggcctgatacccaatggcctcatttctgacccagttcaaatacatttcaccaaggcaaggattcctgtttgttctagttgccttctctaatgcccagaaaacatttgctcaattacttctagatttgggtggacatccaccctggaattgtcactacttctttcctcccccttccacctctcccttgcctctgtgttttccctgttctaactcatgccttgattgcaatttccctgacaaataatagcagtttcctacctcatctccctgcctctggtccctcctctagccagcacccttagtagtcttctgaagacacatctccaaccttctctttttcatttttcaaaaatcttcagtgttctgacaatacttatctggctacatgggaacctctagggagctgattacaagcagagatccccagacctccccacccagggaatctgagtctgggggcactgagtctggagatctgtgcatcacagaggatctccagaagagtcttcagaggagtgaggttggggacctgcgggcctggaggagaaacccacactccttaggctggcatcagggctgtctgcaatctggcagttgattactgtgaaagaaaatgctgccatgtcactgattggtgcctctacaaagtcttagtaacagtttttgccaattgcgttatttttatttgaacacctctctcaaccaattacctcagcaactttcctaagctcatgtcactcacctcatccccacccagtgtgtccaccttctcactcatagcaggtgaacttcctttcactttccaggaacaagaaaatcaaaggtgtgatctccccagcttcctcctcctcctcccttcatttttttcctctttctagaaaaaaggtccagggctcaatcccacatcctgatactactccctcaagtccctcaggttggtgcaccaggctccccaccccacaagttcacaggaggaagccaaagctccaaggccttcctgtcccatccttgagaaatcctcttactgcacacacctcacctctctccatccctttacacccagacttcctgaaggaaaaagacgaatgaactgagacactgccctgtgacagccgtggggaacccaagacaagtaaaatccatctcagccccgaggaggatgcgccacactcagcctcatgcaccccctcccattccagctcctgccgctgcggccaacctgctctccccaggtctccctggtttccaaacccactttccatcttctgttttctgaccttcccaagtcactggcaccgctgtccactgtgctgctgaggtcacctcccctcagcttccaagactcttctctgcgggcctctcctcacactgcacttgggtttttttggtctctttcacaggcttttctgtcttggccaaatcacaactgtccagttcccaggatccggtcctttgctcttccccctgggtcccctctccctggatggtctcatgtatctcagtctcctccccggctgcagacccttctgtctacctgcccatcagaccacccatctgcccctcaagcacctcaaacccagctacctccctgtaggtttcttctctgtgtggcctgctgtgccatctccacctccatctccacaccatacccttgtgcgctgtcctgtggcttccttttttcaccccacatgcagtcagctgccaggcctgatgaagtcccgggggtctctctgctctcgtcctcctcactccatgctcagcccagtccaggtccccgcgctcgctcccctgacaagctccagatgggctccccccatgaatccccaacccaaagtcccctttccgcccggcactaaggtcccttaggccaacccggctgctcctgcgccctgggcacgggcccgcggggctgccctgggaccgccggcccaaagccctcactcacctcggcgctgcagggtcatgggcccgcccagctcgtagttgtgtctgcacatcctgtccggcactgcccgcttctcctccaggatgtccttctggctgttccagtactccgcagcaggccgccccagctccgtcaccgcccggaactcccccacgtcgctgtcgaagcgcgcgaactcctcccggttgtagatgtatctctccaggaagcgctgtgtcccattaaacgcgtagcattcctgccgtccctggaaaaggtaattctctgcggggagggggcggacatgagcggaggcgccactctcatctaatcctctttctccctctctctctcaatattaacgattcttcccaaatcttcccacccagggctggattttaaaataggagttttcctagtaccgagttctgtggtcctaagcgggtcgcagagcctctccaggcctgttttctcaccacgcagagagagaatttactgaaaagaatgagctcaggggcactgagtgatcactagggaggggcgagcactgaggggaaggcagtcccttctgctggtggctggaggaggcggagacgtttcacgtggggtcactgggagaaaaaacaggggcgggaggagctggggacgtggagggcggagctgctccccctacttaactccctgactgacatttccatcctgatgtcagtcctggttcaaatgccacctcctccaggaagccctcccttccttctttctcttttccatagctaagcgctctctcttctcgaccagtttcttgagaattcctcaacttgctcctgttgttttgcatgtaggagatgtagaaatatatttcttaaaactttcttcaactttggtataagaaagactctgtagcctgaaagttaattttcaaacatggctgcagaaagacttggtgtcaaaagatgtggaaagtattttacacaatgaaaatcaccacaacaaccagggacctgtgggggtagagtcctttgggtttagaggcattgatgtaattttttttggcagtttttatggttttatttacacacaaaacgtggacatgaactttctactcattttcttagctgtgcaccctggtactggggttggtgactctgatggccggctgggtgactctttccatgatgactttgcagttctggaggaaattttgtgagcgatctcagcacagtaagatttgttgcacatcagcagcactttcagctcc

SEQ ID NO: 11092 - DNA, 6000 bp, Homo sapiens
aaaatgctgcaaattcctttaaaatgtaaactgccatgctgtaaaaatgggagaaagatgtcaagcacggtgctatctgcaacataacttaagcaacttgaactagaaaatgcaatatgatctgttgctggacacaattgcacaatctcaattacccagaagattctaccaaacaggaaattcatgatgtgactttgggaaacacagaaatcatatttaaagattaacacatccaaaagcctggaatttgttccaaaacaaaaaaacgattttacaggcccgttttcaaatgacgcatacaatacgaattactaaaacacagaaaaagctaacagttaaatctgatacttagtttaagatccgtagctttcaaattatagaaaatctaaaatacagggtataaaaccttggaagttaagagagcagttagtgaaatatttcaggtctggaaattatatgctatcgacttaatttaaaacacactcacggtgtaaattaaagctaaaaagtatctcttcccttccttttctatgtggttccatatccttacgaaaaccatcgtgtacctcaggccataaatgcagataactagataactccctgcaagctctctaagggacttttaaaacacagtattcgcaggaattatctcaaaaaatatttacaatacctcccagcactgttaataactttttgatcttgagggcgccttacagatctgaatctttcttgctccaaatgagaaaattgttttgtcgaacaatacttaaatgagcagtggtatgtgactaatcagtgagcctgccagtttctcaagctgcagtgttcttgcaggcactaccaccgccgcccctccacggaaaggaaatacgctttcaaccgaatcggaaacacaccactcaagctggcacagtgctcaccgagataaagtcggtattttaagctctatggatcgctgttaattcaagtgcgaattcaaaaagaacgcttttcaagatgggatttcgacagagttttgaaaaaaaaaaaaaaaaaaaaaggcccggagagagctcccttcctggtcagttttgttcagatgaccgcagtcttcgggttgggctgtgcccttctgcttctcccggcagttccccgagcttgtctgctcagaggacccagggtccggagccccagcgtgggcgcatcacgggagagggtccttctgctccaggtaggcagggagacccccaaggaagcggcccttcccccggtgcctgttgccgagcagcaaccctccgagaggggaaggcgcagggtgctagccagaaccgagctccagcaccaccacctacctctcgcagcggacctgagtgctgcacacggtggaccgcatacctgcgtgagtgcagggcgaggggtgctggaggtgcagaacgggcagagctcgaaggggcagcaatgccctcccccgaggaaaattcctgccacttgacgcaacgctgagcagtggagcaggcctggccctcgggcgcgaggggccaccctgcccacagcggccccaggcccagcgacactcaccacacagagccataggcgccagagcccactggagacaggttctggtaacgctcgggcacctcccagattgtcttgttcagctcctgccggtagaacgtgggcctctcctgagacattttccagcggcagccgccgggcaagaaggtggccctgtggggcccccgcctgcacccgcaccctctccccggcccttgctgcccgcccagccgggcggggaccttgcgctggtcgcccgcgcaggtgcggctgccgcgaccccgcagactcccgcgcgcgcggctgctgtcagccgcagcggctggatgtgcccctgcgactggggcaagccccgctaagggcagggacgcgctccggcgctcaagactgcgcccgccgcgatctccctgcaccttcgcccctacaaggccgactccgggctgcgtcgcagtactcccgttccagctgctgcgcccgctaaggctccagtggtcgcggttccaagagccagcaaacgggagcctcccgcagtactctcgcgagaacagctcccgggactctccgagagccgagattttacccaatatggaacctctccgcgggcggggcttcgtgagagaagaggatgggaggagcagttctcgcgagaagagaacaataactggagaccaaaggcagaaactcccagggactgtctccttaagggcgcgaaggcggaccggggaaggaagagagaagctggcagcacacgcctcgcgcgcctcaccgtggccggcggggcaaatacctggctctgtggtggaaaacgacactgacaaatagcgtgtcggggaaagagtcaaaagatctttaactgcgagtagttaccagcagcagagcacctgctcacctgaacccccaaattccaaaaaacacttgcataaaaaagagacaagtggccgggcgtggtggctcacgcctgtaatcccagcactttgggaggccgaggcgggcggatcacctgaggtcgggagttcgagaccagcctgaccaacatggagaaaccccgtctctactaaaaatgcaaaattaaccgggcgtagtggcgcgcacctggagtcttagctattcgggaggctgaggcaggagaatcgcttgaacccgggaggcggagttgcggtgagccgagatcgtgccattacactccagcctgggcaacaagagcgaaactccgtctcaaaagaaagaaagaaagaaagagacaggttccggccagaaggctgttgcattcccatctgctcaaggacatatgggttactctttgagatgctgacgaaatatgtcccaaaggcaaatgttaaccctgcatcaaagctgaggctttccaggggctgggctcagtggctcacacctgttatcccagcactttgggaggccgaggcgggtggatcacgaggtcaagcgatagagaccatcctggccaacatggtgaaacctcgtctctactaaaaaaaatacaaaaattagctgggcgtggtggcacgaccctgtagtcccagcttctcgggaggctgaggcaggagaattgcatgaatccaggaggcggaggttgcagtgagctaaaatcgcgccactgcactccagcctggcgtcagagggagactccgtctcaaaaacaaaaacaaaaacaaaaacaaaccgaagctttacattaaaactctcccagttaaacttacatgcagaaaaatcaccctgggagtttaagatgcaagttcccagaactcacagggagtctaattgggtaggtcagaggaggtcttgatcaagagcatgcatttttataatacatcttaggtgattctgattcaggaaagtctctgatatctccctttgagaagcatttaaaaaaccgttacactgaagatttgaaactgactcctatcctgaagagccatcagtgaagaggattttaagcatttaactcaggcctcttcgagtaaggagaatagggcaggagtctcatcgaatttaggcaagtcaactgacctttcctgaacctcagttccagcttctacgagagaattcctgccctgcattcccgactaacagagtcatttgtaaaaaccaaacaagataaatgtgaatgggcaaggcattctaaccccatgcctacatccattatcaacctatgcctatgctaaagcttgttacaatgagcagaagaatcagatcctgtctcattctcttagtttcttgtattagaaataactagatccaagccaggacatttctcaacatttcccgtgattattctattttgtgtcatacacaccttggagggctcagactttgcatatcttgtcccaacatctagcacaatgtctagaacataaaacatgtgtcataaatatttgttgaaaaaattatgaacagtgaccatgatttcaagtggtacagtatcctcagtcctcttcaaggaaagcaatataaaaccaaaaaacagatagtcatgggtgattcatggaaagctgttttggatccaatgtagcttaggctggaattctcttatctacaaaaacatgttgcttgagaatgttccaaactagggaggataggaagctttctaagaagtaatggagggtgaaggggaagtaagagcaaaaacatgattgtgaagacatgagggatggggttggggggatcaagggaatgagggaatggttacaaagggtgaggaggaagcttggaagtaggaatcctcagaaatgcacatttttatcctacaaattgggatgatgaggtgagggtgaatgaaagggtaaagataaagtaagcagtatattcatacactcattcaaccaatgtgtattaaatgcctactaggtgtcaaacacttgcagtttaaaagtgattaaaaactacagttgctgccggtgtggagcttacaatcaatgggagggcaatcattcaacaaaaattaattgaatacttcctatgtccaccacactgctgtaggcactgataataaaacagttaatgaaagggataaaagtccttgccctcataggggtaagatgatttacaaaaaggaatacataaagtgcattataaggtagacattaacacagtcatcaaacaaacaagtgtaaaactgtaactgggccaagcaggaatacaaggtggagtgagagacagtgctagggacagggatagggtgggaggagggtaaagggagtgagtgcagatggcatgtctgcatccagagcagatctgggcaggagggtgtcattcagtggggagagccgggtttgtggggcagacagcctatggttggagacctgggtgaccctcctagcctccatttctttttacctcttctgacctgaggaaggcttaagtcttccggagacgttagtgaattaccgtctgtgcagtacacatgtgacacatgtgcactgctgtatgttcaggacacgaggcctggcaccaaataggccctcgatcaagaatagcaaaacctcggagagagaaggagccttggtatacaggtttaccaaataccaaggggatcccacgactcaggtatgaggagggcgacccaggtaccactttcctggctccctagcccagctgctcatgctcctcttcctcgtcccctcccccactctcatctcctcagcccgcccggaacgcccgcgggctaggccacaacggctcgggaaccgccgccggtatccgcgtccgcagcgccgccagccaggcgagagccgtgtgggatcccagcgcccgcactcccgcccccgccaaggagccaggtgagccgctgctgggagacgcctgggcgccgggggctgcaggtcccagggcgggggctgcgtccgtcaccggcaggtacccaggtatgccgcagagccaggcacgccgtgggcactcagtcagtatctgtggaatgaatgaatgatggtcgtccctgggagcttatctctgaggtattgtctctactttcaaaggccgtgtggatggcaatgacaagagacaacagtgtgtgcgttttgcaagctgcatcctttcaaattctcctgtctatattgtcaaaagccccagaactgacgtgctacctgcaccccaccgcctaccccatccatttcctcctgaggcctgactgcccggccgttcctcttcctttcagaccccactgcttttgttaattttgttccctgtgactgaatccccacccccacctccttgcccctttcttttcatgtcaaatgccgttgatgtgtcaggggccccgtgaagccttctccagcacccccaccccaataatgagcatctctccaacacaccatgttactctatccacattgcatggaaggtggttgtcctatgtttatgtgtccaatggtcatccgcttaaggactgtcatcttactagtcatccctagccactagccagagtgactaaaggatctaaaggccaggctcttt

SEQ ID NO: 11093 - DNA, 6000 bp, Homo sapiens
acttaacaatatttagtaagtgaagattagatctctacaaaacctaggcctccacttaagctagacctaaaaaccagaggttagttaacacactgcatctcgaagaaatcacaccacatatgcagagaaaagaatgccatggaatatgctgccacgcagacaaaatggaacaaaagttctgattaatctccgtcactctctttaataaaaccaacaccatagaatgtattgacatagctgttttgcctagttgaaacagtgcaaacatcttggtaggaaaaatcaacaggtgtttgtttagcactgataaaagagctagtgcaaatatgggaaaaagacccatcaaatttaaatgccaaacgtgttggcaactgatgtaggttcacacactcactccacattagtcttccagaacaggtgatctatgctgtttcgatgataatttagtatcttctagtcactcactctaccagtaaaacatctccaagccaagaacaagttgtaatgtacctgcccagacaggctgtgacttttacactaagtctcctatcagattcattattattttaggatcggcttcaagttcttaacttggcctctctttctaacaacgaagggcctggaagactcaggtaatttcgattttggccagacgcagaggctcatgcctgtaatcccaacacttttggaggatgaagtgggcagactgcttgagcccaggagttcatgaccagcctgggcaacatggcaagacctgtctctacaaaaaatacaaaaattagccagggctgggcacggtggctcacacctataatctcagaactttgggaggctgaggtgggcttgaggtcaagagatcacttgaggtcaagagttcaagaccagcctggccaacatggcgaaacccccttctctactaaaaatacaaaaattagctgggcatggtggcatgtgcctgtaatcccagctactcaggaggctgaggcaggagactcgtttaatcctgggaggtagaggctgcagtgagctgagatcgtgccactgcactccagcctgggcaacagagggagaccccatctcaaaaaaaaaaaaaaaaaggtgattttttttttctcctgtgcccgagctctagacacacacacacacacacacacacacacacacacacacacacacacacacactgaccaaagcttttttatttttcccccataggtttgtgccaccaagcccagataatttttttgtgtgtttttagtagagacggagattcaccatgttggccaggctggtctcgaactcctgacctcaaatgatccacctgtctcagcctcccaaagtgctgggattacaggtgtgagccaccacacccaaccagatcaaagcttttcaatttcagtttcaaaaactgaagcaaggagagaaaacaaaaatgatagctactatcatcgtaactatccttcttataatagctaatattattgtgtacctcctaaccaattattatgtattatctcatttaatcctcataacagccccatggagcagatactctgtccctattttagagatggggagactgatgcattgagaggttaattaaatcccataagatcacatagctagaaagcagagctgggattttaacctaggcagtcagatttcagagcctgcatttttttttttttttttttttggagacaatctcttgctctgttgcccaggctggagtggagtgacgcaatctcagttcactgcaacctccgtctcccaggttcaagagattcttgggcatcagcctcctgagtagctgggactacaggcacacaccaccaagcccagctaatttgtatttttagtagagatggggggtttcaccacgttggccaggctggtctcggactcctggcctcaagcgatccacctgcctcagccttccaaaattctgggattacaggccaccacacctgccaaagcctgcaatggtagagattgcctcttatcttctaggcattaatacaatgaccatttgatgtgctaagtaaatggggctcatgtgaataactgagagaacttaaaagatgcttagttccaccaagttactacatgacccagcaattccactcctatttatcagcagaagaatagaaaatatatatccaaacaaaaacctctgcataaatgttcataaaagcattacgtacaatagcccaaaagtgaaaacaattcaaatatccatcaactgatgaatgaacaaaatgtggtgtatgtatactatggaatattattcagccataaaatggaatgaagtactgatacatactacagcgtggacaagcctgaaatcactgtgcttaataaaagaagccactcacaaaaggcctcagatcatattactccatatatataaaatgtccaaaagtggtaaatccacagaaacagaaagtaggttagtagttaccagggtctggagtggggtggatggggagtgactgtaaacaggtatgtagtttcttttcaggatgatgaaaatgttctgaaattagtggtgatggttgcacaaaaccatctatactataaatgaatatactaaataccactgaattgtacactttaaaagagtgaattttatggtatgtgaattatatctcaataaagctgttatttttaaaaagaatgtttcattcatttgcaacttcttttatttaataaaatttctatttgttgtcactaagattgttggatcatgatcagacaaatggaaagaaccctgtcatcgcttttatttttcacctttcaatttgcaaagaagagtaaactagtttcatttccaagtttgcatgcatccagtagagtcatttgtgtcatttccccacccaggagaaagtttttcttctctaagaccgaaagagtacagatgcaaaagttctattcttgagaaaatgccctaacattttctttaaaccaaagtacctttctatctaaaagaaccttagttttctcctatgaccagaggcttgtgggcttcactgctaaaagcacacagctgaacagtatttctctttaccaagtaaggtactaaaaactattatgaattgtgacaatatttgaataccttaaacaacgaagacaatgagctggggtaaggatctgagtaacattattttaaatgtttacttgctgtaataatgacagcaatgttaataactactgtttttttgagcaactataatgtgctaaataaacactgtcctaggctctttacaaatagggtatttcacttagtccccacagtaactctgaggaaagtatttttatttctcatttcataggtaaggaaattgaggcctagaaagattatttgtcttggtcacacacacaacagagcccaaatagtaacccaagtctttctgaactcgaaagttctctatttctctatattcttcaaaatgaaaaaggaatccagaaacttgaagaaactgaaaagacttctcttcctatctcagaaaagtagtgctttaaaaaagttgactgttcttatagccaaatacaggaaatataggaaaaaaagattgttaatagcaaccagcagtcagaaggcacagaagcccatgccacgtcccacatctcttacactgcttcctgatacaacagtcttcctattgattatgattataatcttaggatgtcaaaatttaatgatctcactacggaaaaccccagagaatagcagttagcacaactagagagctcactagaccaggaaggaaaaggaatcagttggcaggaagtgtgcttacctaaaaacacagaacatctttaacagtaatattaacactgttgagtccacagcactttaatctgaagttatctttgcattcctttctattactttaataagtattactaaaagctgatttccaccctattctccatatgtctactagaatccttaataaaataagactcttggtggggcatggtggctaacgcctgtaatcccaacactttgggaggccaaggcaagaggatcacttgaggccaggagtcagagaccagccctggcaacacagtcagaccttgtctctatttcatttaaaaaaaaaaaaaaaattaaggctcttacctagccactactgaccctcatctctctctcgcttaaaaaaaaaaagtcacgagttcaaaagattatcccagaaggaaaaaacctgaatccattagaaaaggtagcacaggggacacaaccaaacatgaatttcatcaccaagtagactgtagctggcagaaatcttaaatttacgactgaaatacacactcttccttatacttctcaggactttgcccaaaataaactgaaacagtaaaccaacagtagattgatggatggataatttgccaaaagtctcaacatacaccgaaaagagggtgggggtagtcttagggggtctgctctccagttaaacaactgaagaatgaacgaatttagtgcatttgcacaagaagtgcattacaatgcaggggaggaagaagtcacttggggttggacaaatccttagaaaatgccaaaggaataaccctgattctgtggtcgtcttgtaataattcctagtgggaaagggccaactcaagataaagtaaggtcagggttgagaatcgtcctcacttttcctgcctaaccctctcggcaggcggccccaaactcccaccggaatccttcgggtaagtgccgacctcagggatcaagggaaggggccatcctcgagcgaccaaccacctgtgcgtggtggagacccctgagagggagtcctaattagagtgggaagcagctctggggaggaacttccgagaccagggccgacactgactattcacccaactccactcccctttacgcccaatcttcggccaccttcccgctgaggtcacccctcctgaaacctccgcccccagaccccggtctacacccacatccagccgtccccaaagctcgctgttcgcttcgctgcctgacagctgccctgccgccaccaggcagtcccagcttccccaaaccagtcttctggcctctgtggcgccccaggcccgcgggattcagggattaggatctggaagggtttggtccaatcccctatccctctcagcgtcctgggctcacctccccggcagcttagcgctcctcttccaaaactgcttgctgttctcagcggccattgctctggccgggggaagtccttgtaggcgggccaagggtttgcccggcgagatgcccccagaccccgcaatctgagggccaacccaggccgcttccccgccgccggtcacccgctcccagctcctggggacgccatcttggatgtgggcacccctccacccagcaccgctgccattggtgagctgcgcaagccgtggacgggccgaccaattgggagccggaatcctgcaggccgctgaagccgaccggtaacgtcaggggctgggcacacaggtggacggggaaggcggagcttggacgagccgagaggcggggctcaaagttcctacccgcgagagggaagaagcaggtaaggtaagggacctatgggaaggaagaggggattatcttcttcgtgaggaatgaagttccttagtctaatatttcttggcaagagagaacatactatgtatttatatataggaatctttcacctaaaagtaagggcccatgtgttggttgtggcccatttttaacatctctcaattcaatgacactctggttattaccctcctttcctcattccgtttacatgtccattcgtttttctgaaggaaggtcagcagggacccgatagcccgggattgctaactgttcaacacgtgagcaacggttcatcagagtctccctctccctctgtttattgaaaacgattgaaggacttgtgctgtgggttaaaaattcaaatgatctaatccctatgtcaatccataactctcactttctgactatgctaacagtgtatatag

SEQ ID NO: 11094 - DNA, 6000 bp, Homo sapiens
caggtagcaggtgcacagcaaatatttatcaagtgagtgaatgaatgaaaggtcaagtcaggagggacaagggaggtggggaactccaatgggaccagtgggcaactgctgtgggctggacccaagtttttttttttttttttttttaatttgagacagagtctcactctgttgcccaggctggagtgcaatggcatgatctcagctcactgcaatctccacctccctggttcaagtgattcttctgcctcagcctccccagtagctaggattacaggcgcccgccaccacgcccggctaattttttgtatttttagtagagacggggtttcaccacgttggccaggatggtctcgaactcctgacctcatgatctgcccacctcagcctcccaaagtgctaggattacaggcgtgagccaccgcgcccggctggaccccgacttcttgtgtggctttgggcgaggccttgccctcctctgggccccacttgctcctctgtaggacaatccgatggttttccaggtcttatccaatggctctaagcggaaggagggacaacattttctgaggcctccagcatgtccagcctgtgtcaaatgcgtgactcgaattgtctcatttatatcccccataacccctgagaggcagctgctatcactcccagctcacgcaggtccacagagtttaagctccatggctcccaaatacatatttaggactcagtggtgtgctttcaatcacccccaccctgtccacaggacactggcaatggctcagctgggacactgtactgaggggaaggctccagggacagcctgtaggtcaggaggtgggacagacagcatttgggttgggaggcccctagccttgaggaggacactttggggaaggtcttgggggaagaagggagagaccactgcagagatgccatctgctcagtgtgtccagggctactggcccctccagagggccagtagaggggagcgggaggcccgagctgaaggcccccctcacactgctccagcttgtcttcccacccctgccccacttccgtcaccaacagcccggtgcccagagaggggctgcagaaggacagctgagcaagacacagtttctgccttccccacgcacatggctggagtggggctttgagtggtgggcaggcagtgccagcgggcaggtgctccgtgtcaggcccaccatggagggtggcccgcacgatcctgccctcaaggagctgacagcttctttgccacagctggtagaacctgcacggccaactccccagggagggctctcccatgatatgatatggcgtggtgggctctgttcttacaacctgatgtcagctcccaggtgctcagagtaccacccctgatggctcttgctcggccacctgcccagtgaggtggcttttgctcacagcgcatggctactatgtattaataccagcactcttcaagcactcttacatgtatcacttcatgtaatcctttgtttcaaatataaggaagcagaggcagggagaggttaaggaacttgtccagagggatggagctggcatgtgggcgagccaggagtaaacccaggctgtccggctcttgtcaccgatctgtgctgcccatgccacccagggccatgtggtctctgggcagtgtgttctgcccacgaagtagagggcagggattacagggcgtgtggaaacatggttgccatgacccaggccacctcatgcagcccttctagaaagtcttaatcataataggcggaagtcaacatggttcatggaaatggaaccaccagtggcccttgagcacaccaaaagacgctcaacttcactcataatgagaaaaatggaaatgaaaacaactctgagatactgtttttcaaagattaggttggcaaagatcaaaagtctgacctgtgtggatgtggctgtggaggacaggttctcctgagcatggctggttgggctttgtgaaccgcgcccccacctcagcccccagcaggagagaccagaggagaaaaatggcaggtatctggcaagatcaccctttgatgcaaggatccatcttcaaggaatttacctgctccatatagtcacaatatgcaaaatgactgatgtccatgtttgtattaacgagagactgggaaaaacccaaacttccatcagtctggaactggctaggacccatgtgccatccacgcaatgggaataccatgcagctcattaacaaacaaaaatccaggacactccacagacagatacgaaaatatctcagccgagcgcagtggctcatacctgtaatcccagcactttgggaggctgaggcaggtggatcactcgagatcaggagttccagagcagcctggccaatatgacaaaaccccatctctactgaaaatacaaaagttagctgggcatggtggcacaccactgcactccagcctgggtgacagagcaagactccatcccccatccatgccaaaaaaaaaaaaaaaaagatctccaagatattgctaagggaaaaaagaaaggttcaagacagtatgtatataatgttctaatttgcagtaataaaaaaagaacaggaaaaatgaaaacatgtttgcttgtccatgcatgaagcctctctctggtggaactggccatagcggtcaggacctggaggctgagagatgaggagtgagaggcattttatattaaagagattttatttagaagcaaaagatggacatcttttaagagattcgtgaccaattcaatgaacattgtttaaaataatctctattggaaacagttatgctttctattatgttctaaaagtctattatgtaacgcattcttcgcgtgcaatttttttttctttttcctttctttcttttttttttgttttttgagacagagtctcactggcgtgatctcggctcactgcaacctctgcgtctcgggctcaagtgattctcgtgcctcagcctcccgaatagctgggactacaggcatgcaccacaacgcctggctaatttttttgtatttttatttttatttttttattttttatttttattttttttgagacagagtctcactgtgtcgcccaggctggagtacaatggcgtgatctcggctcactgcaagctccgccccctgggttcacgccattctcctgcctcagcctcccgagtatctgggactacaagagcccgccacaacgcccagctaattttttgtatatttagtagagacggggtttcaccgtgttagccaggatggtctcgatctcctgacctcgtgatccacccgcctcagcctcccaaagtgctgggattacaggcttgagccaccgtgcccggcctgtatttttattaattgtagagatgaggtttcaccatgttgcccaggctggtcttgaactcctgacctcaggtcgtctgcccacctgggcctcccaaagtgctgagattacaggtgtgagccactgcacttggcctacatgcaactttttcttttttttttttttgagacggggtctcactgtatcgtacgggctggagtgcagtggtgtgatcttggctcactgcaacctcttcctcccgggttcaagtgattctcgtgcctcagcctcccgagtagctgggactacaggcgcgtgccaccacgcccagataatttttgtatttttagtagagacggggtttcaccatattggccaggatggtctcgatctcttgaccttgatgaagatctgcccatcttcgtctcccaaagtgctgggattacaggcgtgagccaccgcgcctggctgcaactttttatttagatgacaagcacccagtcaagtgcacaaatatatatatatatatatatatatatatatattttttttttttttttttttttttttagagaaagtcttgttctgttgcccaggctgagagcagtggtgtgatcatagctcactgctgccttgaactcctgggctcccgcctcggccttacaaagtgctgggattacagacatgagccaccatgcccagccaaatgcacggatcttaagtgtgcagctcagggagttttgaccataaaacacctgggtaatcacccccaggccaggtagaacatacccagcctgcctgaggggaaggggagacttttcactgtaaagatcccttttgaattctgaacctgtgtgaatgtatggtaagcgctaaacaaatacacacaaaaatatagaagtgcagaagatatgctgggagccccgcccatcagcctggagaacctgcttgcagctgtgtcccttaggtgagtcaggagctcccacctggctgggggtggagtcctccgagggcaaggactgtgcctgcctcgggtctccatcccctgcctctgcacaggccctgggactgagcaggccttctggaaacacctggctggaaagggccttggccaccagtgacctgtaagggggagatgaggttggtgagggagctgtgggcatcaccagtggcagccagatgcttgtccatcaacagctcccatcctgctgctcctcctacccacctatgcaccaggcatggccccaagaaagcgcctggcagcacagagtggttgggtgaatttctatactccctattgacttgggtcttggattaccgtctacctcaaggtcgaggaaggcaggggcatttattcatttttttgtcttcagcgcctagaacagtgactggcacgtagcgggcgcacagcaaatatataccaagtgtgcgagtgaatgactattctaggtttccagaggcaggggttgggaggaagtggcccctgttgagaagcccgggaagcccatctccagctgtctgtttccctttaagtcgaatcaagagcaacgtggatgggcggtacctggtggacggcgtccctttcagctgctgcaatcctagctcgccacggccctgcatccagtatcagatcaccaacaactcagcacactacagttacgaccaccagacggaggagctcaacctgtgggtgcgtggctgcagggctgccctgctgagctactacagcagcctcatgaactccatgggtgtcgtcacgctcctcatttggctcttcgaggtaggccctgggccagctgggggtagagggtaaggagagcctccggtcccatttgggtctaatgggggcggagccaggcttggagagcatgcctccctctttggaaacagccttcagtggagctgtgggtcagatcagtctgggcttgaaccccacccagggcctccaccttttgtatttatttatttatttatttattcatttatttcttttttggtttctttcccaccacttaaatttattttttttattttttttttattttgaggctgagtctctctgtgttgcccaggctggagtgcagtggcatgatctcagctcactgcaacctccctctcctgggttcaagggatccttctgcctcagcctcccgatagctgggactacaggcatgtgccaccatgcccggctaattttttatatttgtagtagagacaggttttcactgcattagccaggatggtctcgatctcctgacctcgtgatctgcctgcctcggcctcccgaagtctgggtttacaggtgtgagcactgcacccgaccgacaattgtttttttaattgaggtgagatttataaaaggtaaacaatttggtgtcatctagttgatttacaatgttgtgcaagcacctctacctagttccaaaagacttccatcagcccccaagaaaatctcacacccatgaagcagtcaccacctcccaacctgccctccagcccctggcaactgttctctggatttatgtattttggacatttcatataaatggacccatattacgtttggcttcttttagttagcatgttttggaggttcatcctgtgtccccactttttggtaccgaggtcttagtcatttaacctctctgttatatggggtgaca

SEQ ID NO: 11095 - DNA, 6000 bp, Homo sapiens
acctgaggtcgggagttcgagaccagcctcaccaaaatggagaaaacctgtctctactaaaaatacaaaattagctgggtatggtggcacttgcctgcaatcccagctacttgggaggctgaggcaggagaatcgcttgaacctgggaggtggaggttgcggtgagccaagatcgtgccgttgcactccagcctgggcaacaacagcaaaactccatctcaaaaaaaaaaaaaaatgaattcagcctggattatagtagtccttatactgatgtagttatgtaatataatttttaatattcttttatggaggaagggacccactaaggtgaaatggctaaggcccatgaaagccatgatgtggcttttatgagagatcgcagtgggttagcagaattgtttgagccaaggtgctagaggtcatggtctggaaagataggagttggtaataggaaagtgtgatacttaaaatagagatgatggagtgtgtgaagctattggtagcaacaaggtttagggtgggatcatctttctcactggagaggaagaaatcaaggaaatgagaagctggttttatcagatatctattgctatattaacaaaccattccaaaatttagtggcttaaaacaaccaccatttatctgcttatagcttggcaatatgggctgggctctgctgagcagttcttctgtttgtcttgcctaggttcactcatgtggctgcagtcatctggaagcttaactggggccaggtaatccaatatgactgcacgtctagtggttgttggccagggtacctcagctctcctccacggggcgtttcatcttccagtaggctagatggacttcttgacatgatgttggaagcattctaagaggcaaagcggcaagctgcaagtctcttgagacctagaccctaggaactcacacaacatcatttctaccccattctatcagctaaagcaagtcataaggccagcccagattcaagcaagaggttgagaaatatactccacctcttgctgggaaaagcagcaaaataattgcaaagcgtcttgtagaacaggaggaagaaaagtggccatctttgcaatctatcacacttgttggaagaactgtctatgtcatattgaatcatcaagaatcaccaataatttgacagaagtgagagtgaagagactgacaagccaggtgctaaaatcttcaaagcacaagggggcactaagtgatacctctaatggcatcaactacctttattatttcatgagtgaatctcagtacattttatcagttaaaaagaatttatttttcatgacttctttgactcagtcactcatcaattcagacttgatcataaggaaggagcctaaaacatggggaaaaaacctaccttcataaaaatgtgtggcactaataaatattatctgggagctgtatcctcagtggctctggtatctaatggtaatatatgactactcaatatttgttgaatgaatttataatgacaaaaaaagtaaacaacctaagcagccaataactagggctaagtaaagtaaatatagtatatctatttaatggaatatcacatagccataaaaaatgcttttgagaactatcaatatatgacatggagtaaaaaaaagcaggatacaatactgtaggtacattatgattatacctctgtaaaaatatctgaatggaaaaaaggaatcaaaacaacaataattgtggttttctcaagctagtaggattgtgggtggtttttttcctttccttttctttgagatggagtcttgctcttgttgcccaggctagagtgcagtggcatgatctaggctcaccgcaacctctgcctcccaggtgcaagcgattctcctgcctcagcctctcaagtagctgggattaaaggcaggtgccaccacgcccggctaattttgtatttttagtagagacaggttttctccatggtggtgaggctggtctcgaactcctgacctcaggtgatctgcctgccttggcctcccaaagtgctggatttacaggcgtgagccaccgcgcccagccagtttgctttctttttttttttttttttgagacggagtctcgctctgtcacccaggctggagtgcagtggtgctatctcggctcactgcaagctccgccccctgggttcatgccattctcctgcctcagcctcccgagtagctgggactacaggcgcctgccaccacacccagctaattttttgtatttttagtagagacggggcttcaccgtgttagccaggatggtctcgatctcctgacctcatgatcctctcacctcagcctcccaaagtgttgggattacaggcgtgagccaccgcacctggcctttttctttttactttattctaaaaaaatgttaggctgggcacggtgactcatgcctgtaaccctagcactttgggaggccaaggccggtggaccacttggggtcacttcgagactagccgggccaacatggcgaaaccccgtctctactgaaaatgcaaaaattaactgggcaggccgagggcagtggctcacgcctgtgatcccagcactttgggaggccaagcgggcagatgacctgaggtcaggagttgtaaaccagcctggccaacatggcgaaaccctgtctccactacaaatacaaaaattagcctggcttggtgggggcgcgcctgtaatcccagctactcgggaggctgaggcagaagaattgcttgaacccgggaggcggaggttgcagtgagccaagatggagccattgcacttcagcctgggtgacagagcgagaccctgtctcaaaaaaaaaaaaaaaaaaaaagagttaattaaacaaacagaattttaaaaaaatttattgaatacctactatgccaggcattgttttagacactggggatgctgtgatgagcaagaaaacatcccagacctctggagtttgctttgtagtggggagatggtcaataaacaataaatatttaatataatgtcagataatgatatctgacagagaaaagcactgaaagtctcgagaaaaaaaaattagctgggcgtggtggcgctgtgcctgcaattccagctatactggaggctgagacgaggttgtactgagctgaggttgcactactgcactccagcctgggcgacagagtgataatctcaaggaaaaacaaacaaacaacaacaaaaaacaagttatagatgttcattgtttaaaaaaaaaaaaaaaggggcgggcgcggtggctcacgcctgtaatcccagcactttgggaggtcgaggcgggcggatcacgaggtcaggaaatcaagaccatcctggctaccatggtgaaaccccgtctttactaaaaatacaaaaaaaaattagccgggcggggtggtgggcgcctgtagtcccagctacttgggacgttgaggcaggagaatggcgtgaacctgggaggcggagcttgcagagagccgagatagcgccactgcactccagcttgggccacaaagcgagactccgtctcaaaaaaaaaaaaaaaaaaaaaaaaaaaagtgttaatgctgaaaagtattaataagaaaaaaaaaaaaacctctataattcgatcatccagagaaaagcactgccaatgtcaaagtacgttcttctttgtttccggcttccccccaccgcactttacatattcttagcttttttggacatctttagacgtcaaaaaaaaaaaaaagtatttttaacagtcacatagtgttgatgtgccataatttatttgcctacagtaatttttgaattataggttgtttgcaatttttcaccaaaaaaaaaaatgtgtttaaacaaaatgaatggtacagccatgtcattactcaaattcagagagctcttcagggaagaggcgatcacagctgagaggaggccagctagggagctgagtgggtgtaagtgttatatccaatggagactgcaggaaaaatgagccctggggctctgtgcctgtggaggtggctgtgtgaaggtgggaagctgctctgccccgactagcgactgctccttccgatgttttgaatttaaagatggtgaaatctcaatctgaaggactagagatgggcgctagcgttcctgacctctgccctgttgtcctgcacaaactagaaattatgttctgggtccttgtctttttttgggggggggcgggggtcggagttttgctctgtcccccaagctggagtgcagtggcgcgatcttggctaactgcaacgtctgcctcccgggttttcaagcgattttcctgcctcagccttccgagtagctgggattacaggcgcgcaccaccacgcctggctaatttctgtatttttaatagagacgggtttcaccatgttggccaggctggtctcgaactcctgacctcaggtgatccgcccgcctcagcctcccaaagtgctggaattataggcgtgagcccaccgagcttggctgggtccttgtcttgaaatgtgtctctgagccattagccagaagggggcaaagaggcctggagggcagctttcccccactccccctccgttactctctgaatctgagctccaggtttgggcagttgaggtttagcctgaggccaaggacgaacgtgatggggtacaggagaagacttggcggtggagggggttttgtgtgcacatttacagagtcaggggcattcccagtccagaaaggattctcagaggcagtcacaaaaaggaatggggtggaagggctgagacttgagggagggaagggtggtgggggtagggccggggtgtggttgggtggatcgggttgatatttatatagggataggttgatcttggaaggctggagacggcaacgtggacaggaagaagcggagggcgaggaggagcagaggagcacacagatgaagcaggtgatgaaggctttacaagcggggaggcgtgggctggtgacaggcggagggcggggagcgattgcctgcgtgtgcatagatctatatgagaagcgtgatgagcggcggacaagcgaaggcagggctggggcgtgggccgcggagcgctggtcgggaaagtgggcatgggagatgagagaataacggggttgcgctcctttggcttaatagtttgctcccattgagactcctaagatttcctcctctcttggaaggaagctgggttcggggcgttgggtagccgcggagggccggggccccggggcgcgccgggtgctaggtgtgcgccgtgcgtcgcggggggggggatgggggtgggggcgggctccgcccctggcagggggcctgagcgcgcgcgaggagcagccgctgccgccgctcggggtcgcctggagccccagattcccgagcgctcggctcgcatggcagccgcttcggcgcccggccccgcggccagctaggggcggccccgcgctccctcacggcccctcggcggcgcccgtcggatccggcctctctctgcgccccggggcgcgccacctccccgccggaggtgaggactgcggggacagggcgcggtggggattccaggccccgcgccgccgccgaacccagcgcggcggagatagaaaggggacgtgggagagagtggtggtggcgggggggggggctgtcggagctgtggggcggagactgctcgctgccgggaaccgtccttccctccggcccccgcgtcccctccgtgctcgaggccgcctctcggcgctgtccccatcccgcggacccctccgtcctgactacgatcccaaccccagccattcccgcgcctggcctcgctccgcgatgcccatctttcccctccttgcagaccccgctcccgggttcctgtcttcgctctcctcgctctcttcgcctgctcaacccttccctgcccccatcctcccgctacccccatccccttcttctgtcccggcgcccctctccctcgtcggctcctgtcacttggaacccgtatcc

SEQ ID NO: 11096 - DNA, 6000 bp, Homo sapiens; identical to SEQ ID NO: 3754

SEQ ID NO: 11097 - DNA, 6000 bp, Homo sapiens
ctattttttggtctactggcttatactaaagcagttaaatgcttggcagtatttctagccacaaagaactgagcctgaatctgggctccactacttcccagctctgtgaccttgggcaagttgcagaccttctgtaagtctcaggtttttcctcattaaggtgatacctggttataatgacaataatagtaacaatgagagctagcatttatcattgttgcatggcaatatcacaatgtattgcctgtctcgtatggatgttttcagtattaaatgaggggatatttgtaaagccattagcacacagcctggtccagagtaagaactcaattaatgctagtttttgttacttttggactgtcagagataacaggagatatggctgaatatcaggcttaagttacaattttatttacagatagtggctgcttctatatacaaagcaaactggattactgaaagaattagctgggtaataaagaccttggattgcttttgcttctgttatcttcagaatgcatattgaagtgtttttccttctattgcgagggagggacggatggagaagtggatccatttgcttgccggcattctccttgttactttgacttcacagaaacatgtttttctggtgtagcttggaacatgatctcattttctctcaactgttttttagttcacagttttgaggacattcagatctttttaagtccattacatctggggtttctatgtcatggaaatgcatattcttggtttattgaaatgaagcatcttcttctgactcactgtcaggttcattgtagaattccttcatccttgacaagcatttgaggatttcagagtgaggtattaaatgatgaacctatcacagccttttttttttttaatcccagggattgtatacttggttgcttctagttagcactaagccagcctcagattcagtagatgcatgcttcagataatgctttccaatgcagttatctagaaatgttacaacacagaactttcctgagatgttgcttgtgatctctttgtgcatcaggcctgtgtgagtcacttggcattttaccctctgcctatagtttcaagacttcatagctaccagttaggataaaacaaaatctgaaggaaggcagtaattttgataaaaatatgatattcaacaataatttgttttttttctctaactgtagaatatcttggtcaacaggagagggttttgtgggctggaaacattgttgcaaattggtaaattcaaaataatttatctgcaagttggctgtaaaagaagatggactgaattgccctcttttgtagtcaaaacgtagctacccttcaagccagaagataggatgcttatgtgcagacaatacaacaaggttgattcattgcagtttggtcagcaaactggagcctgacttcaaatttgagtcagtcacagactcttttatggttttgggtaaggctctggtcctcaaatcaatgcacaaaatggaaataatggtgattcccttccctgtgtagggagaaaatgtcttgtataaacctctactggatgttaatgttgtttgtgtgtgtgcaactctgtggaggaagagcagtataggaatgagtaaattttcttcctatatttggcaggcatggtaccctaaggggctggtctgtgccattatccagaagggaggcctgatgaagaagttagcatcagaactagcccgagtttttttgaagttcactcttaactcttgggtgtcttcatgtgctgggcttttcttggtgacaagtaggtgttacttatttcatgggaggggaactttgctgatattcaaagctaagtgtatcacaggtagaatttttaattggttaaaaacttgaattatttttatattaattatttacaaatagaatatcaaggtgtattttttcttccctctaccattttggaggcttataaaggtctaggctgtaagctgaagaaaggaggggccagctctgtttttgctcacctttgtgttgccagcaccattttatctccaggcacgaaacaggtactcaaataatggctgaatgaataagctaataaatgagtttcagacctgaagaggcagattcatgtttgttgagaatttctctataatcagagtccttcctggtaccctcaaatgttagtggattagtccagacagtgaccaattttatttactatttgtgtatcaggagatcagagacaaaggctttttaatgtgggggacacttggctctgagaccccttatttttccaatcagacaatgacttacattatttacctccagagaacagtcccagacacacttgattagccttaaatgaaagataagccattgctatgagaaaggacatgctttcaatagatgggcagacagacagatagatagatattaaacaatttacagttttatgtcttgacaacttggatattgtaacatgaaaaatgctactgaaagggaccagtcccttcctagcagagaagctataatattttcagtaatgaaagataaatgtttcaagcttccttacttaaaacctttcattggctttccattagcctgtaagttcaagtccaaacttaatatggcttatagggtcatgcaggacttggtctgtctttacctctccatctcatttgttcattaatgatccctatatcctattcatcctggactggaagtggagctagaaatctgaagtacttttgtatttgggattcttgtgtagataaaaatatgttggggactgagcatttcattattatagtttctatacaatattcctggggtcaggtaaaggtaggaagtactgtattctcatttttaaaattaataaatactataagaaaagtattgtttgcttttatttccaatactattatgctataccaaatcatttttataatattcagagaataattatatttggaaccttttgaaaaaacaagttgcttagagaggtgtatcaaattgcaggctggtcaaaaatgagattgggtcagtgctaactgaactttgataaagagaaagaggaagattatctgaatgaacttagtagctagggggatttttacatgcttggtacagacctcgggaaaaagacgattttttttttgtcttttctatttctccttagaaatagctttcttcttgagattttaagtgactttttagaaagccatggaacagctgaaggccttgagcacttaaatgctagaagctttgttgataaaataagtcatggttttctagatgtagaaaggaaatcaaagtttagttaggtagtaattgataacagtagctataataacaaaggcatttacttatatcttagtgtttgagttcctttaaatatttctgtgtagtttgccttccacagatatgtttacactctgtaattagtacagagttaatacagttataaggttaccttaatgagtttcatattttgtagaaaaagtaaagagctgagtcacagtctttatattctcttatagtcatctctaaagtgggacaattcactaaaaccaacacatttccattcacccggaggagcaattcaacttcaccgtgaccttcagaaactggagactctattttacatttttatttcggtacctagcagaggagctggaaactagtggtaaatgttggttgagtgactaagggaattattctataattccaggcttgtattttctcagcctgtttcagatgatgccaaacatcaccagcctacggacacctagaacaatcacttaatttactgatagtagtgattctcaaagtgtagcccccagtcagcagcactggcatcacctggtaacttatacaaactgtaaatttgggagctctacagtaaacctactctgggaatgaggcccagtagtctgtgttttaagacatccaagtgattctgatgcaggttcaagtttgagaactactagcctaaaacaataaaaggagccctatggaattgtgaggaccagaagccaattagcctggcccaactactcatttcccaaaggctatgagacctttagcaaagaacagtggaaacttggctggccacattgaatgggcttatcttgagcacagcatttttagttggatgcacaggtccctaccccgccagggaaatctgagttgatgaaaatggtttctcccaactgctattgtttgcagctctgagtcagtgattttatttcatatatatatatatatatatttttttttttctctatattgcccatttgactgcagtaccaggctaattaaggaattagtatgtggcatccattctggggaggtgtctgattcttgtcctgcatcctgtgaacatttttgcaaacactttctagttcatattttctttttttaatcaggcagagacattacaattaaaataccgttaaagtgattctggcaagtattgcaataagcatgttttttaattaaaggaagaacagggagatgcataagcagtatcagctaaaggggaaaatttcttctgatatctattttaattgaaattttgaaaaatgggaaaaacagcagcagcagcagcctctgcttctgtgtgtgtgtggctccatcccaggttgctaggtttaggtattctgtgcttgattaattagtagccagccagagagtccattccctttgcccccaatccttaaagcctgatttatgcctcacatcccccatgaatatgtgagggctcaggcatctatttcctgagctgctagtggataggattatggagcgtggactaagctcttgggggctctcgtttgccagccaaattgattttccgcctctctggctggggacaagcccacctcgaaggcttcccaggctctgctccagtggatcaggcacaagtctaatccggatcttgccaacaaaggaagctgtgtccatccgtgtcacaatgcaggtttctttgggctgtgggtgccttctctaaatgctcctctttcctcctcttcctcaccttctcctggctcctgctcccagagcagcacagtgcagtaaggtacagggatatactccaactctgcccagatcactcagccagctctccttacccaggcagagcaggatttgtccatcttgaatggatgattccttttctccagggaaagggaattccacaggcttcctcgactatccatttgactatttaataattgaaaggtaagaatatataggctgctaaattttttaagaaaaaatggtgaattgggggttaatcaatgtaggcaagtaaattagtttacatctaaaaatttagatagttcaagctttgagtaaatgaattatctagcttggtgatacagattaatctaatgaattggggttctcagatccctccctggtcttgcctccatttacctctcatttttcctctgtttaaaaatagaatcactctccctgggtttattttatcacctgacattcacatcctaactctgtacatgctggctgtgcaccttttctctcttgatcttcctaaaaatggcattaagggtttgacacactcatctacctctttaacagttcttaaggctcttcgttgagcctatgtctacaaccttatgatccttctaactcacctaattctttgatctgctctcaagaatcttgtttcttattctagcctttaaatgttgatggttgacagttgtttccctacctttacccaccttacctttcttctgttcttactctacatgtcctccctgggagacctcatttactttgataatttcaactcctcgttattcaacaagtattgagtgatcacttaacacgttccccatgttccaggcacagggactatggctgtgaacaaaacaggccaaaatcttgctctcatggtgtttacttctagaaggaaaacagtcaataaacaaaataagaaaattatagtttttgttaaatttgcttagtaccatggagaaa

SEQ ID NO: 11098 - DNA, 6000 bp, Homo sapiens
tggtgcatatagctggagcatacctcttaaagtgagtgagaccatggagccagccagatttccttgcccttttatgtccatgcatctgtccacacactcatataattatcaggcatttgttgacatcctctgtgtgcctagcactatgctaagacttggcaatacaaagatggtaatggaagattctttatcttcagtggttcattctcattctgaagagacagttatagacataagtaaggacagttgagagtgatgaacaccataacacagtatgtatcatctgctctgcaacccagaagaagaccctcaacagagacagccaggaagacttccagtggatgtcggcctttgaaccatggctttgcagcttgaaggcctcccaaagctgggctcttacctcacagtgtccaatgcaaacactgctagagctcgtagccctggaattcccttccctttggtttataatgacatggagagtaggtctctcttggttgttctagaggcagaaagaattgctataatattagttctcgaagagcctcttttatgaaaagaatccttttgatgttaataagctgtgtcattgataatttgggcttttgctgagtgttatccatgcagtaaaagcaccccacactttctctaggctggcacttacagagctcactgtgtgtaactttctgccgaggtgcctggaaatcccgaggtgcgttggactaggtccttgcagcaggcatcctgtgtgaatgactgacttggattagtaagactgaggcagggaaggagctctcaaactctgtctcctgtctctggtggcctgtagcagcgtcagttcccggatgggtctttgagggctgaaggctgtggggtgatgccagctctgcccttgtgttggatggtcatgtgtcacatgcataacgggtctaagaagccagtctgcactgtcaccgtagcagtggcgaggaccggggaagaacgtataagcagggccacacagaaggagcacttgctgcttctgcatgtacctcggagctgtgaagacttggataatggaaagtcagacaacaggaacatttcatattcctatactcagagctcagcaaatgtgttctgagtaccttttatgtacttggttccagcctaggtgatgagtgcaaggtgctaagtactgtgaagggcctatgcgaggtttgctgtgggagcaggcaagggcatctgactgagacaggacagctgaacggccagcgggtcggtattaggaaaaatgtcttaaaggtgtgagagctaaactgaatccaaaggatggagcagagccagccagggaaagtgggagtggaaagcagagcccagccaggcacaggggacagcctgagccaagatgcaatggcttctgctccacgcagcatcttggagggaatgtaagtctagtcttccccacccccagcctgagccgcctgggcctgatcttgctgctgctgcagtactcaactgagttcctcttccacacggctagactcttctactttgcagatgaaaacaacgagaaactgtaagtgggtctgctgcaggctggcccgcttagaggcctgggcaggggttcccccgaggcccggatggttggagggtccctccctggttgcacactgcccgcttacctgcaggtggtgccctcccgttatttttttctggaacatctgattttagatatctcgtccctcaagcactttccccagccacccttgaatcctcttcccactcggggtctcttctggagaagtgggtgaagattccttcaagggcgctaaagactgacatccctcttctgcctctgtgagcaggttcagtgcctgggctgctgtttttggggttacccgcctcttcatcctcacccttgccgtgctggccattggctttggactggctcgcatggaaaaccaggcatttgatcccgagaaagggaacttcaacactttgttttgcaggtgagtcgagcagaagtccaaggtgataagccagggagcctcctgaacttggcacagcccttgcagaaggtctggaggcagcagaccctttagtctcccacatattgttattttttggaaatctctggatatcaggcctgaggggagaagagatagcagcctctggttccatccaaaccatcttcatcccctagtcctggtttgctcagactgtagtccaaataggaatcccttacatttgtctggcactttgtggtgcacagaggcatcacacccagtctctcagttgatatcattctcctcttcttgtgtgtgggtgctttaaaaccatgtgcttaatggcttggccagtggcctcctgtggcagtgaggaagccactattttccggagcccctaggcccaggagagtgatttgtccagggttgctccacttttaagtgacatgttaaatgagaagccactcttccagaaattcagttcatttgaatgctaccaatatttgtggagcttacattagtcttgttctgtgcaatgggcgcaaaacagacacagccatggacccctccctcgtcataggagtagcgtgattgtagagctggccgtacgtctgtcgccacttccttcccgtctccctggcacatgtgatgtatgctggagcagagactgactgaagcacacattcttcctggtgatagtggtggtatcgaagagggccagtggtgaaggcggacgtgataagccatgggaactgcagggcccctggcccttgttctcccctgcacaacccagcccaaggctgtgagcccaagccccagcctaagcccctaaccccctgctctgcaggctctgcgtgctgctgctggtgtgtgccgcccaggcctggctcatgtggcgcttcatccactcccagctgcggcactggcgggaatactggaatgagcagagtgcaaagcggagagtcccagccacacccagactaccagccaggctcatcaagagggaatctggtgagtgccagggcccttggcagagagtggagccagggaagtctgtctgggatgggtgggaggagccaaggcacctggcttcttgggcgctgcccagaccaatcctgccagcttctccttcctgactcttacctcagggctggggctcctagctccctgattggcacgtggctgggtgtgggccagggacaggctgtgggtggggctggccctaactaggctgggagccctggccaccacggggcagggcagtggctgggtggggaactctggcaggaagcgtgtcctcagggtggcttctggaccccagccaagtgctgctactgccgccgccgcccattctcagtgccggacggcggcctctgtcctcacctgcccttttgctccacatcttagcctgcccctgcctcccagcttgctggctcctcctctgtctccaagaatgactcacagtgacatagtgctaggtggggggtaggggtgggacacttatcctttggcccgtgcacgcactccagtcatcacccaccttcagcaggtcctcaggccctgccagccctgcacgttctgcccagcctgggggcctgtctgcactgggcgctgctttctgactcacctgcttttctctaggtggccacctgcttggcaaaggcttatgtgtgtttgaaccagacacgcgcgcagctgggtgtgtcacagagtcaggcctggctggcgggggaggtatggggcataagactgcagccagtacctctgaatttgagcaagcgcacggaggtattttgaacaatagagcacaatttttctgccagaggagtgtcaggcatcctgcttgaggccttgttcctacagcctcttgtccccctcccttctgtggccactgctcctgggagttcttgctgaactggaagtgggctgatgccttgcaggggcctgagaagaactgaggacagtgagcagtgacagcatctaagtgatttcggcgagtatctagccccagcctcaggcttgggcaggctggcctctgttgttgctgagttactgtgtgtcatcccaggcccctcctgctaaagtgcagtcagagaccaagcctctcaaacagggccactagtccagggccctggggaagacaggaccctcctgggagccgtctgctggcttgcatttgctgtgcaaggctgcagcctggcgcccctttggtgcatccatgtatagcagctgggctgcccgggccccttccttggcctggccccaccctcccctcttctgccttagctccagcagaaacaccatgtatgcttgtctctctccacttcccaggttaccatgaaaatggagtggtgaaggcagagaacggaacctccccacggactaagaaactcaagtctccctaaggccaaagtgctaagaacaggaatcctcttggtgggggccgagcagggggcaaggagcccaggccccctccctgcctcctccttcctgcctgtgatgctccgtctcaaacagccgaaacctgtcttgcaatggggggagggggcgtttcgctttccttcttcttggcttcctcttattcttccacaaaccattctcaataaagccaaaaatctttctctttctccccctcaggccacctcctgtcctcactcctgtcctgtgctggcttttctggaacgccaggcgcccatggctggcacctttctgcttgctctgtctcttgccttatggctgctgcttttcctttttacttcctattttcaccttatcttgcaatttttctgtctgatttttacaatgggaggggagctaagattgcagtcctgtccttcggtcccccagggcctgccggtcagaagcctggggctggtaggcccttggtggtcctcatgtggatgggcaagaagagagcggccatctcggatcataatctccttggtgctgattaactgacgagatatatgattccagttctgcatgtaccatcttgaggcacagcagccactgctcgttgtaaatgccaaggcatttggctttgggacgtgacaactcaatccagaaggatggtgtgaactcggttgggtcccgtgactcgagctcctaccagtggctggccgcggattggaagccagcctgctgtcgctctgtggggggggacacgtcttcccactgcttagagcgagagcagagcaaactgcgcagcaggcacctccagaaaggtaatggtggcagaacccacagtggagtcgacctaggcctttctccagcagtcccagtcgccattgctttttcagccattcacaagcattcaaaaccaaaccaaacagcagttcatatacctgcctgagataggctggtcctcacctccagagccagccagccccgtcaggggccaaacttactaccttgacttcatctctagctgcagaaacactaagtctcaagggcttcagccccatgctggtcccttggtgttcagggagggtcacttggaccgctgttcatctggccgcccttgttgagtgttctttggaattgtcgttttttgagcacaactacagcattttagactgcatgaaaccatgactgactgagagtcactctctgggtagatgataggcgcctttctggccccttccctcacagattctttcccctcccctccacctgaagagaaggcctccaagtccttttggtgccttgtgaggacttttagaaggggcgttcagctttaaaaagccggtcctaattacggccggacgcagtagcttacgcctgttatcccagcactttgggaggtcgaggtgggcagatcacctgaggttaggagttcaagaccagcctggccaacatggtgaaaccccatctctactaaaaatacaaaaaattaggtgtagtggcaggcacctgtaatcccagctactcgggaggctgaggcaggagaatcgcttgaacctagaaggcggaggttgcagtgagcggagattgtaccatggcactccagcctggacaa

SEQ ID NO: 11099 - DNA, 6000 bp, Homo sapiens
tgtctacttaacacgcaacttgaagaatttctgggaaattgaccaaaacagctctttggaaagaagctaggcctcagtcccaaagggaaaggtggctgatgtgactttgacttgaggattgtctcctgtgatgtgctcctagtggggctacaggggtcagtcctttgctttgagcacctctgtagtccactacccatggacacattgctatcctctgagggggatggagggagtagagccctctactgctagcccattttatggaggtttgatgagggtcttaggtgaataagcttcaactcaggtccttggtcttggtttgttaaattattctatcctttctgaagccagggagatttgagaatttccatgaccccattatgaaattgatgatgaagagttttcatcttgtgaacagagttcagatgaatatgatcacaaagtcaagcctcgtttaaaatactatgaagctctctttattgctgcacatgaaacattaggcctagatttaggggaaagaattggcagtcttgaactctttgtcatttgtttagcaaatatttgtttgacatctctggtacgctaatccctgtgctggaatatgttgatgcagatgcaggagccacagtcaccacccttcgaaatcttacagaagagcacacaacaggcccattaacaaagggagcatgtgagcaaacagctacaggtcactgcaaggtgagggtagaggaaggagaatagacctcaggctctagtgctcaagggagtaatcatgaagaaaatagaattttaactgaactttgaaggatagataggattttgagagctggagatgggggtacataggtgcagagggcattctagttgaaaagaataaaacagtggtcactgccaacacttatgtttaatcctatgaaccacattgggtgagacaggcattatgtacttcatggtgggagccttatgtttatcccatttgaggactgagaaaactgaagtttaaaatgttggaataccttagctaaggtcacctagcaaaacgtgaaaaagctagggtttaatgggctaatgcccaaacccatgctctttccccttggctactgtgtagcggttaaggaagggcatgtttggagaatgggaagaggtccaatttgtgtgcacgtaggggagaagtgaaagataagcttgggaccacgttgtggaagactaaatacctggacactgcacctaggattcagggtttcattctgaaggcaatgatgactcactggagggttttaaatatggaaatatggaattcagtggtttgaggggcacagcggccccagtggaagtgtggtaggtgtgagtagcagtggagggagtgttgcattgaagcatgacagagctcctacagggaacctcaacaggtggaagaggaatggtgggcctaggtcaagtggagtggcaccgagtgagcagcttcttgtgtgtatacctggtttatgcttcaggagtgaaaaaagttcaccacccaatactgaggtttgagttctttaactaaactccaaagacaacaggtgttttatacatggattcccctgccccatttatgggtggggagagggcaaatggaacgttaggttaactagtttaaagagtcaaggcaatcccacctggatcccttcttaaaaaggaagcctgtgtccaagagtcccttctgctgagttaacaagaccccttcaacccgttctcatctttgggattgaggcgcctgcagaattacaagagaggatttgtcctcctcttctccagagagctaccttgattttccccacccctgccaagatagacattcatgaatgcagtcatccacacctccacaagtgcacacacaccagccatcctattttaaaacagacaaaagcaaaaccaacccaggatgtctctggacaccataaaccaaaatagtcgctggaaaaaacagtgatggtaggttccagatttaagattcataaaatggtaacatttccaaaaatatctctgatgaagacagtcatatgttagtacgtttttaattttgccaagagaggctgctgttttaaaaaagaggatcttttacattgcacgaatttatcttcatgaaaaccttactgcgttgtccttatttttcttattcgcggttgtcccacaaacatttcatcaagaagcaccagtttcctttctgtaccctcaagccacaggaggtagttccttggttccctcctggggtagaaagaagggcagcaaaaagagcactgtgctaagctggcccttccctctccaccccaggtctcaagagtgcatgccagcttcctcccccgacctccaacgcactttggattcagactttgtgtcttgcttcttaggacttctgatcagcctgcatggatcctgcttgactggccatgactttagagagtagtagaagacagaaaagttaatacaccttctaatgaattaccatgtgggtactgatctttcaaagatagtatagaatagtttgttgtgtggtctgtttttaaagtctgttaacatgaagctacagaaatttggaacagaccctttagagataatttagtccaacctcatcattttatagtaaaaacaacaaaagcccacaggaattagctggcttgccccaggtgctgggcctggcactcaagccttcctcctaattccatggctcttcatcatgaactgatgcttctcccatgctaaatccttgtgctcttctttggccatgaaaagcctgttaactctcagtgcttttttatgtgtagaaggtgacaaagcagaaggaaaatggcaagaagaaagataaccaaagaaaaatcagatagaaggcaggatacccagcgtgagtgcagcggctacacccattttttgccatttatttctgatgtcagaccaggtggaaatatcacaaggtgtcttcagatccttgtaatcacctcttgttccctgggggggaatctgtgttgctcgccaagctaaactcttgtgttcaaggacagggaacacaagaattggggtgcagactctacatcacagccctgcagttatcacgggcccattgaggggaggggcccgtgataactgctgggctgtgatgtagagcctgtaccccagttctggggtcctctctgtgacagcatagtgcctactgtgctgcaagtgattctgaggcatgggcacttgtgaagccttcagtttgtgaagcctaattcatggatccggaggattgtacatacaacaacaggaaataatgaagataaagttggactaaattatccctgagcctacagcagtggttctcaaagtatggtttccacatcagcagcatcagtatcacctggaccttgttagacatacaaattctaggcccccagacctactggaacagaaacacccccagggacccatgttttactaactcacccctcaggtaattctggtgctgcacactcaagtttgaggagcactggcttagggaaagcagccagaggcttctgtggggcagagcagggagcctgtgattggcttggtctgggcacttgtgctaggaccaagggggtgacgggctgagggttctgcagagaagcagcgtggtaaaggaaggtctctgagggcagcagcctgggagtgacttttaagcccaccccttaggaaattgagactcaagtcattaaagctttccttttgtttacacttgcctacaattgttttttctcagagcaaacttggctcagcacagcccaaggtaaattatcacagattctgcaactaataaagttcaatgaggactttacatggctcagatgctgttggtgactggctctttcttcttttttagttagtaacaggagtatgggaaggcaaatacaacttcttctgtcagggcacacgcaccgcaggagaatcagatatgaaggtactgtctctttttcagaaactttattattataagtgttgagtttttaaaaataaattgtataaaatacaaaatggcccataacctcactgcccaggcaatccctgttgatatttttaaaagaataaaaaaggcaatatatacacatcaaattaaaatttgaatgtgaaaggtataaaataaaacctaaagcatccccctctgtaaaaataactccggttaacaattggcaggaaaaatcacatgcagtcagtatgttatatttacacaatcaggatcataagagcaatgtcttaaatttttaaaatcattcatccaagtacttttttccgagtagtggtgttaaaaataaaatctgacttccactcatgaggtttgttttaaatcacaggccaacagtcgcagctcagcatgggcagtcatctccttagagcacttgtttgacatgtttaattgggcagagacctgacactgcaggttctgattccttttcttctgtgtcacttatcaggtcggctgctccatgttagtccctgaaatcaatagcgtttttcagatggttttcctttgctaatggctgtgcaggctgcttccagagggaataggcagacttcaaggttttgaaccttgagcctcatgtttttgttagtctcaaagagtgtcagggaccctttcaaaaatattccctgtagtcatttcaaacccctccagctgtcccaacccaatcatgttctttggttaaaggtacttggagagtgaccatagctcccagccactgatggacattaagagctcttggggcactcgggcttctccgagttgacatcagatttttggatattagtgaaacatgtcagaggtgatattccagagaagccgtgaggataagccttaaatctttgaccctttcctcttagattatccgtgtcctctggtggtactacttctccaaactcatagaatttatggacactttcttcttcatcctgcgcaagaacaaccaccagatcacggtcctgcacgtctaccaccatgcctcgatgctgaacatctggtggtttgtgatgaactgggtcccctgcggccactgtaagtattagagacggggacttggggaacaggtgtgagcagggaggagagttgaaactaaggctttcagaaaaggtgctgtttctgtaaatgtctaggtcaggctttcagctttgtgttcaagttgcttttaatgatagtttatgtacctatgcacacaaaacccttttttagttaagtgaactttctgtgctgattgggtgagatgagggagataccactggggacatattaaggaataggtacaatattctctgacttagagggcaactttccaggttctttctggtccttctgtatggtgtggaaggtttgagacgggcaggtgaggaaaataggatcacactgttgcatgagtaccagggagcaaggctcattttgaaatacagctttagctgtcatgcattaggaagtctccacatgttctaacaaccctcatattccctgaagcatggtgatcaaggtgtcttctataacgagcaccaaaacttgatataaattttctaaggttgtacttggtttttggaaagcttgtagtccaaagtttcttataattttcagagattgccaccttcagattcagcctgggagttttagcaaatgtctcagtcaaaagtcccgtcatccaaacactgaagaatttaactgagaacctatgggtctatttatggatatttttttctctgggatagcactgcccttgattacctgagcctgctaagattcacagtgtcatggaattccagagctaggaaaaaaaaaaagctttccaaatacagatcctttgggtttgggaggaaactaagaccacagaaaggtgggtagagttggggctttctgctcttcctcccactgtcagagctcatgatggtggattaactgacctaactttctaatagaaacagcccctccctacatttgaagagtgctttaaattttcagagaactttcaggaggac

SEQ ID NO: 11100 - DNA, 6000 bp, Homo sapiens; identical to SEQ ID NO: 3443

SEQ ID NO: 11101 - DNA, 6000 bp, Homo sapiens
attagttctgattctcttcaaaacctaatttgcataactacaatattatatatttataaatacttaattttgtacaatccttttcctacttgactaagaatatcaaagatgtccccaaatgcttacttgaaggttgatttagtcacactagcagaaccccaggctcaaatgtcaaatgggatcatttctgtacagtgcagtaaccatattgcagtctttctgctgctgaagttacagttgcatattactcatcaaggcaaaatgtaaatgtttagtgattatatgatatggtttttgttaattccccaaatgggattttttttacctttgtttatttgagaacaacaactgaatgctgaaatgcagtggctgatgccagcaatctaaggcttcattagtacagacgaagcaatgctcactttgctacataaataattagagagattaaatgaaaataaacactgagaggatgtgcagacgctccgaagttaggtaattattttaattactctagtgacttccagcaaccttcattatcagccacagatcaagcttaaattgttttatgtaagaatatcataagctatatggaaaagtaccatagcttacttagtgattatgcttcataaaaatgacattttctccaagctcccatttaaaggagttgtttccattccagcccctgatagactcgtgacatatttttaaagtataagtttttgcacttaaaaatgttttgccctggttttgtacttctaatggacatccttaatgataattttcgtatctttatatctttgctcagatttgatcataagagattcggggccacatattgagtggcttaatgtaaaacaatatggcatattcagccatctgaaataaatgtcacttggaatcatgtcatccttattgcatgacaagctataccttgcatttggggtaaatttatttcttctttcttccactccctagaccaacttgggaagactctaacatacactctaggaattatcttcattacaagcagaggtactatttagaagcattatcagtcctgtttagatttcattttatattcatttgataacgatgatccatcaagatctcttgtgttaaggtgttcttttgaggaagggttatctgtattgaaatatcatttattgactgcctgtgtaataatggctcttcttcaaactacccaacatacaccatttaatccttgcaagattcccatggagtatgtattattaaccccattttccagatgaggaaacaggccttgggaggttcactgattttctaaagttgcacagtagaaagtatcccagaggggactcaaacccaggtctgcctgactccaagaaccatgaagctccccaacagatgactgaatgaaataaacctgggtacaaatgctaagggtaatagaaaaaaatgaagtgacagtctgtgatgtgctaattaagtgttgtgttttatgacacccatgaattctgggcatgagctaaagtctcaaactgcaaattcaattgattttgaaagtgctttgggctaggcacaatggcttacatctgtaatcccagcactttgggaggccaaggcataaggactgcttgagcccaggagttcaagaccatcttgggtaataggagaccccagtctacaaaaactaaaatgaaaaaattagcagggtgtagcagcttatatctgtagttcctgctactcaaaaagctgaggcaggaggattgcttgagcccaggacatcgagactgaagtgagctgtgttcaagtcactgcaccccagccttggcattgaagagagaccctgtctgtctgtctttctctctctctctctctctcacacacacagacacacacacacacacacacacacacacacacacacagtgtttcatctctgaatagccctggttcctggagaggatgtaatagcaaataggttttatggcatagttggaccaaccaaaagttccccactaacaaaggttagtgatgtttttagtacaattcagtaacaacatgaattttattccagcaaacacaaggcattttaaccaaatttaaaatttccaacaggatgaaccagacttcagtaacttaggggagaggggtgcactgcttcctaagaaaaaccttttcttaaagggaggccttgacttctttcctcttccccatcctggcatgatgctggtgcagaatacatttccaaggttgtgttatattcagaggcacattaggctattcgagagaatgggaagaggtctaatggcttcgttgttttctatgtttaggatgcactaatctgcagagtttaatgtatgagttgtggatggcacagggaagttgggacagaaggctagctctagggagttgttggggtggctgggtgttagtctgaaatttcactctcacgtttcagaatctgaagaggaagttagggaaattcacagatgagccaatgccttttaacaggtggggggttcaggggtaggactgggagaagaggagctgtcagaaaagctggagagccattcgccccagagctctcagttgcaccagaacgcacagtcggagagagatttatttgtgaacaagcccgagaaaggcagacaacccagacaagatgggctcagaaattatttatcataggctagggcagaacagtctggagctttccttctgctttgcaagcacttccctgggacctgcctgggaagcacagcccttcttcctggtaagttacagaaggtcaggcactcagctagtaggccagctagacagcaaaaagtgtctaaactaagtgccaactgtttacttggggtcttccagaccctatcatggttctattcgtcatggtacactctgtttgatttcaatcgcaccatctttatatgtaggaaggccaaaccggcccggctgtgttgggtgggatttctgcaggccatgcagtgaggacgccactagctatagacacacgcaggagacccacgttctatttccatatgccacttgccactgacctcagagaaatcattttaaaccctgaacctcagcttccttatcctgaaaatgaaggccattctacttcttaggccttcttgacaggagccttgggagagccaaacggagtaattccggtgacagcgaagaactgggagggaccgtgactccaaattactgaagaaaaataagttaaacatgctcggctggagttttaggaattccacccgcccccacccgccatgatcaaactgcagtcaggcagcagccctccgaattgattctttcttatggactgtctcacatgccaaacacctatgtgcagcacccctccatctccgtgggctcctattgatgtctgccttgcagtgaaagcgctttttgttgccgctgttcgatacaccccagcacatcaacgcagcagctgggagcaggaggaggaatcccttcgctttctcccctcctttcactccgaaccctaggcatcagcagcaacgcgcgtagcccggcaaatttccgcacgtgaatggattttcctggctcatctccaaagaccttgcggtatttcacaaagctgaagagaggtgaacgagcatcaccccctccaggaggtcgtgcagccccgcggggacgctcctcccgctcctccacccgcggtgcagcggccgcctcccgagcttgctcgcggggccgttagcgccagacccggcggagagccaaggggtccctccgcgcctccctctcgcagcccctctccaccagtagcagcgctgctgtcttcccacaggaggacttgggaggacgctggattctgcagcgcccccgccccctcgctttttctttctttccttgctttgggatcttgctgctggatccggagaggttctgagaagacaagagcaagggactgagagcaggcttccgctgcggcgcgcgaacacagccgggacacaacccccagcgtctccacccgctcctcgccaccccggcgggaatgtgaggaaggaaagcccccagcgccgccgcccgccctcgaaggcgtcccagagagcgtcctgggggcccgcggctggagcccttgtgcccgcagcaccgccggactggagcggcgaggcgcaccgggtgccgcttctcggcttccactcttcagaaagagcgcggtggggatcagcgcctttcccgcactcggcacaactccgggaccggcggcgcgcggctggaccgagtcccgcttcccgccagctcacctggagtcgggggcagcccctgcccgcccgcctgcaccccttgtcgctctagcttgcgcgaacctgccgctcctccacgcccaggtagtgagccccgcggctccaggtctctgcagcgccctcggccccatggacagcgcacccatcaccactccctaagtgctggcgccgccgctgtccaagctgcgcactggggtccctcggctcgcccctctctggggtgtccgagaggccagggagcgtgcaccatgaagtccgcgcttttcacccgcttctttatcctcctgccctggatcctaattgtcatcatcatgctcgacgtggacacgcgcaggccagtgcccccgctcaccccgcgcccctacttctctccctacgcggtgggccgcgggggcgcccgactcccgctccgcaggggcggcccggctcacgggacccaaaagcgcaaccagtctcggccgcagccacagccggagccgcagctgcccaccatctatgccatcacgcccacctacagccgcccggtgcagaaagcggagctgacccgcctggccaacacgttccgccaggtggcgcagctgcactggatcctggtggaggacgcggcggcgcgcagcgagctggtgagccgcttcctggcgcgggccgggctgcccagcactcacctgcacgtgcccacgccgcggcgctacaagcggcccgggctgccgcgcgccactgagcagcgcaacgcgggcctcgcctggctgcgccagaggcaccagcaccagcgcgcgcagcccggcgtgctcttcttcgctgacgacgacaacacctatagtctggagctcttccaggaggtaaaggccagcctgccccgctgggtgggcgagggcgggagtgggcctccgggccggccgggctgcagtcacacgccccttgcactccgggtgcacttttgagttctcagttctccgtgcgcgcattcggggcaccgagtggagccgctccttgctggcactccgcagcctccgctggccgtgggggtggaggggctgtgtgtgagaggatcactgtggcttaaggggcgggagtctgccctggggcttttctgtgtggagattgtgtcaagagaatagcacaggtgtgaggcgcgggaatgatttccaggggccaggctcctgacgacctgaggatggagcttagacctgcaggcgctggctgcgataggagatcagggagggacctgcaccgtagcgggtggcggtggaggggtgggggtggtggggacgggtaggctaggtgttactcgaggcttttcagtgcctacaggtgtgattctcagtctaggaccatatagggagaaaggtggagatagcctagagagaaatttgactattgcggcccactggcacggaaatggttgttagaagaaacactgacttctatggaggtccttcctctctttcccacacctcacaaaagtcttttctgaccctcaagattactttttttttttttttgcaagaaaaccctttctggaaaataaactgttctgccctgtggttacgtcttttttgcagcccaaggtaaacatctgggctgcctgatcccttttcacaacctttctctaaggcctctttttggcgagttagccaggacacatttggcggggccttttgcgtctttctggtgcagccaggtcctgagtgcatccgggctccctgctgttgagatggcccatgagttc

SEQ ID NO: 11102 - DNA, 6000 bp, Homo sapiens
agtggaaagtagaattcagttttgtttgtaagtttgagatgcgcattagccatctaggtggagatgtctcaagttaatgggaaaggccaggcgagagataagtgagagttgtcagcacatgaatagtttttctttcctaaaacaattctttcttcatacaatctacaggaagtgggagtagtagttcaatgttagatgaaatcacaaaatggatgaatgtagaaaaaaggtgagaaactgaaattttagaggtttaagaggataaggatccaggaaaggaaagtaaaaggagcagccactaaaataggagaaccaccgaaggagtactatggaagccactttaagaccatgcttcaaactatcatattctttcttacatgtatggtttacctccaaattaaaaagtaaaagtatatggtgagggacggattaactatgttaaatgctgctaatagatggagaaggtgaaaattgagattgacagtttatttagcaacctggaagctattggtgattctaaacaagagcagtaaaagcctgcccaaaatgggatcaaaaaaagattaggaggaggagaaggagagacaagtataaagaaatctataggatggtaacggtaatcaaaggagtttgttcgtttgtttttaatttgggaatgtgttaatagatggaatgatccagtaaagggggaaattgtactgaataacatgcatacaagaatctatgtctactttaggatctatttaatgtgaattcatggctttttttttttttttgatatgaagtctcactctgtcgcccaggctggagtgcagtggagcgatcttggctcactgcaagctccaccttctgggttcacgccattctcctgcctcaacctcctgagtagctgggactacaggcgcccgccaccacgcccgccttattttttgtatttttagtagagacagggtttcacggctttagccaagatggtctggatctcctgacctcatgatccgcccgcctcggcctcccaaagtactgggattacaggcgtgagccactgcgcctggcctcatggctctttttggacagggtcataagcttcttagatctgtcacccaatgtaattaattgatgtattggttaatactgtctttagcagtgctaggggattggtaagaaatccacatcatctctgcgcttgggaaatttacaatctagagttggctaagtggagaaaacataagagagcacatacaactaacaaattcagattatggacaatgtacttaaaaaacccccacgccctagctattggcacgtggtaattttgcccagagttttggttatatgcataatccagaggggtgtagaaaaccaggtcctttcagtaccaatctaaggaagacatgaattggggtgtttataaaccttggtgaggaagagaattttaactgggactggtaacttggtgggcccattgacatacagtagattgtgaagaagaaaaccccaaggattataaggaatagttttaatattactaatttttatcctttgctgaaactatgggtttcttatttgaaatggcaatcaaataatttgtaagagtttgtagaaagtggaaagattattgtaatacagggtagatatttgcatttgtacatacttgagggtaagtacaagaaataaacacttgtaatggggattacttaagcaaaatggatgacaccgacagcctttctgtacaacaaataattgctgtgcttctctactccagtaatgaatgtagtgccctgctggatctgggacagcaagacttttgagtccagattcgccatcccatttcttgttccctaacgtttcctcagaagcgagcgagcctcttccacaatttggggacactgtggaagaacttcttgcttggggagttctgcagcagtcgaaggtacaagaatataaaaactggtatctcgacacagctcttacagcatattctcaacacaaggaacagtaatgtgccgcagcaattccttcggtggaaaaaactgactgtatccgcgtaagaggagtaattcttttttgaattttatgaggcttcagagctgtatttcggccaacccagtctttgttcagtttctagcggcttcaaggttgcccagttttacgccttctcgctcaaaacagacactagttttctttgatagcctggtctcacattgacttcatctaagcttattacattcgtctcataaatcgtttgctttttccccagccttagctccagggaccagcctactgaacatcgaaaaggtcaggaacgagatcacgggactgagacggcgagccggctagagcggatagagccgtactgccgctctagtttttcttttgctctctatggttaggagcgcaagcctctcttcggcccggaaagatttaagttcgtgaatgcatacgcaagactcggaggtagttccggttccggcgtggccattttcgttggtggtgttcagttgtggcggttgctggtcagtaacagccaagatgctgcggaatctgctggtgaggagcttctcatcttgcattcatgatgggggcgagggagtggagaggaggctgaggcaccacgacagaaaaccctcacctgggaggggtgccgaaggcggctaatgaagtcaccttgattcgtgtcctttttccctgaccttactttcccttccgtctattcctctcgccccaggccgttactgggtagatgtaaggagtggagaggctggggaagtgaccagagactcgtgggttagacccgtcttgggttcttagtcaccacctctaaccctgtcggtcattgatgaggttagtagctccgatctgagtaaaaccaagacccaggtggggagtgtctgacacccggaagcatcaagcagaaaggtgtttttctggtactgaaaggttttaagtttcaatggttttgagctttgcgagcttgagaaggcagtttaaaaaccaagccattcaattttgggtggaactttaggaatagtcatggctgaagtgcagtgttatttccgtcaggcgattgtgcattgtccttcacccctccatcgactttgagcatgtgaaatatttccccaaattttgataaagaaaaatgcgacaatgattattttattttttaaattatttaatgaagttttgcttcattaaaatcctcaatgtaattttagaaaatcgagagcatatttgtttcattatttaattcaactggatatgtagtgcatgtctcttctttaaaagatgtataccctctttaaaattttttaggaaaaatgtaatgagagaagcattttaattgagaaggaatcatgccagtctatttgctgtcaagtaatagggttttttttgttgttgttgtttttatttattttattttattttattttattttatttttttttttgagacgtagtctcactctgttgcccaggctggagtgcagtggcacgatctcggctcactgcaatttccgtctccaggttcaagcgattctgctgcctcagccttccaactagctgggattacaggcgctcgccaccaagccctactaatttttgtattattaatagagacggggtttcaccatgttggccaggctggtctcggactcgacctcaagtgatccgcccgcctcagcctcccaaagcgctgggattactggcataagccactgtgcacggccttttttatttttttattttttatttttattttttgagcggagtttcattcttgtcgcccaggctggagtgcagtggtgcaatctcggctcactgcaaaccccgcctcctggattcaagcgattctcccgcctcagcctcctgagtagctagaatttcaggtgcgcaccaccatgcccagctaatttttgtgtttctagtagagacggggtttcgccatgttggctaggccgggtcttgaactccttacctcaggtgatccacccaccttggcctcccaaagtactgggattacaggcgtgagccaccgcgcctggccaagtaacagattttttttttttgagatggagtttcactctttttgcccagtctgtagtgcaatggggcgatcttggctcaccacaacctctgcctcccgggttcaagcgattctcctgccttagcctcccgattagctgggattacaggcatgcaccaccatgcctggttaattttgtatttttagtagagacagggtttctccatgttgttcaggctgttctcgaactccggacttcaagtgatctgcctgcctagtaatagaattttttctttgaaacggagtttcacacttgttgcccaggctggagtgcaatggcgcgatctcagctcactgcaacctccgcctcccaggttcaagctattctcctgcctcagcctcccaagtatctgggattacaggcaagtgccaccacgcctggctaattttgtatttttagtagagatggggtttctaatgttggtcagagtggtctcgaactcctgacttcaggtgatccgcccccctccccggcctcccaaagtgctgggattacaggtgtgagccaccgcgcctggcaggtttttgatgatatggcagtatattatgaaaatatttgggtttggtgtattttggttaagcactatttttgtaatatgtgtatgtcaatatgtttgcatcaaggattataaaatgctactggttctgttcaggtagagatcatgattttattttttggttagaatctatatgaattgcttcttgaatatgttatttggagactgcagaatgtaattcgaagagcagaggatggataacaaattgaaaaacctggatgctcttgcatgactttgctgctgacaaatcagatatgcttcaagtctcaatttaccttttctataatatgaacgactgaaaatagttggttttgaaggtttctttaggctctaagtctatttaataatattttcattttaggctcttcgtcagattgggcagaggacgataagcactgcttcccgcaggcattttaaaaataaagttccggagaagcaaaaactgttccaggtactgaagtattttataggagatgttacttgtaattattagattaccaaaaggtaagagttgggataaacaagtatgtgtataaattagatcatatgacaatataaacattacaaaaaaagtcaaggacatgtaccatagtgctaatagtggttgtctcttggggaaagacctggtggagcagagcaatttacctttataagtagtttgattatgagtgatttttgttttattatggtttctagcttttcctaaataaagcttaaagtgattaaaaatagttgtatcatatatacctaaaaatacaatactttattgaacagatgtactaaatagctactgtatgctggattagatgctagggatataatttagggttataaaccaaaatcccttccccacttttttaagggaaaaaaagtttcctatgactaaatctaatgtgtggcaattattggttcttttatatttaagttatattaaagttgttgagatcagtgtgtatgttttatagctttaatgtttatatattctttggaaagaccgtcattaatggatctcaaattaacggtgaaagaagaatgctgacttttaggaattcttattttaaaagtagtagtagtagagacggaataaagaaaattgtaggtcttttaaattttaatacttaaaatactttaattctagggatttaaggagctatatcattttatatgcctgttcttttgaaacttagttggaaatgagtgagacatttattattgtcttttttttttttttttaaatctaggaggatgatgaaattccactgtatctaaagggtggggtagctgatgccctcctgtatagagccaccatgattcttacagttggtggtaaggcctttggaatgtttgaaggtttatagaa

SEQ ID NO: 11103 - DNA, 6000 bp, Homo sapiens
agggcaaagagattgaaagaggggagtcacataatcagcatacgtttatgaagattacccccacagctgtgtggcaagtgatcaaaaaggaacaggaccagagaagagcaggaaaactggtcagaaagcaggcgccctaaccctggtgagcagtgatgagatcctggaagtggaggtggcagaatgtgggaaggtgggccacatttaacactttatgcctgttccaaattacttttcttaagaatcatgacactagggtattaaataaaattattttcattgactctgtgtcctgtccccacctacagtgatgctacctattcttagcataaatatcttttccttggggaaacctccttcagccctctagactgggtgtccccagagcatcctgtacgtccccaattgtagctctccccatgctttcttttaatttctgagtcagctgtctgcctcctctgctagatcatatccttcatgcgggcaaggactctttttttcacagaatgttgctctgttgccagactggagtgcagtggcataatctcgcctcactgcaacctccgcctcccgggttcaagcgattctcctgcctcagcctcctgagtagcagggattacaggcgtgccaccatgcccagctaatttttttaaaatttttttaaatttctttttatttttagtagagacggggtttcaccatgttggccaggatggtctcagtctcttgacttcgtgatatgcccacctcagcctcccaaagtgctgggattacaggcatgaactactgtgcccggccaagggcagggactctttcttgatgctgtcaacactagtgtctagtaccgtagctagacataatacaagtgcatagtggatgctccataatttgttaatacatgaataaatgaattattaattcagatattagggtctctgaattaataactcatttattgttagttcaacatttttaaaatttgttctgaaatagtgattgtctctcccccaaccccatacagtgtgatatgtttcaggaacaacaaatgccaattaacaagtaatatattgttttaattcttattttaattgttatagatatcactctatacttctaatttttaaaaataaactaaagaaatgaatagcccacattttaaacaaaaatttataaatagtaagatcagttctctggctgtttattttgaaacaaaaccaaattgcttagcttagaatcgaagaaccttaaagtttgggcctttcctcttagctgttcacatggaaatccttggacactctccagcctgtctcctgtcaccaggcacacttgtgtcaccaacctgctcatgaaggggactatcaggaggcctcctccatatccctgctgtgaaaaagctcagtcttggccgggcacagtggctcacacctgtaatcccagcactttgggaggccgaggcaggtggatcacctgaggtcaagagtttgagaccagcccgaccaatatggtgaaaccctgtctctactaaaaatacaaaaattagccgggcatggtggtgcgcacctgtagtcccagctactcaagaggctgaggcaggagaatcacttgaactggggaggtggaggctgcagtgagcccagatcgtgccactgcactccagcctggtggcagagcaagactctgtatcaaaaagaaagaaagaaagaaagaaaaaaaaaactctgtcttcctatacgcctcattgcaagtttggtctttgtgacatttttcttggttgatgtggacatcctagaagtcatgtcagccatggctccgtccagacctccccttctctgggtgaagaaacttgtcttgaggagcatctctccccacatggcctcaagcttcctcagttctcactagctccctcctcccccgctacaagtaacatacagaccacacaactcatcacttgattctacactgtcttattctttggttgtcttttacatttagtctcatttgtctgacaaggtgaagtctccaagagtaggggtcatgtgacacatcagtgctctcgccggccccaaccagcactgggataccatgtgtgtgtgacaggagaagccaggtgctaaacacttcctaacgtgactatgaaatggacattgtccccaagaaacatttcatttagttcagtcttcttggccctggaggtccttcctggattcacacactgacttcaatacagagggtttaaataatgaaaaggtgatacatttctggcatgtgccacgccatccctgaactttggggagcttttctctgagtgacttactcattttgttgactgaatctgatgagaacttgacctcctactgttcagagacaggaatgagttgccatgacagtacatttgccacatttacagtgtctctttgtttttattcttcctgtttctcaccattcggcttatttgttttccctcctcttaggattgccccctgtgggtcactttctcagtcattttgagctcagcctaatcaaagactgaggttatgaagtcgatcctagatggccttgcagataccaccttccgcaccatcaccactgacctcctgtacgtgggctcaaatgacattcagtacgaagacatcaaaggtgacatggcatccaaattagggtacttcccacagaaattccctttaacttcctttaggggaagtcccttccaagagaagatgactgcgggagacaacccccagctagtcccagcagaccaggtgaacattacagaattttacaacaagtctctctcgtccttcaaggagaatgaggagaacatccagtgtggggagaacttcatggacatagagtgtttcatggtcctgaaccccagccagcagctggccattgcagtcctgtccctcacgctgggcaccttcacggtcctggagaacctcctggtgctgtgcgtcatcctccactcccgcagcctccgctgcaggccttcctaccacttcatcggcagcctggcggtggcagacctcctggggagtgtcatttttgtctacagcttcattgacttccacgtgttccaccgcaaagatagccgcaacgtgtttctgttcaaactgggtggggtcacggcctccttcactgcctccgtgggcagcctgttcctcacagccatcgacaggtacatatccattcacaggcccctggcctataagaggattgtcaccaggcccaaggccgtggtggcgttttgcctgatgtggaccatagccattgtgatcgccgtgctgcctctcctgggctggaactgcgagaaactgcaatctgtttgctcagacattttcccacacattgatgaaacctacctgatgttctggatcggggtcaccagcgtactgcttctgttcatcgtgtatgcgtacatgtatattctctggaaggctcacagccacgccgtccgcatgattcagcgtggcacccagaagagcatcatcatccacacgtctgaggatgggaaggtacaggtgacccggccagaccaagcccgcatggacattaggttagccaagaccctggtcctgatcctggtggtgttgatcatctgctggggccctctgcttgcaatcatggtgtatgatgtctttgggaagatgaacaagctcattaagacggtgtttgcattctgcagtatgctctgcctgctgaactccaccgtgaaccccatcatctatgctctgaggagtaaggacctgcgacacgctttccggagcatgtttccctcttgtgaaggcactgcgcagcctctggataacagcatgggggactcggactgcctgcacaaacacgcaaacaatgcagccagtgttcacagggccgcagaaagctgcatcaagagcacggtcaagattgccaaggtaaccatgtctgtgtccacagacacgtctgccgaggctctgtgagcctgatgcctccctggcagcacaggaaaagaatttttttttttaagctcaaaatctagaagagtctattgtctccttggttatatttttttaactttaccatgctcaatgaaaaggtgattgtcaccatgatcacttatcagtttgctaatgtttccatagtttaggtactcaaactccattctccaggggtttacagtgaagaaagcctgttgtttaagtgactgaacgatccttcaaagtctcaatgaaataggagggaaacctttggctacacaattggaagtctaagaacccatggaaaaatgccatcaaatgaataatgcctttgtaaccacaactttcactataatgtgaaatgtaactgtccgtagtatcagagatgtccatttttacaagttatagtactagagatattttgtaaaatgtattatgtcctgtgagatgtgtatcagtgtttatgtgctattaatatttgtttagttcagcaaaactgaaaggtagacttttatgagaacaatggacaagcagtggatacgtgtcaatgtgtgcactttttttctatattattgcccatgatataactttagaaataaaccttaatatttcttcaaatatctctatttaattttgacactgaaataaccgtaaaggtttatttttctgttacctcaacaagaagaatttgaagacttcaaaatattgagcagaattcattcatacttaaaaatttattagccctgcattttcataggaagacacattatcttctggactatagctgttctaatggattataatcagaatggaagagagaaagcatattgactttttttgagcgacatctctgactttctttagtctttagctattactggatctcttaagacagcatgtgttaatcttaatgtatatcgttatcactgtgcagttgctgtttacttgaatagtattgtgttcctatattccaggtttaagtagatttcatgcctgggtggccaaacaacagtcttcattttttttaattgaaaagaagtagtgtctggatcagtaaaattatactgtgtgtgagtgtgaatataaatgtgtgtatgtgtgtttctgtcctgtaactgttacagtaatgtcataaagtgagaaaactgtgaccaagtataaacttttaccacttgctgcactcttgcacatggattcagtttctaaaattgagttcttcctgtaatcttgttgataaaaatactgactccaaccattcaaaaatttcaccccatccctccttaagagattggatcaagtattactaaattgacctttaggtattacacaagaccagtgcttagcaaaaaataatgacaggcatccaaggaagggatgtatttgtagtgttattgccaggaaaggagagtactttggtttctgagcaccgaatattgagcaatatgtcagtcactaaaaggaagacagttctacagaaaaacaatggtaacatttttcaatagcgtgtgtagatagtatgcactatatacatcacgttaaagtaggactatcacacccagcccatgtggctaaaaaagctgaatcagacagtggatgagacacacaacggcagtgaagaaccgatacacttggcattgacgtctagctatgctgtatctgtgctttgcccacatgcccttggtgacagctgagcacccagctctgtcttggtaggtttgggctaaggaacaaatctctcctttgctcgtggttagcaagatacactcaagcatgaagataaacacagctgctttcttcttacaccccggtctcatgctccttaatggcgccatgggtgcttgttgggcctttttccagtaaggaatgatattgctgaagaatctacttaaccctgacaaattttaattataatctcttcttatacagataaaacatgactcctacaaggccccaaggtttacatagtctgaagtgaagtacagagctggcatctatctggtgatttctagctctcgagatacccaagcagcctgatggggcagttcccctt

SEQ ID NO: 11104 - DNA, 6000 bp, Homo sapiens
ctgaagggtgggaaaaccggggaggtggtcaaagggtacaaacttccagttataagatgaataagctctggggatccaatgaatggagtagtgactccagttagctatactttattttataactgaatttgctaagagagtagatcttacatgttctcactacacacataaaaatggtaactatctgaggtgatggatgtgtcaactaatttgattgtggtaatcatttcacaatatatacatacatcacattaaaaaaagaaaaggcatggaagaaacttaatgcatactgcttagtgaaagaagccaatctgaaaaggcaatacattatataatgccaacaataggatattttggaaaaggcaaaactatgaagacagtaaaaagatcagtggttgccaggggtgtgggaggaggatagacagagggatgaagaactgcagcacagtatattgagattgttctgtatgatactgtaatggtggatacatgacattatacatttggcaaaacctgcagaatctacaacatgaagagtgaactgtaaagtaaactacagacctttgttaataatgatggatcagtttgagttctccctttgtgacacacataccacactaatgcaaggtgttaatcatgagggaaactatctgctcagtcatctgtaaacttgaactgctctttaaaaaagtccattaattttttaaaaatcaaaagaaatgtaaaaacaatcagtgaggatggttgtcaaactggtcagtgaaaaagttaatgcaacaattagtgagaggaatgtgggttcagaaaccagtcgtgaccagaactgtctgctatgagaatgtatcagaaactgctatagtctccatgcaattagtaataacagttgaaataaagtctacactgatgtataccatgggcagatttgtagataaggaatataacgctacttactgttatgtgagtacttgtttttttgttttttgtttaagacagagtctcactctattgcccaggctggagtgcagtggtgtgatctcggctgatcgcaacctctgcctcccgggttcaagcaattcctgtcccttagcctccagagtagctgtattacaggcatgtaccaccacaccgggctaatttttgtatttttagtagaaatggggtttcaccatgttggctagaactcctgaccttaggtgatccgcccacttcagcctcccaatatatgtgtacttttaaaacaagtgactccctcagatcttgttttattttcacaaaacttattctatctgaactttgaagtctcattaaggttttatccaactggtaaaagtagactaggatgcctatagagaaataaaggtaaaaataattatgtcaatctaacactagccagagtttttacagaggagacagactgccttgtattttgttattcatgcttcttacccttttcattctacacgtatgtgcaaattagctccttgcttcatattaactttcaaaatagcgctcggaagctttcaatctgacctttctgtggccagcaggaggagaccagggagcttaaggcattcccatatcctgggctatgtgtttagaattcttgctttgaattttataaagctactattcatacatctgggataagaaattaaaatacagtaagatactcattataaataacggtttcaatcctagatgggttatagtgaggggattaggttttttccagtcttcacttcctatagaacacagactcaaagaaaacacagactctgtgaaaggctagaactcaaatcttatgataactaattcagtgctcttttcataaaaatgtgcaatctttataagatctacatgccttacaggtatcctatcctgaaggtaaggagtgggtgtgtaataggtgacaatatatctaagttacttataacactgcctgacacaaagtatactctatgtgaggcatcagtaagcttcttctgtagagccagagagtaaacattttaggctttgtgggccataaggtttctcttgtaactaatcaaagccgcactggcagcatgaaagcagccataaaaatgaacgtgactgggttccaataaaactttatggacactgaatttgaattttatataatgttcacatatcatgaaatattcttcttctgattttttccaaccataaaaaatgtaaaaatgggtatacaaaaacaggcagtgggctggggttttgggggcatagcttgctttatataattagtagacattattatgatgtctataatatctttctagaaattatttttaatggttgtttaaacatagagtctgtttctatgttttttatttttaatggctgtttaaactggtaggagaggggggattcaaacccagcttgtgtgacatcaaggcccatgctctttcataaacaagactgtctggatgttctataatttacttagtcccctgtggttagaatttaggctatttccaatattcattattataactcaccctccagtgaacatctgtgtagttaagtctttacgcacacatgtatacccacaccttaaaatgtatttagtggtagctatcaaaacagctggtagggacgtgggcacacctgtaatcccagctactggggaggctgaggcagaagaatcgcttgaacccggggggcggaggttgcagtgcgcccagatcgcgccattgcactccagcttgggcaacaagagtgaaactctgcctcaaaaaaaaaaggctggcagagcatctagaaagaaacagactctaaagaagtaatctcaaaaagtaatcttttatggttataggaaagttcagacgtattagaaaaggagttttataaatacaatatatatacatagaacttatgtcccaaacaccattttaagacccttatatataattacaccatttagtcctcaaaactatactatgaagtgcaggtacaattatcataattatcatcatcatcatcatcatcatcatcattatccccatgttccaaaaaggaaactgaggcacagaagggctaggtaacttctccaaggtcacacagtaaactggtaggagagggagtattcaaacccggcttgtgtgacatcaaggcccatgctctttcttactaggctgcaccatctcttcaaccagagacttgtccagtgtgcacctccaggtactctttataatgtaccttcacacaatcggtggtggtattttttatattgagatcacatttcacatgcatgaacgatctcataatctaataactgatgccaattttaaccaataatgggacacttttggtggaaactgggtacccatctaaccttcctctattgtcctacaagacaactcccaacaacgccaattctttattaagtttccttgcttttcttacccaaaatagttgtccagtgaacagtaaaagttgatcggagcatactctcatgtcttattttccaacgtatggcccaaatctacattcaggtagtgctttgcctacgatggagggccttgtaccgcctgggattgctagtttcggttaagtacccctgtttgaaaacaaaaacagtggcgcgtgtcagaagtccctcccgcgcggcctcttccccctcttcctccgcagcaggaggcctgacccccgcgtcctgcacccgtgtggaccaaacgttcagcctcccccgccacaatcggacgggaactcgcgcgctttccgggctattccctgtttgtgctgagttatgggcgaatctcccaaaaaggagatatacgagtgggtcgtccaactttgaggggaaacgaggattctctttctcattttctctcctgatttctctccctacccggaccgcacttctcgaattatccccgtaaggaggaacgacgaatgccgccggtcccacgagactgccgccccccactcatgcccaaacaaggatagaatcttgtagcgaggcgacaagaaaataaataagcgggcgtttcaaaccgagtcctcgggtgtgcagacccgcagcggagtcgcgggagcgaggtgggaaatcctggccgcggcgccgggctccgcccgccggggggcgcggggcggcgggcgcatgcgcgtgcgcggtgcggccccagccctggctgccgccgcctgccgccgccgtcgcgatgcctattttagtcaaagcggctgcgggcttggggacccggcccgggcagcggagcttccggacccgccgacccgccgaggagcgcgcgtcgggctcccgtcgagcagctgagcccgtgtgccccgcgtcccgcgccccgaagctgccgctccgaactttggtcggcgctgcccaggctccccgccagggaccagccgggtaaggatgggaggcgcagctgcagccggctttccccccgcgccgggttgtgtgcggcctcgcgctcccctggctaaatcgggaagcgaaagttggatctcagcccctcggggagcaactttgtcggccctggcggcagctgcttgttctacgcgcccgggcagccgggggcgccgccctctgtccctcctcgctggccgcgccctcgaggggctcccggcccttggaggccgcccttctccccgggtctgggcgctgcggccacagagaccctcaacggtcagcggccgccgctcaggtcaggcagccccagcgtccccgggccctcggccccaccgagtgccggctcccgcgctctgcggcggcaagccccttggtgagctccgtctctgctctctccgccgagtctccggggttcctcctcgccccctgtagggccgcctcgagccgcgcagagcctgcgtgcagccgggcgcgcggtgtcgcccactccgtccccgctcggagagtagggtgggccacggcgctcactcctcacccccgcgtcccgagagcgcctggccgaggaggaccgttgccacggaccctcctcctttaaggagcgaggtcagagggccccgggagagcgccgatggctggggacccgaggtccgcgccacccacccgcaacctccttccccgagcctttgggaacgggttgttggccagacaagtcccagaaactgcctgctttgaagcatgaataagtgcgaaaagactcttagcaatgtaatgccatttgccattcgggagatgtgcgaagattcagttagaattacagaatgaattaactcgactagcaagacgctcgtttgcagttatctttttcatttttttagtttggtagaggtttaatgttagtttcagcatttagctatttagccctacaatcacctatttgaaaaacgataaacaaaactttactagtataggtaatttaaggacttcaactttgatgatctgatgagggaaaaataatttctcttgatttagtcaaaattaatctgaaaagtttaccaatttagcagtctaacctttctctttccacctattctctgtataagaattgttaagtgtaagccacttaacgattaagtggtaatcaaagtaaactgatctgatcaatattttcgacaataggtaactggcatttcacaatagacaattatatagatatatagatacatatatctatatatatctctctctctctttaataaggtgtcgtgcgtcaaaacatgtttaggatgaccgtaccttctaaaaactgctaataatattttctggttcttgggtcataatagtagttttcctgtcatttttcttggaccagaaattggtacttttagtgtcactttaagaacttgtaaaagcctgatattgaattatagtggattaataggcaatacaggtgaaattgggtgaactcgaggggcaacatgtattgattgattgattatgtaaatgtgtattatagaaccataggctattaaagttttccctattccaaggaagaaacagacccgaggagcagaagtggctttccctggcttatgtagcaccctggtggcttgtggtgtaga

SEQ ID NO: 11105 - DNA, 6000 bp, Homo sapiens
caaacaattggtaatagtgttttgagattgaacagaatttgatgtgtttaatttgtaaagtgtatttttttgtggttacacagaagcagtaaaaaccttgacagaaataatgagctttaacataaccacagcctctaatctaagaattctgtgtaaggaccagtcttaccagagataaggtcaaatattttcctgtaagattttctcagcatggagagttgagagaactgtttaatcaagagcaggatggatggaagtatgtacaacaatgcttgaagtaagagggaaaaaagaaagcaaatgggtctgaacatatccatcagtattatttgtatatcacctattagcttctaagtagtatcaatattaataaaagaagtcttaagctctctgtgactcatggtcatgtgaaaattagaataccttagtttcctaggattcagtcaaccttgggattatgggtagtcagcctgttacgagagtcctggtctttaaagatctacttttagcaacaattcaggtatttagcaatatctgaaaactgtcaagccctgctcttttagtgtatatttactgttaaagcacagaacttcctcttttatattagtagaatttgggaggatgctgattcctattgaggtttttgttcgattgtttgaaagtctaatgcagtgaaaagattactcatttctgtgcttcatcaacagttatttggcaccctttccctgtctttcgtgggttaagcatatcactttgaagtctgttcagttatgtactttaaacagaagtaacatttgttttccaaattctctttagccttcaaacccttttttctgaaatagtacaaaaatgaatgtttgcatagcaccttacatttttataaaaatataaatctcatatgattaatcttcctcatctttccccagatcatccctagcggcccaccagcataagcatatcctcatattgaagcccttgcactctgaagcctgacttacctaatgatttcctgagacaaaataagctctcttagctagtgactcctatagtgcactttccaaaaatttgaaccctacccttaggacaacctcttaatgaaacctttctcaaatgctccagcaaactttgaatttatttggtagccatttggatgttagaaaaaatgttaatttgtagaaactatattcacatccttcctttctgaaagccttggtcagacttctattagtattcatactaccaatagaaacttaataggtgatatactggctggacgaggtgagtcatgcttataatcccagcactttgggaggccaaggcggcagatcacttgaggtcaggagttcaagatgagcctggtcaacatggtgaaaccctgtctctcctaaaaataaaaaattagctgggtgtggtggcacatgcctgtaatcccagctacacaggaggctgagggaggagaatcgtttgaacctgggaggcggaggttgcagtgagctgagaatgcaccattgcactccagtctgggtgacagagcgagactccatctcaaaaaaaaaaaaagagtgctttagtccctaaaatgattttacattcaaactaatccttctcagagtgtacatttctttagcagtatcatcagctattaggttggtgcaaaagtaattgcagttcttgcctttagtaatggcaactcaaatagtattttggcctcatgcagtgtggtggactagagcttacttaaccttgggctcttagaatcttacgttggggaactgtgggcccagggcccctgttcttataaagctttattggaacataccatgcccattcgtctgcatgttgactttggctgcttttgcatcacacagtgcccaaagagtaaaatatttgctttcaacccatttaagaaaagtttgccaactcctgaagtgaagaagataggcaaatctcaatacccttgtaagagagaacttacgactttaatagtttttgtcttaggagaaagattatgaagaacctatagtttcctcacctaaatgttcttgcccttggcagtgagcaagataagagttttcgcaaattttatccagatgtatacatagattttatacaagatagatacatagatattaacaattttatgattgcttattgttttaaaatacacttaaatcctagtattcttgggtgcatagctatgttagtgaaccattaactgaaatttggcttttggtctctaaaaaattgaaagcatgttgaagttggcaggattattttttaaagctgttagataactgggaagctagaaatttaaggttttttaaaaagacattttgttttcattccagctaaacccacagttcagccctccccttctacaacttccaagacagttactacatcaggtaattgaggctttttagattagcaatgatgcaggatgtgtgcacgatgttgccctttacaatttctgccatcattttccagctttcttcgttaatggttatggaactgaaattcttctcttactcttaggggggatcaaggtagtgctttgttaacacaataatgatagctttgctgagattcctcttctcatttttaaatgtgtaatcacatttgacgtgacactttagaattaagtaataatgtttttccaaacatttcagtacaacttgtatgtaaaatctaatttgtaacttctgattaccgttagggattggttgtgtgctgtatgagagagcatggcgatttgagggaagataatatatccgtccttttcactgagaaaggtctaaaaagccagaatcactaccagatgtgcacctcactttcttaaccatttcttaacattgctcagtaatgtgaaaattagcttgttattaaatgatgatttgacataatctaatttaattcatagttaggttacgccacaggatactgtaggtacacaggttaggaatcctttcctccctccatatttttaaaaaactgatgctaatgaatcttctacctgctttttgtgatttctttttcttcatgcttatgccacctttttctcagtttcagtgaagccattctgtcttcacgagaaggaatacaaaacagttgtcattaaagttaccaacttgtacagccaccagaaccagtgttctttgataactgttacttttttcttagattattttaaatggaaatcgctttttctgtttcctcttgaaacattttactgcctgaaaagaattcagatatttgttttttccttattacttgataatactttctcatgtgaaatttgttggcaggatatgcctttaaaaacagttattttacttgttgaaattataaattgcatattattaagattatttttgtaacatgaaaaattgcaaccaaatattttaccttatactagtaaattcaaaagtcatgtgaattctcagcactattgacgtttacactcacaattaactaaaagtacatagtctgaagaaattgttgcatattttagaagtgtttgatacattcccagggcacaatttatgtactaggagaatttttcccattgtttttatatttgtactagtacagtagcattgaccactttgtatccttgggtggaatgaaaaatgggatatggttgtcttcctcaattagggataaattctagctgtaaagacttgaggaaatactttatagaatttaacacatggcaaaatagaggctcaggtgcatctttaaattacaatagaggaccatgaaacttaggattgttgtttcttttgtcttatctaacaggtacaacaaataacactgtgactccaacctcacaacctgtgcgaaagtctacctttgatgcagccagtttcattggaggaattgtcctggtcttgggtgtgcaggctgtaattttctttctttataaattctgcaaatctaaagaacgaaattaccacactctgtaaacagacccattgaattaataaggactggtgattcatttgtgtaactcactgaagccaaaatactatcttttaagatgtcccacatggaagacgctattccaggatctttaaatttccatggatgcatataggatgtttgggagcatcatccgtgaagaaaaaatcaattaaatcattgtgttcaacaggaatatttaaaatattctgcatgaatcctgtggctgtcttattttaaatagctgctgctgtgggattatattttttttccttaacatgccaaatataactttctgaaagtgatggaaaatgttgtcttgtgcagacaacatcatggctcttggcagtttaaatttagtaattttaatttagtgaacagaattgagaagaacgtgccaaatgagaatcaattaggtggatttttggctgtcatttcaaaagtggaataaatttattaatttagtagtactaaatggtatccttagattaaaattttgtgcttgataacagctgttttttctacattagaaataagatgccacacaaggaactacattccagatttaaagaaatgaaaggataccattagtgtgtataacagattattgttcatacttgtaaagcatcttatgtcattgagaatataaagaacagtgccttagaagacagtgaaaggtaagctctagcttaatgtctatgatttgttctttgacattaaggaaggtaaggattggtcagaggatgtaacttgatgtgagcagtagtaaacctgttttagatatcatactgttaatattttattgaaaatttatttcagagcggagaaacttaagctaaagtctgttatacagaattgaaagccttcgtatcttgaacctcccaacatttttcttatggctgttgaaaagtatagagctaaattgatttaattacactttcctttgtactttaaaaaaaagtatgctagcactattgtaccttgaaaggatttccaccagactgtcttgagtagtgacttctttggtgaggcaagaaggatatacattattttagaatcatttactatttaaatgagacaatcatattattttagaatcatttattttaaatgagacaatcattttaagttttaagataacagaagtgaccaatgtaatttcacaacacctaaggattttttggttgatcaggttactgtagatttttactgattgtcctggatgaatagactgtgctttttctttttctctcccttccttcttggtttcccatagtataataagcatgcatactttaacttctatagttttctcctttagagggtcgtcttcagttttagaggtttacttctcccttgcctttgactcattggactagtgcagaggctttaagtagtttaaaatgggcttttgcttttctaggtcattaacgttttttatttagtttctttagccaatagtggctgagtttcgcacttgattttcaatattttatagtaagaaatgacaaactgctttgtttcatttcataaacaaactctgcatttagataactattaaaggttgttaagatgaagatttactgtttctttgttactcgttggtacagctgtttgttttacttgcacatttgtacatatacttaatgttttcaagtgccttaattgtttaaaatctctggcttcaaagtttcttggggaaaggtcggtttacctcacattttttgtttccattagtaatattctaggtacctcacaaaatgtattatggtgccatggctgttagtttttagtgagtgctgtaggattaattcgaaaataggcagaattccattcctcccaaggtggcaaaaattagctatactgatgtaattgtcatttacctgggtatgaattccctgacacacattcatgtcaacatatgtagcaaattttgtgaaaacataacaatttgaagcttctgtaattttgagcactgctctaacaacaagcataatataaaattagttagattttgcaagtctacaaatgagctcttgc

SEQ ID NO: 11106 - DNA, 6000 bp, Homo sapiens; identical to SEQ ID NO: 3447

SEQ ID NO: 11107 - DNA, 6000 bp, Homo sapiens
cattgtccgtaaggatcaaatggtgtgccttctctttgtcttatattcctagaccaaaagcaacaatctccagcttttaagacaccatcctggcagattcaaatgctttataatgttatagaaaaccaaagaggcattttcaaagttaaattaaccggatatctttggttttccctggggaagttttattcagagctgctatgatattgtatcttagcacatagtctgagactggttacaaaacagaatgagatttcactttctgtctgctagagagcctcattagaaacttctggcttggcatcctcatttctcaaaaattccaagagatttcagctcaagaagagaaatattgactgtgtgtgtatgcatgcgccatcttgctttgaacaaaaaaatagcattagcattctaattcttaataagaatttccattaaaagttatttatactttaaaatactatttttcataattccgtatactgtttatgaaaactgcattttttaattctttttctctgtaaaataattaatctacctcccgaagctattaattatgtttcatttttgcacaatgcacaaatgttcccaaagttctatcctactgttttactcagtgctcacatcataagaaccctgtgagatagacattattatcataattttatggatgagaaaaacaaaactcagaaaatttccattacaaaaccaaaccaaaatgtgacccaaggtcttttgactcccaatccagttgtctttccacttcaccatgagtggttcactcatgttagttgagatcttcaataaaaatattagtttttctcagtgtcacagtagataggaaggtaccttggaatgcgtaccgggcctgccataaccagacggggcagtgtaaggagccaggccagccttgcaaacaaaatgctggagaaatcaggtctcctgaagagagaaaaacctcagtaggcacatttaaggcatctcaggcacagagaagctaggctggcagtagtatctaatcccagggagcaaaacctctatagtaataactgggtttatcataaagcgagagttaggtttaatagcctagtatataccagatgacctgtgcattgcaattggatgctgacagttttttcgtcatagtttcctaaatcttgcactacttcttcagcaggcttcacattctgtcatgtttttcttctttttcctgtctgctaaacttaaacagtttaaccatgaggtcattttataacttcactcacccctacatgcaaaagccttgcaagttttattcccaagcccagctattatcctttggtcctgtaattatttatacaatggacatgacccattcctacccaccagtggaatgcatattgggatttttcccctaaactccacatccaccgagatcaagatcacttcctaggaagacaccagtaggatctggaagtctcgaaggaggagacataggaaagatatcccaggccagcaaggaagctgatgattgcacagagataagagaaaaggcatatggagaacagtgcaggggctgacctgacaggctcagaggctggagtgagtgacttaagagggtgagaagctgactgtccacactgggacctcagaaggaagggcatagactttcaagaggaagtgattgaacttgatccagtgaacaaccaaaaatagatgagggacaaaataacttatattaggaagattaatagtactatacagggccatagaaaatgaacaaggggagcatacccaaatgttaaggaacaagggaggcacaaaatgcctgcacagcacaaagcaagaagaaattaaggagaaatcatttgtactgaccttggtgactgaagatacaaaaggtggtagaaaacgataagctttataactttattctaatttttttgttgttttttttatttttgtttttgtttttgagacggagccttgctctgtcacccaggctggagtgcagtggcacaatcttggttcactacaacctccgcctcccgggttcaagtgattctcccacctcagcctccagagtagctgggattacaggcacctgccatcatgcccggctaatttttgtatttttgtagagatggggtttcaccatgttgtccaagctggtgatccatctgccttggactcccaaactgctgagattacaggcgtgagccaccatgcccagcctgttctagttttataaatacaagattaatgcatacccattgaatcagaatatctgagggtggtagcaagtgtgtgtgttttaaaggctctgcaaacttgccatagagaatcactggcctgtgcagcaaagcagattctgggcttagtacctttctgtaagctttctagtgcttctgagtcagtcagtcggtttagcccattgccccattgctaggagatgatgataatacacaccaaagaagcagctaacacaaatcaaatgcttatgcacaatgaaatgtctaactgtggttttgactgaaagaacaagagttagtggaggtgggtgattggatcctggactggaagctggagaagccttcccagaggaactgtgatatagcccagaccttaaagaatgggtggactggagctaaaaacagacaggtggaccaaggagctggtgaaagtggacgaagcattgtgcagtacagttttaagcaggagggtgtgggcactatgtttaaatagcagaggaggtcgataacttccctagccttcctctgaattggtcccctgtatgaggctggagacccttgcaaaggccatggggcaagaacatttttcctttatttttcccatccattccctttgcagctcagccacagacaagctttattccctcacactactcatctgtgaatgcacactaaattcagtcatgctaagaaacaaatgacacataatcctttgcattagtctggcaagctaataaacctttatatagtaatatcacctgtagaaaactcatttcattcttactacagcactatggaatggggaagccagaagtggtcctcatattgtagataagaaaaggaaaccccagagaatccaacctcaaaaccatagagctactaaggggagtatttaattgggggacttgaacacagttttctttctgccaccctgttctgcaacttgctgcagtatttgcatttcaacaaggatcagagcccaaagcacgcaggtctaactgaggacttcagacatcaacctgtagacaggagattggttctttcagtgaagctctgaatcacattacataggtaactgtctttgtcttcacattatctgtcagttgtgtgatcacaggcaagttggagaaaattgtgagcttcacttgacctatgaaatggaaataactccatctactttatagggtttttgagaatttcctgaaataccacctggacaatgtccttgctacacagtaagcctcaagaaacctcactctctttctcttccccattttatttacacacaaggcaagccctgctatgttaaaaccacaggctcatccagcctacctgtttttgctctctctttgcttatgctcttaatcctttctctctttccctctacctttgtccaaccacacctgcctgccttcacttcttaaacaagccgagccttttccctcctcagtccctcatgtgagctggttcctctgctcgctcatgcctccttgctcctcctcctccaggtgtcaccccaagtgttacttcttcaggaaggactgaagtaggttcctcctattactctttctcactagatcctgtaactttcctttgtcatattgaatacaatttgtaagtatgcattaatcctgtatgtaggcttaatgcctgtcttctccactagactgtggactcccacagggcaagaacatgtctatttaattggccactattctccatagtacccaatacagaatctagcacataagacatgttccataagtatttgtcaactgtgtgttggatgactgctggtcttatctctccctcttaggatgccctcctaccgtctcctcagcaattcacatagtacattccacacacacaaaaaaattttaccatgcccacattctctgaccttttccttaattttcttttcccaacacttattcatacattatcataattgggtaatgttctctggttatttcatgattccctaatcacattatcagttttctaaggaataaaactctttggggatctgttttgaaatctctgataaacctagtataatagttgaaaatgctttgggaattcagtgatttcttgaataatgaatgaatagatcaatcactcaatcctagtatatcccttttgcacaaagaaaaacttcacatagcaatacagagatatcattgcagcaaaacaatttctaaccatgactcattgctatctatatagcttccttcttgggttactattttgagtttcaataagaggcaaacaatcttatcttgaaagagggattggatttatttttaataagaaaggctgaattgggaacttgcatttttccccaaaatttaataacagcactagtaaagccctacgctcctcagctggccttatttcaggtatatgagaacagagcttccaggtaagcttctttcatgatctaagagtgagaccaatatcaccaaacctgtctaaattcattgacagccaggggaggtcacatagcaaaagcatctagtccgaacatgtttcagaacccaggactgagcagaggacatggagggaaacatcaggttccccaaggccattgtcctcaaacatgtgacatcctgatagtcaccactgataacttcagtaagtatcacttcgatttcacccccttcttctactcacaactaaaacaaaacaaaaacatatgtaattaaaatatgtcattgctatgctcaaaatgataacttatgaactgggatttcaaattcaccttgttattctgaagcagagccttcagtttatggttgccctgctgttaagcctcaagttgctctttttttttttttttttctgagacaggtcttctctgtcacccaggccagagtggagtggcatgatcgcagctcactgcaacctccacctcttgggttcaagtgattctcctgactcagcctccctagcagctgggattacaggggcccaccactgtgcccagctaatttttgcatttttagtagagacgaggtttcaccatcttggccagggtggtcttgaactcctgacctcaggtgatccacccgccttggcctcccaaagtaatgggattacaggcttgagccaccgtacccggccaagttgctcattctatccatattctttgaatcattttatatatacacacacacacacaaacacactatatgttacatgcattttaatttactttgacaattatctcacaggttctgtctagttagtactagttagtatccttccccattgagttagtatttgatcttataacatggtccaggaaaagaaaggtaagttttgctaagtacctgttacatcatgacacttgtgagagttggtatgggatctgctctttgtgcagtgtcacttatcacctgtcttccacctctgcttagctctgtgacaaccaacagagcctctaagagatggctgctgatgagtccttctatcgcaggctgcagcagtcctgaaggttgatggagggccatgctattcaaacagcaggcgtggctgagacagaagctcctggtgctgggaagccttgccgttgggagtctcctgtatctagtcgccagagttgggagcttggataggtgggtgcttaaaacacatgcttatacccctgtgacattaaggcttgatttaaacttccttaggacataattttaagtctatccacttgtttttctccttcgaaattcccaggaaacatgcttttctgcagtattgattttgatttactgag

SEQ ID NO: 11108 - DNA, 6000 bp, Homo sapiens
accatactttcttctccagtggtattattcaaataagggctgggagttgaaaagtgacaaccatatgaagagccacataatctaaaatatctcttcctgccatcctttcttgggtcttctttataagaatcccacagacactgttatttcctcattcccaacattaattacccttttaagagaggggaaaaatggacttaaatttcttaaatgcctactgtgccagacacattagttacatcatttaacctaagaggaacaacaaagttgcagatgaagaatgagaggcacagaataggtgacttcttggccacggtcacatagtaaagcacatgcgcatgcacgtgctctacaataaattcctctcttattcaaacccttgcccagtgacctcaggaaaacctccccctgttatttctttcagtccctttgttaatgaaatcaaaacaaaaccaaagtaaaaataccttaagggcagtagtcgtgatatttttcaaaccaaaagaaagctacacacactgaaggaaaactatacctaagaacttccatacacctttctgaccttgcaagttgattttagaatatttctgaaactatcattatatctcctctttcaaataaatctgtttgtcctcaggctctaacattcataataaataaaacacttttctaatttaatgttactttgattaccagcattgcaacagtactttttccaacatgttattcttccctagggtgaggtctttgcagtgcaggctagcagcccaaagcaccatttacaaccctgtttctatgaagaaaaatgctctgaaagttccaaagagccaatgcacacaaatacttgcaggacacaatgtttttaagttggggacagttaatatttatgaaatgtgttcaaaacaaaaccatatctttcaacaggagcctgcaggaacagagggctcctgccctcactgcccctggcacccacgccccctcaaaaaaatgtgattggaattctataaaaataatctgccactcaggcagttccaaagtaaattgaggaagagcaaaaacatggaatcagaaatataacagtagactccaatttgcatacaaataacaccgatagtttcctttaaaactctggttaatttccaccttaatatatctcatgtaaaattgagagtgcccattgaagtattgaaacttcaagattaatattcacaatgaatcattttttacgtattacatttggattttttaaaaaataagagcaaagacctattgtgacctagaaaatctcccattaaaagattttatcagaaatctaacttgttggagaatttcagtcattatttactgtacatgtagattaaattcatttctttcactagattaagttttatttaaagtaagagaacaaaaatcctcaaaaggattcttccacaaacttctaactagtactgcctagaaacttcctaagaaatgtttttgcacttcaatttttgagaacttataattttataaaaatataaatttatcagttttataaaaatattgccaatttttcctctgtaagtctgctcataattattactatatttcattttaggcatgttaatgtaaaaattaaatctaccttttggtaatttcttttgaaagtagaaaaatctaagcaacaacatttatttggggatttctttgtagtgttttgtggtatcactgatgatcaggtttttaaaaaattacttgattcaaagatataatcttgaaacacaaaaatttacaaattatcaaagaaatacacaaaaacattaagtattgaaaaaggaaaatgtaagaattaagtttgcaagcaaacctgcaaaaattacaagagagttatacttcaaaaggactggctggccaaataaaaaaacatagcaagtatttttttaaaaatcccacaaaattactaaggttcttaggtttacattagaccatccataatgagaaacagcaatttcagcactatcattgcattcataaagatggtgacattaccttcaggtagatgtggctagggagtcttgacttaggggacaaagtcaaggtttcattacttaaaagacaagaaccaatcacctttatttttatctcagggtacaaagtacttttttcaatggtagaatgtcaagtgctttgtagtactgaaatcagaggaaagtgtccgattttgcttctacaaaatgcacaattttacttgttgactattttctactcctcccttaccatgagcacacagggcttcatgtgattattttaaagaggatgcataattcgattgctatgcctcttcagataccttctttgtgaatttttcaaatttgctctggcccaaatattggtgttcctatatagttcttatcccacctaatgtacacagacaccctttaatatgtacctataatcaaccacccatgttaacttcttgtttaacatattatcaaagccaggctgcaagtataaccctgtcatttaagaaatacggaaaataagaaaaaaatcttaaaataagcttcatgatgaacttaaaaagaatagttactttaaaagatgtagaaacaacatagataaatttaaagtttttaggggaaaaaatccttaaacccacgtactaaatttttaatatttccactacagaagttaaatgcccaaactgatttggtatcaaaattaaagtgtcagaaatagaattaagttataacttttatttatcaccattttaacatatacttaaaagtggaatttattgttttgctggaatacttaataacattaatttgaaataaagcttctaaatatttccggggctataattccattcttacaacataatttttaaaataataaatcattccaaaaaaggatgatcataaagagattagcgtttggggtagttaacccagttcctatttatctatccattcaagaggtaactcagttttaaggatgttgttagaaacattatttcacagtgattcaaacctttcagcctatgcacaacctacaaatgcataatcgtttgaaataaaaattgcctttccatcattaaagaaaaatcatctttgttttctttttcagtccttctgaacttattaccctgcttggatatgctgcactcttctggacatagaatttcatagcaggtatcaaaataaccaagccataaagccagctttatcaaacaataatttcctattaacaagaactttgagtgtattactcattttacacaaaacaagtagacgacaaataatgatggttaaaattaataattaaatgattaaatgaaaactagtaaggatttctgattacttttctactttctcatacagcttaacacctggaaacaactgtactggagccaccttcccgaaaggtgccagctgtttcctttgtcttaagcacaaacagaactaatgtcacatttccagagaagggtaaggatgaaataaggcgactacaaaccagctttcagaaatgcgaagtcagtcaacgttttcctctctgataaccccttatttgtggagcaacaggagaattacaacacattttggaaaataatttctattggaccaactcctcacttcgctggaagtagtcggatccaagacttaatttcaacacagtgttcgacttattgcttgaagctaccgcagcataaaactcgtcttcgaatggaaaatttgaccaacttctatgaggtaaatgaatagtgaaagtacgggtgggcgggagagacatacaagttttttcggttttttgttttttgggggaagaaagggcgcatacgaaaaaagtcctaagcaagcacagaactgtgtctcttaggatgtaaaaggatgttataccagagagctcaaaagctcccagggtcacggctcccctaaccgagggacttggggtttcactgctaccaggcacccggggaaccccggccttggataaaaagagggtaactggagtaaagccgtgcttctgaacgacccagcgcccaggaccccctgccagaccccgcctttcccgggaccccctcgggagcgcccccgaccgccccgcacgggtcggaggaggaggcagagaggtcccgcgcggacccaggcgcctcccgggccagtcgaggatcaaccaccccggggacccctgccgaggccagcgcaggataaactccccgaccccgaactctgcctgccgcttctcggcgctgggcctcagccacgggttcgaccgtcctcctcaccgcggctcccgcctacctcgcgcctcccggccccgcgacctccccgccgccggccgggccccgccgaggctgcgcttcccgtaaactccccgccccgcgcatccccctcctcgcctcggccccgcccccgcgggaccctgggcggcgcgtgattggcccggccgcgccgtcactctccggccgcgtcgcctccctcgctttccaccgccccaagaccggcagtgagattagtgctcgcggggccgcggcggagtgtaccgtgctgctctactcgctgccattcgcccgcaggtcggcgcgctcgcccacctgagccgcgccggggctgcgggaccgtgggacagcgcgctcagcccagcctaggaaagaggcagcagtctcagcgcggagatggggagcgggcgaagttgacgagtctcccgcccacgctgcgcccctcctgcccagaggtgcgctgcccctccccgaggtgctcgcgcgctgccctgaccccttcctgcgcgggacacccctcccctacccacgggacctgataacttcaccccaagtccagagagtgggctgcgagggcggtgcccggactggacaggactctgcttaaggggagcggtcctggaggctcgccaggagtcggagggcggagacccgctggaaactttatcatcgccgtaattactacgttttactgtttctctccccgcaggggctgcagccagcggtctgtcgcgcgtgcctgtgtgcccgaggagccgccccggggagaagacccggcgcggagttgttcccccagggaggatccgcagcccagccgagggggtcgggcggcctggctacgcaggacccagccccgcagccgcggactcccagcggcggcgaagtttggctgctgagcggcgcggcgccggaccactggacagcgggagcgatgcccgtggggggcctgttgccgctcttcagcagccccgcgggcggcgtcctgggcggggggctcggcggcggcggtggcaggaaggggtcgggccccgccgccctccgcctgacggagaagttcgtgctgctgctggtattcagcgccttcatcacgctctgcttcggggcgatcttcttcctgccagactcctccaagctgctcagcggggtcctgttccactccagccccgccttgcagccggccgccgaccacaagcccgggcccggggcgcgcgccgaggacgcggccgaggggcgagcccggcgccgcgaggagggggcacccggggacccggaggccgccctggaggacaacttggccaggatccgcgaaaaccacgagcgggctctcagggaagccaaggagaccctgcagaagctgcccgaggagatccaaagagacatcctactggagaagaagaaggtggcccaggaccagctgcgtgacaaggcgccgttcagaggcctgcccccggtggacttcgtgcccccaatcggggtggagagccgggagcccgccgacgccgccatccgcgagaaaagggcaaagatcaaagaggtgagtgggccgcgccagaaatccctcccgaccggccgtgtttttcagggagaaacggcaagcctttgaaactctgaagactgcaacaatgcaatgtatggggagatggaggtttgccccttccaccaggtgctgtgtcaaaagctctttcttttcctgtttccaatatagtagtagatgtgtccagtaagatctaaggtcaaat

SEQ ID NO: 11109 - DNA, 6000 bp, Homo sapiens
gatttttttttaggaaaacattagagagttgatattagtgtctgtggctgtatttacagaattgcaaacaaccagatggaattgaagaatgcagttaattatcgtatgttttataattatgatatcaaacatctggatgtagtgaaactgggtgaatttcctaaggaaataaacctattgtgtctaaatgtatatgtcagtgaagatttaggcctcacattttaaaggaaacaaaaatatttgtagaggcattctattattctactattaaataaatttacaatataatttagtctttaacagtcaaaggtcaaaggtcactgagttgtaatcagctttttttctgtcatactaaatatccctagacttttgggctttttaagatcttaggtatgattttaaaatatttttcagagtttgtttttgcagttcttaccatcttgaaggaatgtctagttagcatgccatgttttgttgcttttcattgctgttccttatttatgctgttaggtcagcaggcataaaaaatttggctatggagttttggttacacgagtggcatcaacagcagcaggtggcattgcactaaaaaagtcaggtaaatgttttcttttcattagaattataattattttaaagataaaatgagcaagccaactgaaaatttaactggcacaattaagtatcaggatatttactctaaaattctttttactaagttagaccttatgtaaaagaaagttacaggattttctttttgtctttctttttccatgaaattccaatacggttttgtgtttctgtgatatatatacaaccttgttctgttgcctcggaccaatggcaaataatgaactcaggagaaacgtacttaatgctttaagaatcttccttcatcttataaatcagaagaatatcatcttctctcagtacagtcccatctgataggattatctaatgcttattgtcagtggcttacatatgcttcaaaatttacactcatttacataacatttcctaattccctttctccctcttttcttcttgaaagcatttgtcttaccacttagctttcacattatctttgaagttgacagttaagtacatattcttccctgtccatttgatttgtaagaagttaaaacattggaaatttagtatgtctttttttttttttttttttttgtgagacagaatttcacttttgtcgcccaggctggagtacaatggcatagtctcagctcactgcaacctccgcctcctgggttcaagcaattctgctgagtagctgagattacaggaggccaccaccacgcctggctaatttttgtatctttggtagagatggggtttcaccatgttggccaggctggtcttgaactctgacctcaggtgattcgcccgccttggcctcccagaatgctaggattacaagtgtgaaccaccgcacccggccaatatgtcttatattaaggttatctgagctctgaacaatatataatccctgatagagatgctatgacaatattttttcaaggcttagagttgaattataacatgagtgatcactactgattctctctttaaatacaaatatttttcctatagtatattttacatttattttttgggctgaactaatttggactacttgtattatgaaacatgtttcttggtaaaaaaaaaaaaaaaaaaaaaaaaaaaattgtcctaaactgaaccactaattttttttcttctacttagaataaaattcatgtagtgcagtatccagagcacattaactgaagtatttggagactagatttaatctcagatctcacccttggtaaaatcattaagcttctgagcatcagagtctcaaacttttcatgagaggggtaagtgtagttttcaaaggacagaaggaggaagactacagtttcttgagcttctccgatgtcgtaggtactatattaggaacttcacatgtattgtcctgttgatacttcatggcaaccttggattatggcatcattatttcaattttcaaatgggggaactaaggctccaagaagtcacaggatttttgcaaggatgaacagctaataaactggcatatttggaatttaaactctaatattcttgattttagagcccatatttttttctctcataccagaagaccctttctgatcgaatattgttgttatgaacttacttattttaggattcaatgttgtgtttgacacttttccacatgatttttctacttgattttttaatagactaatttgagaatcaggttttatattcattttcgtttagttgtatagtatgactcgtaagaatttaaagactgggttgaagcaaaagttgtatgaaatgcagaattcttcttagtgtatggaattacaaaaaaaaattagttatattggaataagggagcatacactctttggatgcctacctggcctcctgttacctctttctctcctcccctcacctctgaaaaacacagtctgatttcagactgccttactttgctggctgatttgcaaagcaaagtataaactttattatgtttcagaaaacatgctcagagaagttataggccaaagtgaagaagctgggactcaaaattcagcagtcttccagggaaattgtctctcagaatttagttattacagagttttatgataatgaagtatcataaaagtatattaacaatagcagatataatttctaccaagaagagattattttttatataagatgcaagtatgtgtcttctgtcagagtagaccagattcatcagagggatcatcatatctttccttcataatccaaagaaatattatgctataaatgacttgaagtaataattctttttagggtttattaatgaacttataactgaattatggtccaatctggaatatggaagagatgatgttagggtaacccatcccagaactactccagtggatcctattgaccgaagctgtcaaaaggtaagaagttatttgactaataatacacagatttgaaaagtatttcacagaaatgaattcgttcatactttatccatattcagttacaaccagcagactttttaatatatttatttctcctctttttaattttcaaactattatttttattttcaaaataagtttagcaaatgatagaaatcccagtgttttgtgggaataatattttgcaagaattattttcttttactttatgtctattaaagtttttctcccttaatgaagagtaataatgtaccagacatgttacaaaaaaaaaatcattggaacaaagaaaaaccaaccaaccaaccaatgaatataaaaatccaagaaatgttttgccctatagcttgaatctaatagaaaattgtcaggaatatttgaaggaagtacagacagagagaagatgctatcatttagagtgaggtcacaaaatttttaaaatcagtcacccaatgttctatcataattcaatggctttttacatttaacatattctccaaagttcactaaaataaagtgacgattcctaactttgattgtatggtagcttagacaatttttattcaaaagatgtcataagattgcttaaaaagcaaaacactccaatgtttcagaagtttctctttctggactagttcactcccatagaaaacacaaattctggaaaaaataagttaaaaatcaagtagctaaaagcattgaaatgaccaaaaataggcagaaaatagagggaagttaatatatggatgaatagagtggtatttcttgagattctggatttaacagatttttgcttaaggtagaaaatttgtgctccactgatagaaatctaaaatgcttgaagcaccagaatagaaagcttaggactacacagcaggtggaaaattaaaggaggtccctggaaaatagacccacagaggggacactccaaactctgtgtatatactttgcccagaaatgtgactaatcactcaagtatgcctgtgaactgtaaagaaatatcagatgctacctatcataggtgttagagagttcagtttgaatctggccaatgtaactgctaaatttattttttaatgtactctttgtcagggagtataatagaatccaggatctctatggcgtatctcacaatgtatgggatacaatccaaaatcagtagacatatgaaggaaaatggaaatgtgattcattcttgagaagaaggcaactaatacagattgattgtgaaatgaagaatttaggattttaaagcagttattataaatagaatataaagggaaatatccttataatgaataaaaaaattagaaatcagagtagagaaataaaactatgtaaaagaaccagatagccattctagaattaaaaaaaacttacatgaaataaaaatttctacatggccttcacagatttaaacataatagaagaagtagtgaacttgaatcagatcaatagaaattatacagtctgaagagcagagaatgaaataaaagaaaaacttcagtgatttgtgagaccatgtcaaaatgtttaacatgtatgtaattggaatatcagaaatacatttgactaaataatagtggaaaatcttcaaatttattgacaagtagaaatttatagatgaaaaacttagtaaatttcaaagagaatttatgtagagaatgaaaatataaaggaaactacactaaggctcatcatagacaaactgctaaaaaccaaagataaagagaaaattttgaaagaagcttaagaaaatcacatattacatataagagattagcagaaaaatttttcatatctcattacaatagtggaaaccaggaggcagtagagcatcttaaatgtgctaaatggaaaaggaaacagaagcagtcaatttagaattctacatatagttaaaatatactccaataatgaaagtgaaagaaattttaaaataaacaaaggctaagaaaatatttgtcagcagacctgcctttcaaataatgatgaagaaaattcttcatgttgaaagacagtgctaccagatggatagctggattttcaggatggaaacagggaattgcaaataggtaagtgagtatagaagcctattatttttccttttaacttattttaaatacatatgattggttttttaaaacaaaattatgatacatagtggggtttattttgtacttagaaataaaatcgtacataggatagctgtagcataaaggacaggggaattgtataatggtaaatcaatctatatggttcaacttcctcacattttatataaaatggcacaatattcctaatcccttggaaatatttataattcaaatagaaggttacagggattttattcaatttgtttgactttgcaatagaaatgtcagtataaactaaggattttttaaaaaatattttgtattctgctaatctatatacagaaagacctagaaatgacaactcattgtagtaaacagccctagagtccagcttctagtctctaagtcttattccctaagggattcttttttcatttataatctaatttggtcttttaaattgtggaaaacagttatgtagtttcgatatataactagataccttcagaaacatatgtccattctagtccccatccttcatcttccctctgtggcttctgttaaacatggtagacaattgccctatgcagctatacaaacttgtattaattaaaattaaaaattcagttccttaattatattagtcataagtgctcaatagcacatgtagctagtggttaccatattgtaaaattcaggttatataatatttctatcattacagaaagttctattggacagtacttccttaggaaagcactaaaaattagtgcaaagaggtatagctcatacataaattttacaattaaaaaaaaaaaacaaaaataaaaacacaaaccaaacacagaataaggtggggaggaaagaataaaagaacaggaaatgga

SEQ ID NO: 11110 - DNA, 6000 bp, Homo sapiens
ctttttaagttttcaaaaatctagaatgatgtcagactatttacctgtgttgctatatatatatatatatatttttttttttttttttttgtaggaatcacaaccaagatctggtttgttacagtcttcagtaattacagtctacacaatgtatttgacatggtcagctatgaccaatgaaccaggtgtgttttatttatattacatgttcctaaaggttctgcagttgttgtttttccagaaattgtctttttgtgagattaaattacttaaaaattaggcttctagaggaataaagtacaaagttttgatctttgatgtattatttatttcacttagtttcttccatcactaacaaaattataagaaggttacatgtatacctaagagaaactgtgagttcagtttcagagcaccacaatgaaacaagcatcacagtaaagcatgattttttggtttcccagtgcatataaaacttttgtttatcttacactagtctgttgtgtgccatagcattatgtctagaaaaacaatgtacattccttaatttgaaagtactttatttccaaaaaatgctaacagtcatctgagccttcatcaagttgtaatctttttgctggtaggaggtcttgcctcaatgttgacggctgctgaccgaacagggtgttggttgctgcaggttggcatggctgttttagtatctttaaactaagaccacaatgaagtttgcccattgattgactcctcctttcacaaaatatttctctgtagcatatgatgctgtttgatagcatttgacccagagtagaatttccttccaaattggagtcaatcctcttaaacctgctcctggttcattaagtaagtttatgtaatattctaactcctttgctgtcatttcaataatattcatagcatcttcatcaggagtaaattccatctcaaaaaactactttgttcatccataagaagcaacacctcatcattcaggcttgataatgaaattgcagcaattcagtcacatcttcaggttccactttttagttctcttgctctttccaccgtatctgtagctacttcctccactaaagtcttgaaatcctcagtcatctatgagggttagaatcaacttctttcaaactcctgttaatgttgatattttgacattttttcccatgaatcatgaatgttcttaatagcatctagaatggtgaatcttttccagaaggttttcagtttactttgtccacccagatctatcagaggaattactctatggcagctatagccttacaaaatatatttcttaaataataagatttaaacgttgaaattactcctttttccatgggctgcagaataaatactgtgttagcagacatgaaaatattaatctccctgtacatctctatcagagcttttgggtgacccaggtgcatcgtcattgagtagtaatattttgaaaggatcttttagcagtaagtcccaacaatgggcttaaaatattccgtaacccatactttcaacagatgtgctgtcatctaggcttttttctattcatagagaggctgaatagacttaatataattcttaagggccctaggatttttggaatggtaaagaacattggctttctcttaaaatcattgtctgcattagtccctaacaagagaatcagcctgtccttttaagctttgaagccaggcattgactgacttctctatagctatgaaagtcctagattatatcttcttacaatagaagtctatgttgtctttattgaaaatctgttgtttggtttggctgctttcttttttcttatttttatttttttgagatggagtttcactcttgttgcacaggctggagtgcaatggcacaatccccgttcactgcaacttctgtctccttggtaagccattctcctgcctcagcctcctgaatagctgggattacaggcctgcgccaccacacccagctaattttgtatttttagtagagattgggtttcaccatgttagccaggctgttctcgaactcctgacctcaggtgatccacccgcctcagcctcccaaagtgctgaacttacaggcgtgagcaaccatgcctgaccagtgtagctactttcattaattttgttggctagatttttaggatgacttgctgtagcttctgcatcagcacttactggttcaccttatacttttatgttacggagacagtttctttcattaaacctcaacaaccaaccccatctagtttcaaacttttcttctacagcttccttctctctctcaatcttaatagacttgaagtgagagagagggccttgctctggattaggctttggcttaagggaatgctctgctggtttgatcttctatccaggtcactaaaactttctcctccatatcagcaataagactgctttgctttcttatctatcatttgtgtgtttgtgttcactggagtggcacttttaatatccttcaagaactttttcttttctttgcattcgcaactcagctaactggaacagaaggcctagcttttgacctgtctcagcttttggcatgctttcttaactaagcttaatcatttctagcttttgatttaagtgagaaaggggactcttttacttgaacagttagaggccattgcagggttattaactggcctaatttccatatggttgtgtcttgaaataggcccaaggagagggatagagacaaggaaatggctggttggtggagcagtcagaacacacacaatgtttgtcgattatttcaccatcttatatgggtgtgatttgtggtgcccgaaagaaattacaatagtaacataataggtcactgatgagagatcaccataacagatgtaattaataataatgacaaattgtgaaatattacaagaattaccaaaatgtgaaacaaagtgagtacatactgttagaaaaaatggaaccaatagacttgtttaatgcagggttgccacaaaccttcaatttgtaaaaagaacagtatctgtaaaatgctaaaaaaaaaaaaaaaaaaaaataggcaaagcacagtaaaacaaggtatgtctatgtaagaaactgggtgaaattataagaaaggtatctgatttgcatagagcatataattgtcgtatatagaaagaaaaactcttcaaattcctgttgattcaattgtgaacagtataattttttcacattattaaattactcttttagcctgtgactaccttacaattgaatttgataattgggctttgtaatgcatcttattataggctagttatattgcataccatgagaatagaaacatatgttgaaaggagacaaattagaatagacaaaaattattacctattaaaaagaagaaaatgatctcttttcctaaaaaatttatctgatgttatatgaatctcattgagtttacaaactgtaggtattttatcataggtactttataacttggagaccaatttattttttgtttttttgttttgatgtattacacaaagatttcctgtttttttccaggtaggtggttagaaaaaaattattagtagtttgctttagagaaggaaatagccttacctaattggctttaaggtaagaatcattttcattagtaagatggagtttgacagatctggctttgcaggagaaaaatatgtattttagacactttagtgaatattttagcaatcctactttttttttttttttttgagacagagtctcgctctgtcgttaggctggaatgcagtggcatgatctcggctcactgcaaccgcctcccgggttcgagtctttctgcctcagcctcccgagtagctgggactacaggcacatgccaccacgcccagctgatttttgtatttttagtagagaagcggtttcaccatgttggccaggatgatctctatctcttgaccttgtgatccgcccgcctcggcctcccaaagtgctgggattacaggcatgagccaccgcaccttgcctactttcttctttataaaagaataagacttgagtaagcagtaggtcattatactttattgggtaatttccatgaggcatttgctggagtccttataactggtttttgtgtaagctgtcttggttttttaacaatgtgctgtatcaaattgataagcttcataaagtctgtatcataatctcaacatatgatagaaaagccagtgcattgtggtttataatctctgaattttctttctaaatctactagaattatactaaccttagaaagttcatctatatttcacctctttcctgattgtagaggtaattatctctcagctatcacatgttgttgaaaattaaatgatttaacttttccaggtacttctataaaatcagaactattaacacttcaaaggtcttattaataagtgcaagttttcttcaattatttttgttatactgatgccttttccagcaattgtttctcaatttgcaggggtatagagagttaaaaataacttttgtttgctctgaaaaacatctttttaatatattctaacattttaatttggctttatattacagaaacaaattgcaacccaagtctactaagcataattggctacaatacaacaagcactgtcccaaaggaagggcagtcagtccagtggtggcatgctcaaggaattataggactaattctctttttgttgtgtgtattttattccaggtaggaaaaactatggaatttttttctttaaacaagaagtctagctgtttatttatgaatcatttcttttaaaaatgttcttttttttctctcctcctaaactctctttcatacagcatccgtacttcaaacaatagtcaggttaataaactgactctaacaagtgatgaatctacattaatagaagatggtggagctagaagtgatggatcactggaggatggggacgatgttcaccgagctgtagataatgaaagggatggtgtcacttacagttattccttctttcacttcatgcttttcctggcttcactttatatcatgatgacccttaccaactggtacaggtatttatatttcatgaaaactctggatgtgtgaattctgatggcattttatgattctcttgtgaaaccatgatgtgatatgaagtactttttatcctctgatatatttcaaaatgtacagctaaatgaatagtgagatcagcatgagaaatgcagtctttacttccttgctttaacagtaacacaaacattgaaatagttccaaatcttggagagattaaaataaaaattttcatgaaactaatactttttacaaaaatccatgttgatagtggatctaacattttttttttcaattctgtaaagatagtgaagtaaaggatacatccttttttctcttttgtttgaactgtcattaaaagctctgaaaatttttaaatttaagtatgaattcattaatgtagatagattcttagaattcttacaagccacaatttttacaagcttagaattctttctacaagcaacaatttctacaaattctacaagcttagaattcttacaagctacttttttttttaatcacttcaaacttaatccataaatctttttctgttaaaaggaagatagtgatttatagtgtttcatttttgaaagttctggttttgtccaaatgattactgaaagatttggtcaaagattcaaattgaactatgtggtttgggaagttctgtttttaataactttttaatgcataatattaataaacaaattgtaaggcggctctcagtatcagcaaaagatggaggaaaaagattattctttgttgtatgtctttgagtgcagcctttactgatttttattattgaaaagtatatatattttttaattcttacactgtagcgtattaagctataagaatccagctggttctttttttttttttttttgaaatggagtcttgctctgtcacccaggctggagt

SEQ ID NO: 11111 - DNA, 6000 bp, Homo sapiens
ccttgtgtaacacttttgcttttcataaaccaagaagcaattagagttagattatacaatatttgtttagaagataataaatcttacaggatgctaataatttaaaaagctgcatatgttgttactaatgatcaaactgaaagaaattatatgatttcaaacatgactgtctttctgatcgttcaggacaggaccatgtaaggataacatctggacctgatctcacatctcaaggtcttaaagttgtcacttcacttaggtttaatattttatcttaaaaatggttattcatcaaatattcattaaatgctaaccatatttacaacattctgcgaggaaccatagggttacaaagtatatgacaaattccttagatataatatataataatcagaggtggaattttacaattattattctctattctctactttactactggactgggttttaggactagcccccatccctgctctacttttctgccttaagatttagggaaatgttttttctgataatcacattgctggaatctaagatgggcttcctcatcaagtttgctttttttcttgagattttgaaagacactctcagtcttcagctgtatattgagcaccttcactgtggcatgctttagggactgaggtcatagtccttttcattgtggacttttcatcctggacttttacagtctggggtagatggatgtgaaacatatacttgtcaatatgtaatcctaagtttggaaagtccagaaaaaaatatagggggtttagaagaatgtgtcttacccaaggagtgcacaggaattttgacattaggaaagctaggcaggagatacaagcaaagagtcccacctgtgtgaagacatggagactggagagaatgcggtgcattggagagaatgcagtgcattgcagcaactgagagaagcccactcactatggctggggaagaggcgtgaaggagagtctggtgagagtggccaaagcttcaggtaaaagccagagcatgcaggaccttataactaacgatgacgacttaaaggaaaagacatgatcaaattttcataagtatcgccctcagtatagtgtgaaaaagggtttggaggggccacgtggattttggtgagaccagttaggaggacattgttgcagtctaagtgactgtagggtgagagaagtgtacaggtaaaggtattttgaaggtgggagtgatggagcatgctagtagatttgtggggacttagagagagggaaggatgagagatgctgcctgagtatttggtttgaactgtaacatttaaggaggatttttttttttaggctcttgcctccacgaggatttaaaaacaaatttgcatattaccttttccttacagttcacataattccttttttaggcaacatggctatatattcttttatcttttccctgaaattgcgtctcttattaagatttaaagtatatatctatgtacatatgcatttgtttaaaatgtagtcatttaaaattcagttctaaacaactgggtccttaccccaggcacctttctatattgattctcctttaacttccttgagtgataagctttgctatttttgaagttctttgcctattcactttctcttctttagactgtgtatgaatggatagatacacacactcacccacacagtttgttttaaattgcacagagttgatgtataataaaatatgaagaaaggaagaaatatttttaaaattcttatattttctttagtggtttgtcttagaaaatgaacacataccggagagttgagaactgagatttttgtttattttatttatttattttttgtgagaatagcaaaggctttacaatgtgactgcttactaatgtcagaaaaatagcaattcagctcttactttctcccctatactttcagggcgttatgacagttttaatgtgagttgtaaaatgtagggaggtatactctaattctctttcacacacataaatcaagtttcaggctcttttggaaatgtttactagaaaaaacatcatgggcagattttaaaatgcttttggattgcatgacggcgtggtgccacttccattgaagtgttgtaatattttattttccttcccaaagcgtcaagataaatcctgtaaacattttttctccttttgttgttttggttgtactattgtgtttggctctagccttttgcccccagggaaacaaaagtgtttttttttaactgcagtgctcccgctgagtactccagctgttgggcagcagtttcaaagttgttccctatttacacactgcaagtctggcggatcacaaagcttcctacatcttatctgaaacacaatatactaatttcagggatatatttagaaggaaaattgttgtcaaaatttactataatgtagcttattttatcttttaaatttaaaatctactaaatcattatatctttaaaaaatggtgatggtgaatgtcagcataacacgtaatcttatcgaaacaattaaaatttatcaattagcaggttcaagtaactacacttttttttttttttttttttttaagatacagggtcttgctacattacccaggctggagtgcggtggctgttcacagttgaggtcatggctcattgcagcctcaaactcctgggctcaagccatcctcctgcctcagctgcccaggtagttggaccacagacacctgttctagtaactactgtttgtctatatttaacgttaaccaatgtggtaaaccactagtgtgtaccagcactatgttaggctttgtttaggttttgccctctaggagcttcagtctgtttggagaaatggacatgtagataaatgttataactcacgtagaaatgaagtgcttagagaaggcagatgacagagttactggctgtatctggagaagttggataaagcatcatagatgaggggacagttacctttggagtttccagatgaagagatggaggaaaagtgccttgatgacaccaagtcacccattgtgcttgtttaccatgtggttaaaataaagcatttgcatttggtgatttctaaactctcttctagttctatgaattgaccacagtataagtatagttgtttctgtgtgtgtgtgtgtgtgtgtgtgtgtgtgtgtgtgtgtgtgtgtgtgtgtgtgtagggggcgggaggtactttttttttttttttgagacggagtctcgctctttcacccagctggagcgcagtggcacgatctcggctcactgcaagctctgcctcccgggttcacgccattctcctgcctcagcctcccaagcagctgggactacaggcgcctgccaccatgcccagctaattttttgtatttttagtagagacagggtttcactgtgttagccaggatggtcttgatctcctgacctcgtgatcagcccaccttggcctcccaaagtgctgggattgcaggcgtgagccaccgcgcccagccagttagcggggggtacattgactgggcttgagatgttcgtatgtaataaatttttaaaaattgcagttttaatttccagtttttagtgaattttggtcaatagaatttgctcttaggaaaaagtaaaggaggtgaatgctggctttcttttgcaatagaaacagccaactcactcattcatttaacatatattgttgagtgcctaccatgtgccagatattgttagagagcaataaaaacacatattccggcttctaaaatacttacattttggtggcacatgggacaccacactctggattgggggaaaatttggggtatgggttgccacaaaaatgagcaaacatcagtgtctcctgccctttccaaaaagcacaagggggctatccaagagaagggagaaagcaggtctaggcttggaaaggataggtggaaagtgtggcactagcaaggggtttttggaaggcaagggtttccatatgcaaagattgggagatggagtatttcagctgaagagaaaacttaagactattttcaggccaaacagtccaacttgaagagtgggttatattcaatagagtagtaggagatgaattagatactgagcatgaaaataacagctatgaacttgtcctcatgccaggtgctgcggcaagtgtatttacttattaaatacttcaaaatcccgtaaaataaatattattgtgtctccatgttacagcttctcttggggccatatgagtaataaaagacaaataagtttcaagctcaggtctgtctgatatagaaatacttgatctcaaccaccataatatattggaattttcatttttggatagttaggctacaaggttctcttgaaaattttgagtaggcagttgcttaaatatgtacaatgtaacagtatgatatatcccataatagtgttagatttggggtattctgggaacatgctgaagaggcaaactactcagttgggggtggatggatggaatttgcctaggaggggatatcagcattgagaccaaagacatagagcagttatcagagccaatgaggagggttttcttgatagagaaggcagcatgtgaagggcccagaagtacggtactaggaactgctactggtatctttgaagattctgtaatagagatgaatgtggcaatttgttgggactagatcatgaaacccttgggtgttatgcaagggaatgatgactttatcttggaggcaacctgatgatatggaagagttttaggcagataggcaggggagtgataggatcagacttccacaattagaagattatgttaaattcatttaaacaaatgtgaacagtagtgaatcaattcccaggggaagtttcattgccaagtattcttcctgccgtgaagattagcctgttagttaccaagccgctttcgttttcagtgtctgtgcttgtggtcggtaacttttgctgctgttgttctgctgctgtctgccattccattcgccatctatcacgcacacagaaccctggccaggatcatgaagggcgattgaaaaggtaacaagagaaaaaaaatgatagattaatgtaagcctgatgtttgttttagtggcagattttggtgttcacatgagtgcctgagcctgtctaaattaatctcatattctcaccacagtcttctagcttgagaattgactgcaggtaaaaataattggaaattattggtgtagccgaaactgcattacagctgccaagtgtggatacaccggagccaggctgcttttgtctgcttcctcataaacattctttccgcattctttatcagcacataatcctgagacacaaaaagcctttgtgtcccactgggaatgtgagaaaatcaaagctatctattggttttgctcctgttaggaaccactaacatttctatattaaccacccatgttttgaattgagatagatgttatcagcaagatgtgtcctccatttatccccaaagatatcactgtcccaatacaagaaatcttaaagacagactgcaaatgtctgttttcatccacttgatgctgtgatttgtggatacttgttagacatgtgaatttaatggggcttagcctaatagtaagcatttatatagaacttcccatgagccaggcacttgtatagtaatacatctaatcatcaccacagtcatgtgaggtagctattattgttttatactgtttgttatgcactgaattgtattccccaaaattcatatgttgaagccctaacccccaatgtgattgtatttggaggtagggactttaaagaggtcattaaggttaaatgatgtcataagagtgggccctaatctactatgactgatgtccttataaaaagaggaagagactccaagaatgtgtgttcacagaaatgaagacagaagaccagaaggtggctatccagaaatcaaggagagtcctcaggagaaaccagccttattggtatcttgatcttggactttca

SEQ ID NO: 11112 - DNA, 6000 bp, Homo sapiens
ctcttcatttccctatcccctcaaacctttcactcttgaacctccagagggcgatccaatgtctgaggaggacaaatggcctgcaattcccttcccggagcagtgccaggacagagtgtgaccctggccccctgcacccatgtggcatgcagatctgggccttgattgccttaagtcatcctggccccctccaggacttttttgaccttcatgtccacccacgcaaggacagccgcccttcctcagcccggtggtcttggatgcggctgagtgcctgcagtccctgccactgtcacttggggccactattaaagcatgagtctgcagcttgcaccttcctacccactatctgggccagcctattctgttaccagcacagttgattgttgagaattcaaagtcaacgcaaggattcgaggctctctggggagagaacttccttcatccccattcccaacacacggctctcaatacttcccttggatagcagtgtatttaaagatgctatgtacaaaaccaaatttactcctttctcattttgaaattttgcaagtattaagataagtgggccgggagcagtggctcacgcctgtaaccccagtactttgggaggctgaggtggatggatcacgaggccaagagatcaagaccatcttggtgaaactccatctctactaaaaatacaaaagttagctgggcatggtggtgtgcgcctatagtcccagctacttgggaggcttaggcaggagaattgcttgaacccgggagaaggaggttgcagtgagccgaaattgcgccactgcactccaccctggtgacagagcaagactccgtctcaaaaaaaaaaaaaaaaaaaaaagtcacagaaaagtttaaaaaatatgagaaaagacagaggaaagaacactttgaacaagaaaaccaaaaggtaggtcaaaactatcaaaggaaatctctgtgtatgtgtttgtatttttatatatttatagtcttctaaatgtaacaaggctgagcagcttaaaagaacctttttaataatgagaatattctatataactgaatgtggaatatgttagtaataaaaggaatcttttatgttaagatcatattgcaacctatacattataatatgatacataaatcaatccaaaggaaaactaaaaaggttaaatacaaatcacagatcatttttaaaaattaaactttaaaaattttgagataattgttaattcacatgcagttgtaagaaataatagaaaaagatcatgagtattctttccctggttttcaccaatgataacatcttgcagaactatagtacaatagcacaaccaggatacagaacattcccatcgccacattcttcacgttgtctttttgtagctacacccacttccctcccatcttcacttctggcagccactaatctcttctccatttctatcatctggtcatttcaagaaacgtataaatgaaatcgtattgtatgaaactttttggattggcttttttcagtcagcataatgcccttgagttctattggcattgttgcatgtatcaatagttcagttctttaaattgctgagtagtattccattgggtggctttaagacacaatggaatactactttatttgttacaaataaagcagctatgaactttcagaaacaggttttttgtttgtttgtttgtttgtttttgccaggggcgagggtagagggtgggatatgaagcataagacttcacttctctggaataaatgcccagcaatacaactgctgagttgcgtgataattgcatgattagtttgttttcaactaactcatttattttagataagaaacttgattttgacaataaatattaaatatcacgcattaatgaaatatctggtcagccatggtggctcatgcctataatcccagcactttgggaggccgaggtgggcggatcacctgaagtcaggagttcaggaccagcctggcaaacatggtgaaactccatctctacaaaaaaatacaaaaattagccgggcatggtaatgccagctactcaggaggctgaggcaggagaatcgcttgaacctgggagacggaggttccagtgagttgagatcacgccactacactccagcctgggtgacagagcaagactctgtctcaaaataaataaataaataaataaataaataaataagaaatatcctatttacttatttgtttaatgatcaagatttaaatacgtcacagataccctctctaacctagctggaaaagatgtggataataaattcttatatagccaatcaactttcattaagtgcaattaataattgagaagtatctctacacattcatatcagaaggaaattacccacagggtagtcccatgatactcaccatttctttggtgtcactgtcacatgaccccgttttatgaaacaaacccacaggaggggaggctcagacacaacatatttacatggagaagctaaaatgttatttaaagtattaacaaaggaaactaaattctgcatagccaatcttcattaagagcagcttgcaactcctaaatatttgcagtagtttctttcagaaaacctacagctggacttctaatcccagcttacttatagttgagtattacaagggaccacctaggaaagcatgatgtcataacaaattttgacttgtagctcagtgcaattttatcatcagtactaaaacaattcagagtgtatttcatgttgatgataggtcaacaatagcatgccagacacaaaaagcagtatattatatcatttgtttttgtcagtcaagacaaaaattgaataccgaatcaatcaagtaacattattgtatatttcaaaaatgacagccatgaaatcagttattgcataaatacaggtaggtttttttttcttttaagagaattaaagccagtgtagataaatctttcatctgagaatagtactaataccttttcttctccctatattttcagaacttttggctatgattatttcttctattgttttctgttctatcaccatgtttattggtcggcttttgtctctttcgttttagttatctgataaaaatgcgaatggcttggtggttcgtgtcttggttgttagtaagctgggtccagcctgtagttctggaacacgatttagtgagggagacagggatgtgaattaggaagtaggcaatcatctcatgcagtaagacagctatggcattggatcgtatgcttgctactgcatcttctggaaaaacagtattattgcagtaaagcaacattattaattggaaagaactgcatgggaaaggaggatctgcccacagattcttcattcatatagctgtgagaattaagaatttgtcttaataataaatttattaaatttatctttaacatcttaaattatcttaatttatcttaagatctgcccacagcttcttcattcatatagctgtaggaatttatcataacacagcactgaaaactttggtgagatgattcagaagagtgagaatttccaattgatattgtgcatgaattgatctttccatataaacaaactccattcagtagaactatggcatacgactcacattttaaggtgtttaaaaaatgcagacaaatgccagacttccatttttctgtttttgcatgtagtcactgtggttaatgttttagcctacaagaaactgaagaaacagctcataaagaatttcttcccctactggagcctctaaattcctgtcctgtcagccttccccagaggaaggataagcagggtaaaggaggtgctatgatcctgccctgcctccatgcctggctgccacccagagagggaaaggagtagagccatgattcacttttcagagagctgccaagctgttttctagagtggctgtaccatcctacattcccaacagcaatgtgtgagtaatccagttacacagcaggttgtttagcatgttttttaaaaaatagaatggtgcatgaaataggtggagtgaaagctttttatcagaaagagaatctgtggtacaaatggagggaatgccatcaagattagcaagtagaaacagaatttaagttcataattttaggagaaaccattcagatcaggttgacctggaagaaaggaaacttgaaagactttgtggagacagacagaacaatgcaaacataaagaagtagacacattgacattcttttaacaagacagtaaccaaggacaggtggttatgtcaccaaaccctgggtaaaagctgccttgggcatggctcttgtaatagggcctccatcttgtaggaatgaagcaatagtaataatagcaaaaattattcagcacgtatcaccattgtgcagatagaggaaactgaggcacagagagggcacaaaacttgctcatagtcacatagctaggaagtggctcaatcccaggcattctggccccagagtccatgtccatgttaattattattagataccaccatgacccttataacttacagtgagaaaaaagctctccataactagatgcaggaccatacacaatttagttctctctaatttgaaggacagtctggagtgggatctgtcttacagtaaaagaataatgtgctaaagagaaagactatgacatgaatatgagagtcgacttaggctttgtaggctagagaatctcctgattctattgctgtggttcctctgctgagcttggttcagtagaaattgtgtcaatgctcctcgcctgtgtcatctggcccatacaactccttgaaagaaaagctcaggaatcagaattgccaggctagaataaaatagacactctttctcctggtgtctgactgaagatgcagcatccttgaaccagcagctgctgggactcctgtctgtcatctcaaagggtacggcccacccagaaagtgaaatcaaaacaggaagtcaccaggggtgactggaggagcacaggccttggaaaggaaagcagctgagatccagaggagtggaaggctcccccttgactaaagctgtaagtagttaccttgggctgcaaacattattttttctttgcttccttgctcactgaaaataaacaagtggcattattggtggattgctgtgacattctcatattgatcaataagacataaacttttctatttttaatctatcttttttttttttaagtctgcgatttccatgatattttcttaccataccctttcaaacgcatgtctctccaactgcctacataaatcaacgagtgacttggatccagttcctgtggatttatttctgtggtgacagtcatcccgactttaccaaaagcttttaattcagtcaagagaatttttaattttttaaaaggaccggctggtgaatgcaagaaacttttggcagggttaatagactggcatagtgggtggacctatgagattaatattgttaatattttattttaaggaagcaggagctgtcggaaagtaggggaggatgctactaactcaaagggacttctgcaacttcaaccctaagtttctgagacaggaaaacagacatgttggttgaaccatgtgaaattacttttgctaggtcaaaaacagtgatgattggcaatttcatgttgcacaagcatttccatctagcagtgctttcagagaatccaaggctgtgatatatcattaccttctcagatttgctctggtttcagctgtgttcattagctatctgaagcattgaacacccatccaactctaaagctggaagattacctcatctgaatgagacctggccccaaaagatggttaaagttcaagctggttcttttcaaggcaaccttgccttttacagggcctgactcagtctcactaaagccatatgtaatactccaatggtgtagagacagaaacgtttttctttgccattaagtactttttttggatacagtattgtacttttttggtatacagtattaagagg

SEQ ID NO: 11113 - DNA, 6000 bp, Homo sapiens
ttgaatcctataacatgaaccctatcgtatattgggagtaccagatcatgccacaggtccctgtttttaccgtagaggtaaagaactatgggtgagtgtcactcttttatttatcctttttattccatttttgtttaggtccttggaaattccacaactgtgttctttcatcagccttcccacgtggcaaaacattctaaactgcttatagaggtccaaaagtactaaagatgcaaattctttgccaaatatttcttgcctcttatttcctcttccttatcagtattgaaatagagaagtatcactaaacttctgagattagcatgacaaataaagctaatagttactatgtcatcttcctgtagtgtatttttagtagaacaatataaatttcaaaaaacttttttgacaactgttagtttttttaatgtgcttacttctataattaacatatataaatggaatttagagttgtttaaaaaaacagatttttaaaaaattgaatgtggaatgtggcttgcataggtcttacattttgaattgagcctctttactgtaacagagtttgtagttcttctaactaaagagtaagggtttcctactttctctggcgtctccatcctattcttagctctgctctttctaccgctttgtgctgtgaataaaaagcaaagcacagacagaaatggtttgagtttatttaataacaataaaagttatcttcgcatttttttattctttttagtgttaagaattcagaatggattgatgcctgcatcaatatttctcatcattattgtaatatttctgatcatgttggtgatccatcaaattctctttgggtcagagttaaagccagggttggacaaaaagaatctgcctatgcaaagtcagaagaatttgctgtatgccgagatggtgagtagaatgtgtacacatgtaaattttaaattggaaaatatttatacatgtcttctgtatgtttgcttttattagcagttgctgaaaattatcacaatgcttaagaaacacttggaggaatttagagtcagtacaggttgagcatcccaagtctagaaacccagaatgctccaaaatctgaaactttttgagcgccagcatggcactcaaaggaaatactcattggagcattttggatgttcagatttagaatgttcaactggtaaatataatgtaaatattccagaatccagaaaaaaaaactcagaaaccgaaaatactactgatctcaagcgttttggatatgggatactcaacctgtatcctccccttctttcaagccccacaaaatagggctaacaggtggccatcacttagctgcttctatgccatgacatttccacttcatacaattatgggtctgtgctgcccagcggtcccctgcaccacccttgcccttcccatcttttgtcattcatttgtaagttatattcactaaggactttggcagctaactcttattctgaatgcctggggaacctgaataccaccttaatacattaaaaaattgcagagttccttattctcttcagccactgtgattttcaggtcttcagtcttccagcatcccactcccatagtgtacctgatgtttgctgtcacctcaaactcttgaatctttaattccagttcctgtattccaactatgacatcctgccttagctctcagaccctgactcctgggtaaaagacacctttagtcacttgactcctccctagtcttctagcccttgggtccctttccctctagcctcacttcctttctctgctcctgccttttagattgtgccacctcggtctcttctacaggctcttcctctccttaccctttaaatacttttcttccccagagtccacaattttgtcatatgattaccacaccatctgcatgttagatttttttccatatagatttatcaagggcctactacgtgccggaaagtatactgggccctgaggatacactgatgggttaaaaacagacctgcctggcacacagtggtacacagtaatatgtgaagactagataaatggttcacaacaaagtctcaaacatcaaagacctaataaatatttatggaataagttctgatttttcacagtaaaaagagttttgatgagggaagaaaactaatgccatttctgaaacgttttttagaatccaggcttcttaatccacagaagcaaagataaaggaaaaattacttaatagagtctatattatgtgaagtctttttttaaccaaagtttataactatttttatttacaactagaaatgaaattaaactgctaaataggcattcagattaaataagagtacttcttgcctgagatttatgaaacatttgtttattaaggaccccgagactatcttctagatatttgtggagtggtttaaatgtggtcctgctttagaacaaccagaacaaaaacaataggttgattgatagattctggtaattttatgaaatgtaccatttagttccaaggccagtatttattatacttcctcctcctccttccccaggaaaaattggaccacctaaactggatatcagaaaggaggagaagcaaatcatgattgacatatttcacccttcagtttttgtaaatggagacgagcaggaagtcgattatgatcccgaaactacctgttacattagggtgtacaatgtgtatgtgagaatgaacggaagtgaggtatgtgtttcacatttttcataatggaaattcttgtgtagctagcaaaagttgttcctttctgtagtgtaatgaaaataggatgcttataaatattcaagcaagactcacagatcatagatttgataagaaaaatatgtgaatgctattaaagcaaaaatgatacagagttagtcactaacactgaccatgtgaatacatttagtttttatttgcttcatttagcagaatggctctaatctaggatttttcccagtacacctccattgctccactggtaaaatgaggattttcttcctcattggcggtgacgtaaagtaatattaatacttctgtttcccaccagctaaatttctggacaaatgaataggacaaatgaacatttgttagtttaacaactaacaataaacattcctgcaatttgagtttttaaatttaccatttttataaggaatataacagatgcatagtatcgtgctgtgttgaagtaacaaattgacttattgatagtaaagctatttttagacatgttcaagtcaatcatatatatttcttcagttgtttgaccaggactaatatggtgattttttttttttttcagattaaaagaagctgtgcattttcactgttttcttttttcatctagatccagtataaaatactcacgcagaaggaagatgattgtgacgagattcagtgccagttagcgattccagtatcctcactgaattctcagtactgtgtttcagcagaaggagtcttacatgtgtggggtgttacaactgaaaagtcaaaagaagtttgtattaccattttcaatagcagtataaaaggtaagttcttgccattttttttctaaatatagagggagcagtaactaaaataggatcatgtgaggaaagcaaactcatttgcagtttcaaaagatctgttttaacaatattcatttgcattagttccattccttagagaagttcaaaattaaaaataaagcagtttctcacacatttaaagatatagaacaactaatttggaaagccatgtgatggccccttgacccaggaaagaaaaaatatataataagtacataaaactacacaaatgtttgcatttcaggattatgaattataagtcagtttgttacttcaccatagcaagatgttgtgaatccactaaaatgttctttatggggattgtaatttaaagactgaagagcaggaacgatcactggttacaactgtatgacgtggactggacaaagactcgagattaatatccaaaaaagtttatagatgggtttgaataatagataatgggtcatttttataacattttacaataattaattttatttcatcttttaatgtggggggtggggaggtagagatatatatgctagaacttgaactttagaactgttactctcaggtgtcaggaaccttaaagaagtttggacttttctttgcagttaggaaatgtaagtgttcattatagataatttataaaatatgaaaaaccagaagaaaacaaaataatctgtagttctaccatgcaaaaataccccattattcacagtttgatattttctttagtttttctacatagacatgatcatattgtatagtatatatgattttgtgtattgctttaagcatatattgtaactcatgctttgatgattatctttgtgtgtgtgtgtgtgtgtgtgtgtgtgtgtgtgtgtgtgtgtatacatatatttttttccttaggatttttttagaatagatttcataggtttaaaattttatgatgcaagtatattttcgaggaatggaaatataggctgaagagccagaacaaacacctaaaattcaatactaataacttcaagccattatatgaaggtttcaaataggtgatttaaagcagtgcaatgcattttatgctaattttcgttatgctatttgaaaaataaaacccttcttaatgctcaaaatttgaaataatgcaaatgccgcagatttgtttttagcctgaattatacactgcactgatagtatggccacacggtggcattgccgtggctcctgagcagcagccctgcctgcttgcctcaatgccttgcagccagcacttgctcagcccgtgggacttctaacagcactaatgttggttttgtagttattttcctttttacttttgtaatgatttaacttttttcacaccctgtaataagcgtaatagaagcattcattagtaacttccatagttagaaaattctgggtaacaaaatgccctaaaggatgccggacattgtcacagtatgttagagtgctgttaatttggaagagagaactatgaaaaaaaaaaaatactgaagattgtgctgcaaaaataaaaggcagcattacagcaaagtacacaatggtgattctagatgtatgtgcttggaaacaaatctttcctattttatattatttatgtctggtttataactaaggggactttattcctgtgcagcattgctgtgtgcatgtacatctgtgaagctttataagtatttgcagtcgtgaaataaatgtaacaggaaattctgaggagtggggctaaatcatcttaagagcaataaacattgccagaatttctttctttttttttttgttgttttgttttgttttgaaatggagtctcgctctgtcaccaggctggagtccagtggcacaatctcagctcactgctacctccacttcccaggtccaagcgattctcctgcctcagcctcccacgtagctgggactacaggcgcatgccaccacacccagctaatttttgtatttttagtagagatggggtttcaccatgttggccaagattgtctcgatctcttgacctcgtgatccgcccacctcgacttcccaaagtgctgggattacaggcttgagccactgtgcccagctgccagaatttgtttctaaggagaggtatttttaaaattattcttttgcatttttaaccgaaagaaatgcataaccctggaaacacactgtatgtagggctgtaaggaaattattgtagaaaagctattttaactatgttgtgtcatagtagaatagtcccagaaagttctagaattgcagagctgggaagaaccatattgctatctaagacagatacctaattttttactcagatttcctaacttctgcttccttcagtgttctttaaaactctggccctattcactaatttgtaaatctattcaagaatggcactaagactttttgatagataatagc

SEQ ID NO: 11114 - DNA, 6000 bp, Homo sapiens
ctggtccaggccctcccaaggcctggctgcatttcctccctgcctgtgagtgcatgtgtgtaaacacggtagctattttttctttaaaccaatctaaaatgagtttctgttgtttgcaatccacagagatttaactaggatgaacctagatcactgagctgcaaggcaagaactccatgagaggaattccaggtagaaggccaagtaggtgctcaggggagagatttgagaccagaaagtgtcaggcaactcctgtcttcactccctccctctctcaaggctatgtatgcactgttctctatttcctcttttcacggttccatttgtccccctctgctgaacagcttctctctgctatcatccccttccatgtcccctggagctcacctggcttcccagctacacttccctccctgactcaatttgttgagtcagtttgttgagttgatttgctgagtcagtttgtttctcaattctgtttttacattccttggagagagtatctgattggctgtgcttgggccaggcattcattattgattccatccctagtgaacagggggtgtggccacctgggggttggggctgccccttccagggacgtgagcagagcagattccatgaaaggggtatggagaaggaagaatcttagtgcaacagccactcagctgggatgttgtagaggagattcaggcttcaagtggtttcatgacttctaatcttaggaaaggtccttcatttctgttgtaataacaacaacaactagcatttattgaacttctataatgtgtcagatgcccttctaagcacttcacatgcactgacttaacttattcgatgcctgtaaaagtacttagatgggcagtagaggggaggggagggcaacaaaaaacgatgtcactagggtgttgctgtagattggatgtttgtaaccccccaaaattcctatgttgaaacctaatgtgatgatgtttgcagtggagaatttggaagatgattagggcatgaaggtggagccctcatgaatgggattagtgttcttataaaaaagatcccaggccaggcacggtgcctcatgcctgaaatcatagcactttgggaggctgaggcagccagatcataaggtcatgagttcgagaccagcctgaccaacatggtgaaacccagtctctactaaaaatacaaaaattagccaggcgtggtggtgtgcgcctgtaatcccagccactcaggaggctgaggcagaagaatcgtttgaacccaggaggcagaggttgcagtaagcagagattgtgcctctgaactccagcctgggcaacagagcgagactttgtctcaaaaaagaaaagaaaagaaaagaaaaaaatcccagagagctccctaactcctcccacaaggtgaggactcagtgagaagactgctgtctatgaaccaggaagtgggccctcaccagatatcagcgtctgccagcaccatgatcttgaacttctcagccactagaattgtgaggaataaatttctgttgtttagaagcctcccagtctgtggtattctgttacagcagcccagctaagacacaggttatctcattccaacattcaacaaactgacctacgaagtccaatctcaatttgatccactcttactcttaatgatctatcttataaaacagaaacacatcttcctgacattttcatcctcacataaaaattcttctatccattgataaggttttgatgtttaggcttttaaaacaaagatagtttatttctgaaaaaaactgaaaagagaactagaaaaagaagataaatcacaatgcacagtgcaatgaaacttcgtttttaaaaaatagccttattaacatataattgactatacccacttaaaatacacaatttgatgaactttgatcaatgtattcaccagtgaaaccatcaccacaatcaaggtaatgaacacacctatcacctgcaaaagttttcatgtgcttctctgtaatcccttcccttcctactcaaactcatgcctcttgtcacaaggtttctccactctggctgttgggaacgaactattgcctggccaatgcaagctcagaagtttttctgccagcttttttctagtggttgcctctctgtcttgggaagtttcctcacatgcatgtacctggtcgaacttctgctgaagactcagaggaaccctgcacagatctccagagctccctccttccgttgcactctctcctctctggtactctagccaccctggcctccctgaattctcagctctattttccaactcagagtctcttttggttcgcctgtctgcattgcggcttggaaaccctctccaggcagtaagctggagcaagcagcatgttcacttcctttgtctcccttctcttgggccctgcattgcctgttgcccaatgtctgaaaaccattgttccatacatttttttcacagatttttcatttcaggtcacagagtaagtccagtccttgttgctccctcctggctgaagcagatgtcaacacttatttttaaaaaatagaaaatcatttacaacaagctcattgcaaaaaaaaaattcaacaaagtcttataaattataaaagtcagtatttccccttcagtacttgcaactcacagcccagaaataaccactgctcacggtaaacacaacattaaataatttccacttctcccaaaaagacctattgtaaagttgcagatgcaggaaaatctttgatggtgctggagggatttagaaatgaatgcccctgagaaatgctgtcctctcccctgtccacttccctaccacggaacatgtgagctagggctcactctatactgacttctctttcacggtcccaaaggcaggagtgaggtggtcaaagtctctgtgaaggcacataaaatcatgtatgtgaaagtgtttggcaaactttgaaatcatgtacaattcttagttaatattatatattatcatgttatttttaatattaataacttatataacaactagtccttggagggtttgatgataccctcagtcagcattttcatcactagtgaaagtttctcctcataacaatcctgctcaagctctccaaggtctatggcaaaaaataaaaataaaaaataaaaagcattatgttgcttcaaggtcatcttacaatgactgcagttgtgtgggatgagtatgccatatgaggaagaatctccaggccgaagtggtacagtccagacacagcctttagagctaagaggccatttcttttagcctcaaaaatcactcaaatatacccctgcaaaaactttataatttctccctttgatggaatggcaagtaacattgagcttttttctttcttttctattgctaccttttaattttacctcctactctgatctggatctgcaagcaatgggttcctaaatgtcaactctggagataataaacacatagcagagactgatattttcccaccaattatttattctttcaatcctaaaaaatacagacacttaacagtgttctatttacaatgtgcgcatccaggcaaaaatttccggacaggctaaaaagcaagaaaatgcgatccacaatcaggagaaaaatgaatcaacagaaactgattcagaaacaaacaagatgcagatgctgctcacagaagtctagaacgccaaggtgaagcccccactgggttggacattttcttattccttatgtcatttaaagcacaactcccgagattttacgtgatataaccgctagaggcctctctgtcacaggctgtattactcccaggtccccatgttggctgtgttcagattttttgttatatttgtggaaatctgagtgcatgtgacgactgctatttatgggttttgtttttatttttaaagacagggtcttgttctgtcccccaggctggagtacagtggtgtgatcacagctcattgcagtctcgaactcctgggtccaagccatcctcccaactcagcctcaggacttacaggcgagtaccacctcaccaggcttgatttttgtgtttttaaacagactgaacatctttcagtacttcccatccccacccctcccggccctgactccgccaccccaaccccgccccactttgtactacccaagcacatcttgggaacatgatgcggaaagtcagggacgctggaggtgaaggactgatgacgcgctacggtggtcctaggtgcgcgtgccccctctctggagtagtcccgggggtcacgaggatttgaagacaggccctcccttcccactgcccccattcccccgaatgccaagcccctgtgggcaggcgccctgggcaggtgtggttggttgctaaagcctgctgggcccagacatgaaccctgccctagctgggcagcggcgcgggagcaaagttgttctgaggctgccctccccggggcctgctctcccagccctggaggagccggcgcgagacgcgcgggggcggggccgcgcgggggggcggggctcaccaaggctccaccccgccgcggccactgttcgcacacacctggtgctgatcaacgccgaggccgactcgtcgccacccagcgcgccgcaggccggggcggagaggcgcagggcgctgggcagtctccggcgagggcaaggagcggtgcccggctgggccggctatgtctcccgctactgcggttcccgccggcgcccgcgacctcgggggagcagccgggttcgggggcgccgcgctgtgaggccggggcctagagccagccgcggccgcgcaggaggggcccagggcccgcgctcgcccgcgtccccgccttcctcccgcgctcagccccgcctcggctcgctgcccttggctctcgtcgccatggcctccgtcgcccaggagagcgcgggctcgcagcgccggctaccgccgcgtcacggggcgctgcgcgggctgctactgctctgcctgtggctgccaagcggccgtgcggccttgccgcccgcggcgccgctgtccgaactgcacgcgcagctgtcgggcgtggagcagctgctggaggagttccgccggcaactgcagcaggagcggcctcaggaggagctggagctggagctgcgcgcgggcggcggcccccaggaggactgcccgggcccgggcagcggcggctacagcgcaatgcctgacgccatcatccgcaccaaggactccctggcggcgggtgccagcttcctgcgggcgccggcggccgtgcggggctggcggcaatgcgtggcggcctgctgctccgagccgcgctgctccgtggccgtggtggagctgccccggcgccccgcgcccccggcagccgtgctcggctgctacctcttcaactgcacggcgcgcggccgcaacgtctgcaagttcgcgctgcacagcggctacagcagctacagcctcagccgcgcgccggacggcgccgccctggccaccgcgcgcgcctcgccccggcagggtaagcgcgcgactgaggggccggccttggccagagcgctcgagacccgcagcgccctcgccaagttggaagcgaaacacactcgtgccaagttattttagccgcgggcacccagaagagtttctggcatgggtttctctgtcttagggaagaggaagcccagtagtttggcagaagcgggcgggcgggcgcggtgacgtgctactggaatttttctaggcttgaagagaaaggctgatctgagaggattcgtggaaatatgacttaaaaggggagaaatgctgagagaaaaaagtttgttttagtctcatgggttgtataaggcatggtttgtgttaagtaattgcaagagcaaaatctaattagatgccgggcttctcgtaacacccactcctttttcttgacgtggctctcctgactttgcctgcggtggctttcatcatacaaaaatgggaggaaaacttctggtcccttttataaaaagtgaaaagaggggacttg

SEQ ID NO: 11115 - DNA, 6000 bp, Homo sapiens
tctttgccagatgtcaggggccagccgccaggggaactgcgtggcagagcccctgtgccaatggccagagaaattcaggagttcccagaaaacagagggtgctggaaatccaggtgggagagctgctccttgtgccaagattttcctcagaggctccttctccggtgccctgagcagggccaagcctggcgaatattagaatttctgctgggctgagaaaaaacagcaaaaggagaagcagtctggggggtgacttggaggtggaaactgggtgcggtcagaaaagtgagtggagcctggaggccaatgagcaccccaccctggcaagtcacagcaggacagggcaggggaccaggcatagaattgggccagttgtaacctgcacaacctggaaaaggatttgtatttgtatttcatgtacccattgggtaaggtggcatttatctccagcttccttgaggtgagctcagtttaggaagtttcttttcgactgaactgtgtcaggaatctcgccaatgcctgatgctgcccaccacatctcttttgctgctgctgtggctggaacctgcctgggaggcaccggctgtgaaggctggagacccagggaggctgccctgacacctctccttgttccctgagccagggggcccatctgagccccttcacccctggggagctgttttctgtgccttgtatgaggtttttgtcttcacagaaatggcattctagtaagagatagaaattttaaatggatagatatgtaaattatatggtatgtgtgttgggcagaagaattccctctccaatcctcaggatggcagatccagtccctggaacctctgtgttggggtacatggaaagggcggtgaaagctgtggatggagctgaggtggctaatcagctgccctgggaaaaccagccatggaggggtagtgttctcatgtaaaccaggactcagcctggtggagctgcctttgaagatgaggaaatggggtcctgagccatggacgtgggcagttgagcagctggaaaaggcaaggaggagacaggttctccccgagagcctcccaaaggaacacagccctgacagcacagtgatgatagctccgtgagactattcagacttctgagctccagaatggtaaaagaatgaatgtatgttgttttaaggcactaaatttgcagtaatttgttgcaaccacaattaaaagttaataaggtttgtttgattgtttgtttatagggatagagtctcattctgttgcccaggctgcaaagcagtggcgtgatctcggctcactgcaacctccgcctcctggcttcaagtgattctcctgactcaataagctgagtagatgggattacaggcactggccaccacacccggctaattctcttatttttagtagagacagggtttcaacatgttggccaggctggtctcaaactcaacctcaggtgatccagcctccctgacctcccaaaatgctgggattacaggtgtaagccactgtgcgcggcttactaaggtatgttttaaagtggtcattgctttaggggaacaagttcaggtgaagaaggtccaggatggcctgggcaggcagaggtctcccattatgaaatagaggcctttacatttaacagtggttaagatgaaaaatcacgttacatgaatcataccacaattttaaaaaaagaaagaaagaaagaaatacaagggttccaaatgcgaggggcagggagaaccaggcgtggaagggtgtgccacctgggagcaggagtgggagtgagccgggcagatgcctgaagggcagtccatgctgaagggagggcaatgcaaagtcccaaggcacggggacatctgcagggctctgaagaccagcaaggaggccgagggtggaggtcggaactgagcgagtgagggggcataatggacagctggccagactgtgcagggctctctaggcatctgtagtgactttggttttactgagagaaaaagggcacttttggagaattggagcagaggggggcgtgagtgatgaggttctgaagatcactctggctgcgctgtagccatttgggaggtggggacaggcacggagaaccaagtagggcagcactgcaatcaccctggccaggaggacggtggcctagaaccagggtcgagtactagatgacagtgtggtcaaatcatagatattttatttctagtccaaagaagagataagaaagaggtcgagcaaataggtgattttttttttaaattattcacagccttataacataacctctaaatcttcagtaaagttggctacattcacaagtagctggtgtcactttggtgggggctttgtaaggaagtgggcagggtgtcttttaaggaagactcaggagaagtgctggtcttccagttgcagaggggaatggagttgcaagaagaaaacagcgaggttcagtgacacacagtgcgaacacgagctcagggggcaggagctccaggtctcaagagggcaggacgataatgcagtgtttgcacagaaaccaagcaatagagggagccagcacccaccagaaatgaggtagggccgctgtcacagctatgccaggacctgcagaagcctaaaccctgaaaaaaggtgggggcccccacctacatatcaaggaaaacatatgtatgccatcacatgctggtctccaacaactgctaaaattacattaaatcctttctagaatttcgtggctgggacttgagtctggtcttggtccttctactgatggtgaatccagtactgaattggatccaattctggacgagttaccctgtcctagaatcactcacacgtgacagttgacaggtggccccacccggtttgcatggtggacgggtgttctgctaggccggcctctccacacccagagagactgaactggtttctgctcctcagagagtttgcacagagactctgaggaagcagtcacctcaggcctctccatcctagagacggcagaaggacaaacatctcctgctggcacaaggtagggggtgggggatggctggtgttccaaacacccgtgcagagggaacgtgtgcatgtttgggagtgaaggaggaaagcaggggctcgagtggtgagagaaccaggggcagataatgaagtaaaagtggggttgggggagatgctgggggtgtggcggcggggacgctggataaggcagggaggacggggtggctctgcgggtcctctgcctccacaccaagcactcagggatccgtgcctccttccagtctggagtcccaatcgcccctctctccaatttgggggacagggatttctccttgttctcctgccctaactccttctttccgacttctcttgtcccattctccctcagatcctcccttccgcttatgccaaggcttccacagcctcgctctgccgggccttggcattcctagcctgagtgttgaaaccattggccgggacctcaaggcagctggggcagggagaggacggttagaagcccagggcacactgccacaaaaaggctgtgactcattttcagggattgaaaactgcagtccaattcattttaaaattttcgtctctctttggacttcaggctgaaagttctttatagcaacgggcttccagggactatgtgaaattattggtttcactttccttatcacccgcttcttacttcaattaaaattccatttcagccgggtgtggtggctcactcctgtaatcccaacactttgggaggctgaggggggaggattgtttgagcccaggagttcgagatcagcctgggcaacgtgatgagaccccatctccacaccaaaaatttaaaaattagctgggtgtggtggctcatgcctgtagtgccagctattctggaggctgaagtggaaggactgattgagcctgggagttcaaggctgcagtgagccgtgctcatgccactgcactccacctggatgacagagcaagacctggtctcaaaaaacaaaacaaacaaaaatctacttcatatgtaaccattacttcagttttgaaaccattgcctgaagctgacattttgcagttggaaaatggctattccttcccatcttcaggttggctcaggccaagctgagattcaggaccacagagggcaacaaaggtggaagggcccctttcccctttctgtatatttttcccagcctgtctgcagctctttctttttcttcagtgttaggttggcatcccagatgtcaggacccaagtataggcctggtgtgctccttcctgtgagtcatcagacttgtagaaaatattggccctgctaaggagctactcagtggtcatatcacacatatgcacgcacacacacacaagcacccatgcacacacacacacacacacacaaacacacacatacactctgttcttggcccacccccgctggtgtccccacagcagcagtattggcagggcggtagcagtgagttcctctctgtgtactctcagggcctggatgtgtacagaacaggctccactcaggacagatttgagaccccttctccagaccaagaggtggaagtgcaccctcaaaattgaggttctttaaccttagcagacagagaaccacataggggacatgtaaaaaatgtgcattcctcggctccttcaaacgcttgacccactgtcctctgagcagacaaccccttatcccccagccccagagatagagccctgccgatagtccatggttactttctttgaagtctgttccatctagttaagaaaggacagtggtaaagacccacttaccttaccaggcatcataagggccctagcatctgagtcacaggatgtcaccctctgggtctgacatgcacttgaattaactggcatactgcccggcacacagagggaacctagatgtggaacggatatgggtggtgttacaggccgcatgtttgcctgccttccaaattcatatgcagaaatcctaattctcaaggtgatgctatttaggaagtcataactcatgtgagtggagccatgtgggattaagaagtgataggagagcttgctgtctgtctctgctctccactgtgtgaggatacaacaggaagacagccatctggtgaggaagagagggccctcgccagataccggacctgctgacaccttgatcttggacttcccatcttccaggaaggtaagaaataaatgcttggtgtttcagccaccttgtctattctgttgtagcagcctgaactggctaaggtagcagggtctgatgatcaaatgggacagctgtaaaagtgaggtgggaagggggtctacagatactaagttttatgaggaaaacttgtgctttatttgaaaatgacacaaaattttgttctaagaaaaattttcagaattcaaaacttagagccctaagacttttcccaatgatagacttggctttccttgaggtcttggccccagtaggactgctggagtctattacaaaactcatctggaaggacctctgccgttgctgaggcttgaggaaatggttttaaggtcacagtgtaaacaaaactgctgggaagttggaactgggcggagcccactgcagctcagcaaggctgctatggccagactgccagatttctcctctctggtcagggcatgttggtaaacaaggcagcagccccaatcaggggcttatagcagacttaaatgtccccgcctgatggctctgaagagggcagcagacctcccagcacagcattcgagctctgctaagggtcagactgcctcctcaagtgggtgcctgacacccacgtatactgactgggagacacctcccagtaggggccgacagacacctcatacaggagagctctggctggcatctggcaggtgccccactgggtcaaagcttccagaggaaggaacaggcagcaatcttagctgctctgcagcctccgctggtgatacccaggtaaacagg

SEQ ID NO: 11116 - DNA, 6000 bp, Homo sapiens
aagcagagctcgtggaagattaatgagaactaactcattgtgagggaagagaaatcccagcactgctcagagggccccgcaggcagcccagccctggttttcatgttgagttgagatgatgatgtgttgttagccatagtccttgtgctgtcttcttgtttgtgaccgtaaaagttatcctggggcagagagaggtgggactgatacagaatgaccacttaacaattttcagtctgttgagccaactagagtgggcagagcagaaataatgccctggttggaagttaatagctttgcctgcccaattatttactggaaggaaatgcctgttcaatataccatttgatatattcaaagataccaaacaaaacaaacctactgctagggccagccactcagaaggcatcacatgctagtctcagtctgttcatctaaaccactgtaaataagtcaggacaaatgatgtacatggttttggggttttgttttatgtatgtatttatttattttttattttttattttttgagatggagttttgctcttgttgcccaggctggagtgcaatggcgtgatctgggctcactgcaacctctgcctcctaggttcaagtgattctcctgcctcatcctccctcgtagctgggattacaggcatgcaccaccccacctggctaattttgtatttttagtagagacagggtttctccatgatggtcaggctggtctcgaactcccaacctcaggtgatctgccctccttggcctcccaaaatgctgggattaccggcatgaaccactgcacccggcctcatttatttatttttggatactgctgttttgaactataaatcatgctgccactcccatctgcagactgctttggctacatcatgttgaaagatttcttgagtttgttttgcattggcacttatcagagctccttattgtaggatcaaggcttgaggcaaagagaagggaaaaaaccgactgaacctgcaatagaagacctttgcctctcttttctcactccaactttccccttctgttctccacaagacctgccaaggacaaattttacagaaaagggtgtggttctagtaagaatgaagagacatgaaggcatcaaaatgggttattggattgttcccttcatacagtcacatttctagagtgtgtgtgaatatacataataaaatagtaatatatatatatacacacacttatatgtatatataaatatatttatgtgtatatatgtatatatcatatgtattatatgtatatatttaaaaatacacatgtaatatatattttaaatatgcatacaaaaatatatctcttaaagtacatataaaaaacatttataaatgcatatatgatatattcatatatgtatgtgtataaaatattttatataaaatatatttttatataatatataaaatttattatatatataattatatatatttaaatatataaaatatatataatatatactatatattaaatatataaatatatataatattactatatatttaatatatagtaatattaaatataatatatactatataatatatagtaatattaaatataatatatactataatttaatatttattatatactataataaatagtataatatttattatatactataatttaatatttattatataatatatataataaatataatatatactataatatatactataatatataatataatacatcatatattatattatacatcatatattatatatcatgtataatatatatcatatatatttaaatatatataaactatatataaaatatttatatatttatataaatatatatattttttttcccatgggctaaaggggaggcagtgatggggaagaaaagagtggaatttaacctccgggaataaagcatttgaaaaccttaaggtaaatgctttttttttccattactaagaacagaaatcaaaatatcagttcattatgagggtcagaagtgttggatattttccaaaagagaaacaacaacaacaacaatcatagctaatgcttatggaacatctaccaggtgcccggattcttgccaaaccctcaacaagaggtatctcatttagtcttgacaaccatttgaaataagagccactgttctttatcttttcacagtgggaggacctggttgtgtaaagaggttaagtaactttacccaggcactgtgagcagctgggatttagccaaacagactggcttcagcacctggaccagggagctgtggaattaaggctctggtttctatccagctgaatgacattggggagaatatttttaaaggcctcaatgtgctcatctgtaaaaataacggggttgtgatgggtgatctcaaagatccccgccaactctctagcagctcaccaaattaatatccaaatcaatatccatcgcatccacggcactgttgccattcattcctacagttcactgtaggaagttaaggggtggagtggagcagagagggggcagggaaatggctgcattgtgaatcaaatgttttcctaacaggagcagctgttccaactggcacaagccccggcaggtacgattgctaggtgactacaggagtgagatgggagcagggcccactcttaacatgcctcgtgtggctgccacagttgatcctttagttgaccagttaatttctcccttggaagtgtccttaccgtccgcatcaatccccagtgcacttcacattggctgcgagatcgcttgcagcactgcaagcaggtgaactctgagaaccctctgtaatgcgaccagacctgtgcttttcctggttcccctgaattacactggctgatacttccaggaattctgcagcagccctggtggttttgttctttcttcagaaaaggaagttggagagggggttgggtgggaaggagaatgagaatcctttaagttctttgaaatgacctcaaatctgaggttgtcaggcttttaaagagagccagtaggtagtcactccacatattgtagataatactgtgtcaacagctcaagttatctgaagctctctttgtgaaatgggacccaacttttgctctctgggaacactatcacatttctctctggcatgcaaacttaggtgtgtttgatgaagggagcctgcctctccactcctgtgggtatttcttgcaaggtggagatgagagactgagaaaagaaataagacacagagacaaagtacagaggaagaaaagtgggccctgggggaccggcgcttagtaagtgaggaccaacaccggtgctcacttactctgagtctctgagttctctcagtatttattgatcactatttttcctatcttggcgaggggaatgtggtggggctatagggtgaaggtggggagagggtcagcagaaaaacatgtgagtaaaggaatctgtgtcataaataagtttaaggaaaagtgctgggcctaaatgtacacgtaggctagatttatatttaactttacataaacatctcagtgcagtaaagagtagtattgctgccatgatgtctcacctgtatccataaggcgattttctcttagagtagaatgtatggttggttttacatttgtcattccattcccagggacgtgcgggagacagacgccttcctcttatctcaaccgcattgaggccttcttctttcactaatcctcctcagcacagaccctttacggatgtcgggctggggggctgtaaggtctttcccttcccacgaggccgtatctcaggttgtctcagtggggggaaacctggacaatacccaggctttcttgggcaggggttcctgcggccttccgcagtgcattgtgtctctagttaatagagaatggagaatggcgatgacttttacaaagcatactgcctgcaaacacatttttaccaaggcacatcctgcacagccctagatccattaaaccttgattcaatacagcacatgtttttgtgagcacaaggttgggacaaaagttacagattaacagcatctcaaagcagaacaaaatggagtttcttatgtcttctgttttctacatagacacagtaacaatctgatctctctttcttttccccacatttacttcatcatatgatatcaacactgactctttcatgtaaaatgtcagtcctaggttccttccacccttgtgtcctgcctgtgcccccaagggtgtaattctttgttccctcttcccatagtcagtgtgtgtgtgtgtgtgtgtgtgtgtgtgtgtgtgtgtgtgtgtgtgcgcgctatattctgacacatcattagaatctaaattaatctaccttgttatatttttctgccactgataatcttctacttagtcatgttacaaatgtattttttaaagtaagtgtttgaagagacagggtctcactgtcgcccaggctggagtgcagtgctgccatcatagctcactgcagccttgatctccttggctcaagcaatcctcccgcctcaacctcctgagtagctgagactacacgtgcgtgccaccatgcctggcacacattcatttttcattatctgtgtctgtatgtgcccagaggtacagataacactaaaatgaaaagaggtggcagagaacaggaagagaaagaaaccagaggagccgatatccttaaatgctgtggctcctaaggactgccagcaggttgtggggctagccagaaaaaacagagcctctgattctagaaggcttggagaaagcgtgagaagggagatcagatcagaatagattgatggaagggaaaggcggtgagggtgaagcaagagaaactcggctccagtgaaaaggacccatcattgcattccagaacgtaatttgcatttcatatgtaaatgaggaggcttcctagaggctggactgggctgggcttagctgagcctttgcaaacagcagggattcaaccctggggaactgcagaccaaagtgagagagggacgcaccgcatctccaggcacatccaaaaaggatggacgagacaccgaagcagaggatacaggaggattaaaggattcaggaaagcaagcagccctccggagaagctgtcgaaattcaagactggcaagagaagcaaattcaacctctcacaccgatcatttctcattccctgaaaagaagagattgtttccccagggaagtgaaaataatgaacttttggaggtactgcttttttgctttcactctgctcagcgtggtcatttttgtgagattttacagtagccaattgagcccgccaaaaagttatgagaagctgaacagttccagtgaaaggtattttaggaaaactgcctgtaatcacgccttagagaaaatgccagtctttttgtgggaaaatatattaccatcacctttgcgaagtgtcccttgcaaggattacctgacccagaatcactacatcacaagtcccctgtcggaagaagaggctgcattccctttggcctatgtcatggtcatccataaggactttgacacctttgaaaggctctttagggctatctatatgccccaaaatgtctactgtgttcacgtggatgagaaagccccagctgagtataaggaatctgtgaggcagttactgagttgcttccaaaatgctttcattgcttcaaagacagagtctgtggtttatgcaggcatttccagactccaggctgacctgaactgtctgaaagaccttgtcgcctctgaggttccctggaagtacgtcatcaacacctgtggacaagacttccccctgaaaaccaaccgggagatagttcagcatctgaaaggatttaaagggaaaaatatcaccccaggggtgctgcctcctgaccatgcaattaagcgaactaaatatgtccaccaagagcatacagataaaggtggcttttttgtgaaaaatactaatattttgaaaacttcacctccacatcagc

SEQ ID NO: 11117 - DNA, 6000 bp, Homo sapiens
attgtggtccaaaaatatacttgtaaattgcaatgtagttttctgcagaagcagcttactagaaagtatagtagtcatagagaaatattacaggagacagacatcttgtggtattggacatgttagagacctacagaaatgcataaagttaaatggttaacttttgagtattctatgcaattctttcaacttgaaaaatttaaaacatgaaataatatggtgggaaaagtttatctttaaaattggtatagttgagccagtaatttttaaatcatccttctttccttagataatttgcatttggggagcaggtggagctaccccagggaagttcctgctggggcttcgagttgtgacatgtgatacatcagtgcttattgcaccaagtcgggttttagtgattccttcctcaaatgttagcattacaacgtaagtccttttcttagcttaatctactacatacttaatgaaaataatgtgttttagaatattggggtttttttcttcatagtagataggcttatatttattaagttaaaacaaagtttgaatatttatttcagttgtgttacatgattgtagacctcttttacagtacacattttcaagatgatttttttttttttttttttgtgagacggagtctcactctgttgcccaggctggagtgcagtggcacagtctcggctcactgcaggctccgcctcccaggttcacgccattctcctgcctcagcctcccgagtaggtgggactacaggtgcccgccaccacgcccggctaattttttgtatttttagtagggacggggtttcaccgtgttaaccaggatggtcttgatctcctgacctcatgatccacccgcctccgcctctcaaagtgttgggattacagacgtgagccaccatgccctgcctcaagatgatcattttatgaattataagtcacaatacgagaggatgatttgggtgttgatggtgtattagtgctccacaatcagctttattattctttggacctgtggatgttaggtcaggtactagtctgccttgagtctccatttggccatgcctgtcattattccatcttgaataggcagcagagttttgacagctatgcattcgtgcatccttctcctgctgttaggtgagagcttgtaatactgccagtattcaaggttagctgttggcatctagcgctgggggaaggtacaaccagtgataatggaaactgtggaggtcagtggctggtagtcagttgagccaaacaaggtattggctgcaatttttgccagaatgattcagagctggattgttacatcaagaaatataaacaagtgattctagaaaccttggttttgccatcttcaaatttttcttaaaatttggtagttatagccgggcacagtggctcacgcctgtaatcccagcactttgtgaggctgaggtgggcagatcacgaggtcaggagatcgagaccatcctggctaacatggtgaaaccccgtctctactaaaaatacaaaaaattagccgggcgtggtggcgggccctgtagtcccagctactcaggaggctgaggcaggagaatggcatgaacccgggaggcagagcttgcagtgagctgagattgcaccactgcactccaacctgggcgacagagcaagactccatctcaaaaaaaaaaaaaaacaaaacaaaactggtagttataaacctacctacttcttttaataagagtcagtaatggctaatgtttattgagtactttttatatacctgcactgttaataacactgcatatgtattaatttaatgctaacaacctcataagatagagactattgatctatatctatagtatcataagatactataggtagtctctatctatatactataggtagtatctatatactataggtagtatctatatactatctatagtatcataagatagatactattgttccctttttgcagatgtggaatacaactagtaattggtagacgatggatctgaatttaactagtctggattcagaacccacactcctagccactgtacttttctgcagcccttcagtgcactaaaaggcagaaatctaacataagtaggataattctccatcctgagtgattgttgaaagcttttaaaagctttgcttaatcactggatcccacaaaggaaaatgctgattaaagaacacacagtactttaaaatgcatgttttttctataaggtagacaaatgggactacagtaagcatactcagaaagtactcagaattaatgttcatttcttctgagaaaatactagaaagctctgtaaaccattaattcaatattctgagacatgtttattactgctttttatgttgttgaagtcttattagaaatagcccaggtggtttgatcatgatacagtgctacttgaaaatatatcaaaggtaaaaattctctcaactataccttgaatgtctttttccctgtagacttctgtagagaagtacaattgtgttttaaatgtctattttgaacttgatgggataccattaatctatatgtggtttgatgtgtaacttacctgatatttttgttttaactttttaggtccactatccgagctttgatcaagaatttttcaattgcttcttttttccctgctttcatcacactgctgttttttcagcataatcgaacagcttatgacattgtagcaggaaccattgtggtaaaaagaaatggggtcagatgatgccccccaaaaccctgatttccacacactaagactaaattatgtatcaaggccatcagtatccctgggttacactaattgatgatttagaaattaaagcagtcactccagtgtgatgcaggtgactactctgaaagtattgattatacttgaatgccaaagaacttgtccagaagaaaaacctgttaaattcaagtattaaaatttttagatcaaaaaggcaaatgattttataaacaatggacaatatatactttcttaagatctaaggtactttcttaagatctaagaatttgctgaaagcattttcagctttgaaatctccaaatgaaactttaaaatttattttggtttatcccaaaataatggaaaatgtccagttgtgttttgtaaacacctatgtaactcatcttttagtttacacttcctggggaaattgtctttggtgtttagaggagggaatgagaacacaaattggataatccactgtctcccatcccaggaggtggtgagttggctacaagagaaagggacaagtgaggcaggcctagcagttcccttacctgaagttttcaaatccatactgcagttccctctcgtaatgatgtaactttacaactattcttaatgcttgaacatgtatttaggggcaagtttctcatgatgatgaaaaagtatcaagtcatattgctatgttaattggtttttttttttaaaaggtaagttagtgattactgttaatggtgggggagtaagttttcactgtaaattgaacttataatttatgtgcaagtgttttcagtgccctgaatcaaactataaatgtggggagaaatcacctccatcaaacagttgcatatttactgtaaaagtattcccagtatgtgtgcagcatgaagaaagtattagtgcttctcagtgttctcagtgtaaattctatttatatacagcatattcacatactactttccttatattttatatagttctatgactgttgaaacatcaaggagttaaaaaaatcttaatatttcatgattaactctaagtactattaattaatagcttgcgaaatattagcaattttcccattatggactattctctctaaagcaagagagactagcattcccagacatcattctagggtctttaagctcattttgggtctgctaaagtttggggggaaatgttacgcaaagtgatactgtgtatgttgccattttgctttattcttctgttgaagcaaaattgtggggttttattatgtgtgtgtgcttttcctagatgtcccagttagctgtgctgagatatacctgtactatttatggtttaagttttgattcttaggtattttctccagctctgacattgttttccaaagacacactaaactgcattgcacagttcaaaatttgattacttaagggatcaatctaggtggtgttcttggtcttaaatttaacagcaaacacagcacatatctattatcactatattaattttcaaaggtttttctttgacgtttaaaactgtgacaacagatattcacatttgattatagaaacttaatgtctattaataattttagtacaaaatttcataaaccgtgtttttcaaaataagtttatgtcaaatccagcttcccagaaacactaataattaagtacatcaatgtactaaataaatcattcagttgcacccatggggaagattgtgttactgcccttcacagtgaaaaaaagaaaaatctttcatttttaaaattaggagatgttacgtaacttggcactttagtagtgtatacactagcattagtttatacaccacttttgccgctggggaattcaagttgaaatgtccctcaatcatataggtctggaatacatctttcattcataatttctgctcagataattgaatagtttgccatcgagattattttcatttatactataaaacaaaagcaaactagtccagtttaattttttgtacttagaatattgcacattttctatatatgagttattcagattagtatctatgtaggttcagtcagatccaaccatggattcgaggtattatactgtataaccctacaaaatacatagaagtattatttgccttcataatagaacccaagagtctgtttcaatttatgaattcagtatttgcaccgagattttgattcccaaagtttggaaaaaaatgacaaaacaacgagggaagaaggaaccagaccttagtgccacatatttttctcttggggttgtaaggtagtctcctgctttccagaacactttattatatttcacttatagacctgattttctgtgtcaaagtataattctcatgctgaagctgtagcctaaaaagccaaaagaaagttgtcttcattgtacaaacatattcatcactttaacaataagggaacaaaatttagtattcaagctgagtgagaatactgtttcaatgagcatgtccctaagataaaccagaattggcagttaatttaggcgtctagaaaatctcagttcccaccagtaaaattatcctgagtagctaatgcaccttgagaaaaatctggcatactgaataaataacattaacttgggagccaagagctgggtaagccttacctttagactactctgtgactacagaaataaagccagcacttttggaactaataagccttcacttgtcagtatcataaagagtattgcccaactgaactttgctcccactggtttaatagttacttatttctgcctaagcactcaccttccgattttacccaagtatatatataggatagaaaaaaatgcattatatttgagagctacttcgcccaaattacaaaatgagtgtttttagattcaagtgacagtaaaaggatttgttcccttcagtgacttgagtgttttagttatgcataagtatttctagcaaaggaagggtagaaaggaattgaaaattaatttacactagttgctacttgggaataaagggctttttgaggggggtatggatattaaatgttttcgttatatacttatccctattaaaacaggcagttgtttctttgaatatgcctaaataacagtattcttaaaatctgacagacaagtaacatgtcaattacttgatattccttgtctccagtaccacaggccactcttgacatcccatgtttgcctggataaagttcctcatttcaaacagtatacatacttctttgcagt

SEQ ID NO: 11118 - DNA, 6000 bp, Homo sapiens
ttctctcagatctttgatgattatgttgcttctggctgctgtggctgacaggggatagtcagttacattttaaccagttgcttcttagaggatctgtgtttctcctgtggcaaattttaagatatctgtttctctttaacatcttctgttccagtgcagtatgagtaaatgtggatctctttttattcacagtgctatgatactgttaggtatgagttctaaatttctcttaaaataattaacatgtcagtatgttcaattctttgccctctacttttaaacttaacttcctcataaagcaaccttttttgatcacctgttccaccctgactcatcctgattacttgctccagcctgactcattctggttacctgctccaccctgactcattccagtcacctgctccaccctgactcattctgattacctgctccaccctgattcatcctgattacttgccccagcctgactcattccagttacctgcaccaccctgactcattctgatcacctgtttcactctctttaaattagccaatctgaattagtttagcctgtgcggtctaaccctagccaataggggaataacacagcagcaggggccacgtgcatcagggataagaaccccttccccttccttgtccaggggtgtgctcaccattgctccatctgtgagggcacacccttgtatagaagtaattgccttgctgagaagaaaaaaagaaaattttatatttgagtgctatttctttgtggcatcaagactttatttacaataatacatttccttaatattttaagataacctctttctggaatgcctctttccatttactcacttctcttcttctaggaatttaattagagaagaattaaattaaacctcattcaaccaccatatacactgtggaatccaaaataatggcctcacacatatgtccaagccctaagacgcagaccatttagatatgttactttacacagcaaaagggactttgctgatatgattaagagcatggacctttagatgtggagattattttgtattatttgagtggccccaatctgattgcatgatttctttaacctggagatgactggagaaatatgggtcagatggagtgctgaatttcatctagaataatttcttaatctagtaaaataacatcatctctgttttttattctttaattaagtggcaaaatgcattaaaaggtttaaagtttaaatatccttgcattcttgggctatataccttggtcaagacagtctgtttataacacattggttaatacagtctactaatatttttcttagaattttcacatctaattaattaaaagtgattttcctataataggtaaatagtagaagggggtaagtctcttattttacaaattattcaaataatacatgaaaagaaatggaagactgagactacaactctttgccatccgtaatgaatgaacagatctagccactgaacagcaatgacaattttcatcaccaaagggaaataaccagtattaaactcttccccttgttgaaaaacatgatatagtaccaccaaaactcacggggaaaaaaatctgaatagatgcaaacctctataccaaactacaaatttctagaaaatgcaggtaatagagatgcatattaaaccatagtttggggtgcaatccacaaaatacaaacaacaggaaactctaccagacaatattaatttcaaagggataacctatagaacaaataagaacaaaaaacttatttttaaaggtaaaactaaactatcatttgggatgatgaaaatataaaatagaacaaagaagtgaggaccacaaaagtcaggatgtgattgatttttatttgaaaaaataaaaatttactattgaactgggtcaattgatggggcttctaggtcagctgacaaacttctctctctttctgatggttaaagagtgtttactgttgattaaaggtcaccattttaagattttttttcttttatgtcacctgtgttttatgacaaaaaggcgaacgcagaataaaatgagttatggggcacggttcctgttctgcacaaagcctcctccccatcctcctctctggacactgagcacccagaacaaccggcagccccaggacccctggcagggctgtctcattactgagtgtgcatccagctccacggttcctgttctgcacaaagcctcctccccatcctcctctctggacactgagcacccagaacaaccggcagccccaggacccctggcagggctgtctcattactgagtgtgcatccagctccacggttcctgttctgcacaaagcctcctccccatcctcctctctggacactgagcacccagaacaaccggcagccccaggacccctggcagggctgtctcattactgagtgtgcatccagctccacggttcctgttctgcacaaagcctcctccccatcctcctctctggacactgagcacccagaacaaccggcagccccaggacccctggcagggctgtctcattactgagtgtgcatccagctccacggttcctgttctgcacaaagcctcctccccatcctcctctctggacactgagcacccagaacaaccggcagccccaggacccctggcaaggctgtctcattactgagtgtgcattcagctccacgtcgctggagacaatgtccacagtttattttttgagtcctggatgaacctgacaggacatagctgaggggaagcctggcccagtctgcaggctttggccatcagtgcagagggaggaggtcctcatctctccactggagcagttacaaccagagcctcctctctgcgtgggagtgaggctcggtccttcccctgaacacggtgacagggatctctccacaggtagagatgacaccattcctcctgtaacatggtccaatctcacgcttgttctgctttacaagaaagttgacccacgctggtgtcccctgaagaaatcacaggcacagaggagggacaggtggatttcagggctgtgcttgatctgggaaaggaagagtgcagaccgccaggtggcgccgctgcactgcttctgcgcccaggaggtgcctgctggggctgagattgaaggtggggagaaggatgtcacagctcatcgcacaggttcccggtaaaaatcctcctgcccagcctagcgggctctcccttaatcaactgtagcgaaaactgtctccttctcacgttcctggaaggtgctttttgacacaagaaagaggatgtgattgctagggtcatcatgtcattgtttattgtgttgccagtaaagtgaaatcaaaatacacaataaataataaaataacccatgataagccaatgtttataatgtactaacaccactgagccagtgtttataatgtactgacacactccaagtgtgggcacagctgcagacatgccttgtctcttgggtcaggacacagggtagagtgaaatggaaagaaatcccagtcactgcagaaaagggcccccatggaagaggcctggcagggaggccagctgtcccagggccgccatatttagggatgactccccctttctgggcagcactggtttttttaattatttttgcattcacagtagttctgaaattgcaggatgctgagacccagcactggtcagttacaccgtctcttcttcaccattaaatactgtgccaaacagcaccttcatacatttccatcctcttccaggagagaatcaaaacaacaatggacacattgatgcatgcaaaaatactttaaatatgtgctatcagaagtagctactaaaacattaattccactgaaatgagggaggctgtaaaaaagaaaaacattgcatacccgtattcacagcaacattactcaccatagccaagacaaggaagcaaacaaagcacccatcaacacatgaatagatgaagaacatgtggtctatgtaggcaatggaatatgattcaaccttaaaaagaaggaaattctgttacatgctgcaacatggatgaacctggagaacaatgctaagtgtaataagccaatcacaaggaaattccaatactgcgcaattcgttatatgcggcgtctaaactcttagaacctgaaagtagaatggcggctgccagtggttaggctggggggattcttgaggagattttcagcgtagagtttcagttttgcaagatgaaaagttctagagatctgttgcataacaatgtgctacagttcatattatagtactctatacttaaaaattgttacgataccaaattttatataatatggattttggcgcaatgaaaaaaataattagctctgataccaacttaggaaaagagcacatgaatttattgaaaatatattagcatgtgcttactatgaaaaagagatgcagaaaactgtgagacaaaaagagagatccttgctaccccagctattatccatgaaccagcagaaccagcatctcatgaaactggacagaaaggctcacaggcccagccttgacaggttgatcagtctgcatttgtcaggaccccaggtggctccactgcatgtaaagcaccgccccagatggtggtggagggagatcctaggaaggtgactctgtcccacaggtagaagcctccagtccagatgggagcagccagaagggcccaagagggacatttccaagaaagtaaaattaatagaaagttcaaagtctctaatttcttaacagagtcacagaaatggaacagatatcaaagttaaattaatgagagttatctagaacataaacaaaaacaaaggcaagtattaacttgaggaagaacaaatactacgaagcaagtgaaaagtagtcaagttgacatatgagaagatgagtcacggaaaaaaacaaggagtggctgaattaaacataattactatataaatatactgggaaaaggaaagaacgggaagagtgaaagagaacaagtgatggatgtggtgacgtcgcgttctcccgggcggggccggaggcggtacagatgagggacacattcatggctaacgggacggctcttctcgttctgcgttccgcttgcggtcggtagtctctcctccccgcccatgggcggtggttggaggcaggggtgcggaatccggccgacctcgctgtcctcgccctctaccttgtggcgtcggtggggttggggagatgagttctccgacgcagcaggcacccctgctcatctcctatggctgttgccttttgggcagcccctcttcgcggcggtggggctgtcccgccggcctgtcacgttgcccttccctgggcttgtgaggattggctccgcttggacctttgcggtgctcccggagccctccaggttgtccctccggtgccggaggccaagcggtggtgtccttcctgttcccagcgccccctcctcctgtcgctgctgcagtgcctgtgtgtgggtcctgaggggttttggggaggtagaatatttttatttatttaaataaattaaaaaataagaaaaaaatacaaaaagaaagagaacaagtaatcttaactattgattccaccatcgtgcagtgcaatagtcaatggctgcaactgaaaaatcaagcaatgttaataaagaaatggtgctttggtgcttagatatgtgaaagtaaagtcaaaagaatcagctgaaacttgaaagtggttgctccctagaaaggcagaaatagagaagagaggactctccctagaaaggcagagaagactctcatttttctcagaaagtcctgcacaaatatttactctttccattatgtgcaattgtaacttcgaataaaataaaaacaaaagcttcagttaacatgcaagtttatgcctaatgacaactttgtttaacaatgataaagggctaaccaaaatataaaaacacttaaacataaaacagcatgtataaatgtgtatgtgacatcaaccctgaatacaaac

SEQ ID NO: 11119 - DNA, 6000 bp, Homo sapiens
agaaatgcaaatcaaaaccacaataagataccatctcatgccagtcagaatggcaattattaaaaagttaagaaacaacagattctggcgaggttgtaaagaaataggaatgtttttacactgttggtggaaatgtaaattggttcaaccaatgaggaaggcagtgtggtgattcctcaaagatttagaaccagaaataccatttgacccagcaatcccattgcagggtatatacccaaaggaatataaatcattctattataaagatatgtgcatgtgtttgttcattgcagcacaattcacaacagcaaagacatggaatcaacccaaatgcccaccaatgagggactagataaagaaaatatgatacatatatgccatggaatattatgcagccataaaaaggaatgagatcaaatcctttgcagggatatggatgaagctggaagccattatcctcagcaaactaacacaggaacagaaaaccaaacaccacatgttctcacttataattgtgagctgaacaatgagaacacatggacacagggagaggaacaacacacactgcggcctgttgggggagggcggtggtggggggagcattaggaaaaatggctaatgcatgcaggggttaatacctaggttatgggttgattggtgcagcaaactgccgtggaacccgtttacctgtgtaacaaacctgcacatcctgcatatgtaccctggaacttaacattaaactaaattaaattaaaggacaagattaaaatgttaaggaaaaataattagattaaaagcctttaacttaaaaatcctgaaataatagtttgaattttgcttttaacatatatgcaaatcctttaatactgctcccttccagaggtgcagctgaattccctctcttgagtgtggcttggacttaatgatgcacttctgatatggcctggttctgtgttcccacccaaatcacatcttcaattgtcatgcgaattgtaatccccagtattgaaggagggacctcatgggaggtgattggatcatgctgttctaatgatagtgagtgaattctcatgagatctgatggttttataaggggcttttccccgcttcgctctgcatttctctctcctgccaccatgtgaagaaggacgggttttcttccacttctgccatgattgtaagtttcctggggtggcctcctcagccatgcagaactgggagtcagttaaacctctttcctttataaattacccagtctcaggtatttctttatagcagtgtgagaacagactaatacaacttctgatggagcaatgccgacataacagcttgtgactctgggtgtagaacctaaaactccctgcagcttccaccttctctctctctgtctctgggatcatgagctctggggaaagtcagctgctgtgccatgagcagccctgcagcaaggtccatctggctaagaactgaggccttctgggacccaattacaatgaactaggccttttccaacagccatgtgactgatccatgtttcatgtgaatcctcagccccagtgaagccctcagatgatgcaggcctagactgacaactggactgcaaccttgtgagaggcccttagcaagaagcactcagggaaacttctcctggattcctgacaactggaaactgtgggagatgatcaatatttgttattttgaaatggtacattttacataatttgttatgcaatagtaaataactaatacattttcacaagagaggatgtattattacatgttaatttgcatttgctctaaatttatcatcatcattattattatttttgagacagggtctcactctgtcacccaggctggagtgcagtggcatgatcaccatgcactgcagtgtagacctcctgggctcaagggaccctctgacctcagcctcttgagtagctgggagtacaatcatgaaccactgtgcctggctaattttctaattttttgtagagatgggggtttccccatgttgcccaggctgatcttgaacttctggagtcaacaaatctgccttcctctgccttccacaatgctaggattgcaggtgtgagccaccaaatctggcctaaattaattaaaagatataaatatgtaacttagttttaaaaggtaaggagaattttcatggctgaaaaggatgtattttattaccgttcacaatgattactttacttgaacttcaatttgcaactgtgtcccaagtgaacacaaaaagaagatccagcccttgctaggctgattctatgatggcctcaacaacaagctcctggtcattcaccttccccccattattcaaccaactctaatataggtgctgctgtgaatggatttagcagatataattaagggcctcaattagttgactttaggctgggtttatgctgcttggactgtcctaatcaggtgagtccttgaaaggattgggttcttcctgagcatagagattcacagtgtgagagggattcagcatgaggggtttcctccactgtgggctttgaaaatgaaggggctgtacagggaagaacactggtgggcatcaggaattgagcgcagccctccctgttctctacattgacagccagcaaggaacagggacctcagtcttagaactgcaagaaactgcattctgccacctctgtataagcctgaaggaggattcaaaatgaaaacacagctttgggaagcccggaacagagattccatccacatcatgcccagatttctgactaaggtactataaacagataaatgggtgttgtttggccaggcgtggtaatgcacacctgcaatcctaacatctgaggagctgacacaggaggatcacttgcatccaggaatttgagaccagccaagatcaaacagtgagacactcatctctacaatttctttttaattagctgggcgtggtggcacttgtctgcagtcctatctattctgaagactgaggcaggaagatcccttgagcccaggagtttgaggctgcagtgagccatgatcatgtgactgcacttcaccctggatgacagagggagactctgtctctaaaaacaaataaatcaacaataattgggtgttgtttaaagtcaatgtttgtgataatttgttatgcaatcttataaaattcatacacaggctcaacagactcggaatgaattgatatgcacactagttacataaaataaaatatttcttaatttttcagtgttttacattttataactttctgtgatgcaatttaatacattcatatttcattcattcagtcaacaaaaatttagtgcctaagatgaaccaggtatgccctcatatgctcacgtgcctgacattctagaagcttcacaagaccgaggtggagccactggagtgttttaggtgaggaaatgacacactctgactcacaggagcaggaccactgtggagagaacagtcacgtagcaggtaatgggacaatgctagagccacaatttagaagtgacagggtggtggggactaaggggagaggagggcctgagggatgaaagggacagagggaagggctggagaagcaggaggttaggaaaaggagcagagggaaggaattggaaagcagtagaattcttaggtttaaacacattgttttatagatttttattacatccatctacagagcctcgctcagtgttctttgcagttggcctttaatacctaatgtaggactgcctaaaaactaatgttttttatgttaataaggtttaaaaaacacttagtgttccttctttgcagttggcctttaatactatatttgggactgcctagaaactaattttttttaattaatcaggttttaaaaatactaagtgttcctataagatatacacaccacttagacgtgaatacttcctaaaaacaggcagcacatgagcactgctgaggggcattgtgactgcattgaacacttgcaactgtgaggtgaataaagtctgtactggctcccggttgcaacatatagtaacgcagtgtgctactttatattgaggagatgtcttggactcacccagtaactcagggctgtggaatgaaggtaaatgtaaaaaacaagcgggagtcacagatacattgtctgcgaaagtcaaacttagtagctttgtgagtcctgttgtaatgctttcagacacatttatgtatcaaggggccaaagttacatttttttaccgattagatacctgatcatttaggggttgccaagattctgctacccactgtagttaataaacaaagagaaaacttgtctctatgctgtctcatgtactcaggcacaacttttccggatttaaagaaaaaaaaaacaaaaacctgtctctacgcctccattcccagggcgagctccctctctggcatcgagctccctctctggcggcgagctccctctctggcggcgagctccctctctgtcaccaagctccctggggtgagtttttttctagaagagttcagggaaataggtaaggagtgggaggcagggagtccagttctgggacggggattccgggatgaaaaatgaagagggacggggcccatgacgagggtttctccctggtttctcagacagctcttgggccaagactcagggagacattgagacagagcgcttggcacaggaggagcggggtcagggcgaagtcctatggccccaggcgtggctctcagggtttcaggccccgaaggcgatgtattgattggggaggcccagggttggggattccccatctccgcagtttctcttctccctctcccaacttatgtagggtccttcttcctggacactcaggatgtggactcagttctcacccccatttggtgtcgggtttctagcgaagccaatcggcgtcgctggggtccctgttccagaagtccccgcgaacccattgggactcagattctccccagacgccgaggatggggtcatggcgtcccgaaccctcctcctgctgctcttgggggccctggccctgaccgagacctgggcgggtgagtgcgggatccggagggaaatggcctctgcggggaggaggtaggggcccgcgcactggggcgcaggacccggggagcagcgcaaggaggagggtcggacgggtctcagcccctcctcgcccccaggtacccactccataaggtatttcagcaccgccgtgtcccggccgggtcgcggggagccccggtacatcgcagtgggctacgtggacgacacgcagttcgtgcggttcgacagcgacgcggcgactccgaggatgtagccgcagtcgccgtggttggagcaggagggaccggagtattgggaccggagcacacggaacatcaggcccgcgcacagactgacaagagtgaacctgcccatgccgcgccgctactaccaccagagctaggccggtgaatgaccccggcctggggcgaaggtcacgacccctcctcatcccccacggacgtcccgggtcccccccgcgagtctccggctccaagatccaccccgaggctgcgggacccgccagatcctcgacccgggagaggcccaggcgcctttaccaggtttcattttccgtttaggccaaaatccccgcgggttggtcggggcgggggcggggctcggtgggcggggctgaccgcgggggcggggccagggtctaacaccctccagataatgtatggctgcgacttggggctggaagggcgcctcctccgcgggtatgaacagcacgccaacgatggcaaggattacatagcccggaactaggacctgcgctcctggaccgcggcggacatggcggctcagatcaccaagcgcaagtgggaggcagaagaatttgcagagcagatcagggcctacctggagggcacgtgcgtggagaggctcgcagacacctggagaacgggaaggagacgctgcagctcacgggtaccagggaacacaagacgcctccc

SEQ ID NO: 11120 - DNA, 6000 bp, Homo sapiens
caaagcaaactcttaataacaactgttgtggaatgacttgggaggtggcactcagagatcccaagtgacacatgagaagtccacagagagagatcatgtttagtggagtttggatggttgcttttatcagtgggcctgtaccttacagatgctatctcattatcttctaaacagactctgggccagtgaccattatctccctcttactgatgtagactcagccaagagaagccagatgttgagtcggaaccttaactctccctctcagacgcagagccctgctttctcccctcccatttgatactctgcttcctcttgcatgctgtgagaggcggcctcattactcctcttccctcctccagtccctccaagcctaattcatcacctttggctttgggatcatagtttccaaaccaaggattgtctgaacattgtctgacaatgccctttttttttttttttaggcagggtcttgctctgttgcccaggctggagtgcagtggtgcaatcatggcacactgcagccttgacctcccgggctcaggtgatcctcccacccagcctcctggtgcgcatcaccacatccagctaattttggtattttttgtagagatggggttgtgccatgttgcccaagctggtctcgaacttctgggctcaagcgatcagccctccttggcctcccaaagtgctgggattataggcatgagccaccgcaactggcaccattgccattggtatttaagaggtgatggtttaggctttgaaattggggttgtttgtgaaaactgagagcaccttttgttttcagatatttcctatggccattggtgtaattggagggaagctctcgccatatataatatttttgagacagccaactaagaaactgggattctggttctctccagggtgcaaaatcctgggagaaggaagtgaattctcaggggcccagaaggagtctctaaaggacctctgccagtcaattctaatctctcttctcccctgcaaatcagcccctgcttctgcctctttctccgcctctcctagattctccccctctggagggcctgagctcccggccaccacccccaatgccgctttctgtttcctctgcctcccttcatctccttttgtctggggtttctttgtctggggtctccctttggttctgtttcacagttctcagcctcccctccctttctccacagccaggctgctcagtccctctctgcgggggcctagaggctcggtgaggggagcgggacttggttgccatggtcacattgaagccagccgcagctggcccgggcagctgctcctcctgggcccggggccccggacgctcggacaaagccaggcagcgttggcagccccagacccgaccccaaaggcctgagactggggtgactgggacctaagagaatcctgagctggaggtgagaggggggaagccagagatgaactgggagggcaggagtgggcactggagctgggccctccccttgtgggcagggaccaggcggtccccggctggaggctggaggtgtgttgggaggaggggagcggcccagagcctggcagggaggaggggaaagagagggaatagagttgggtgccatggtgtggtgaatgggctgagggactagggtgtccccaaagggggaccgttgtccagaaacaggttagattctctctttggtcctcatgtccccatctgtcccgcaggtgcctcttcctttctcagccttttatacttctcatctccccgtgtcccttagcttcacactctgcgccccagtctccctcctctttccctccactctctgtttcactccagccccttcttcccttgtccttgcttcttgtccccttgatctgtctgcccagctctcaagcctcctcagttccctgccttcctctcttaggagtttgtttccaacactgtttccttcccgagtccacttcagttccttcatccagttcagcccttttcttcccaaacttcagtctcctcctctgagcccctggggcttcccaccttttgctgtgtgtgccctgtcttcatcctccttttcctctctcagacctgtctccttggccttgacctcagtccatctccgtctctctgggaattctctcaccattgtccccatctgaccatcagcctcctctccctcttctggtcccttgcccttttcttccccaaccacagctgagctgtttcatctctctcccagagctacgtcatctcaatctcctccttcgctccctggcctcagtttccagtttattcagtggcatcaggtctgactcacacccaaagccttgtacactccttcaccctgccccccacccgtcgcttcttactctccccagctgctgacccagcctgctcctccagaggcagctgcagctcccggaaggggactgcagctagtgtatgtgtgggggcccatctggtccgtcctctcgctcgctggtcgtgctgggcttccctcctgtggccaggtggtctgcaggcctgaagctgccttctcccctctcctacgtgcctctcctcacattttttcagctgtttcccatcctctccttcctgggcagcaggctgccactggcttgaaggggagggaagcccaggatgggaggggatggtagagggtcatttgggggttctcagggacacagggggcctctggggttcggagtgatgcaggagatgtggaatgggctctggggaccacggatgggtaatcaggccctcttggtctttggtgctgctctctgggccccaggatggctgggatttccctctcaggcccctgggaatctcggctccgagtcccgcattccagctggctccagctccctttccgttgtcacttgactccactgggccccagccttgcatccctcccactcctccagcctagagctggggcgaggtgggcatcaccactaggaatttctcctgaggcagtgagaagaggggacaaaggtttcaggactctctagctccttctgctctccccagtggacccctctgtctggcactgccatgccacttagctggggtcagcgtgggcctggggtgtggaatgtcccaccagggtatgacgggctgtagcttgcctggcaggcctgttggggctttcccagagcacagctcctggaaggaggggctgtgggctgccaggtgaggtgacttgggaagccttggccccacccccaggctggccccacccccagtccagcgtctcctgggcctagattccccagctgctgttctctggaggggtaggtgttctgggggaatgaatccctgggggcttggtgggacaggaaggcgggaagaagctgctcttcgagtgaccctggggctgtctgttagcaggtccctcagccgttggaacgtccttgggcttctgaactagtgcccatgtgtgcctcggcctttcccaagggccagcttcttcctggtagtgcttttgtgtacttgtctggttgggacttcgtgtttctttcttgggattgttgtctgggactgcaagcagggtatgtttttatctactgtgaggttcctggggcggagatgtgcagtggagcgagaacttcctgtgaccgtgacattgtctaggtggtgagcaggtgtgggggtgtggagagaggtgaggggctgaggtagtgctgagtggggaaaaagcacctcccaccacaagctgttctgtcccgctccatcctctgcccagtagctctctcagttgctttgcctactcagtctcactgtttcatcttccctgggtctcttggtccccttccttttgactgtgtgtgattttcagtgtgcctccatccttctcctgctcctcttcttcctcctcccgaccactcaactttgtcctggcctcatttttggcctcttctggccagtgatcagaccctctggcccactacggccagagctggctgggcctgagggaggcttgccctgaggactcctgagtccccctcccactccactccgttgggagcccaggggaatcagggcctgggcgtctggacccccgggtcccttagaacgcccttcagagagaggaactgagaggagaaggagaagagagtgggcccgccttcagggtctggggccttccaggttgggtcgtaggggcgggagcgcacaggctgcgagagaggagcaaaggttggtggagggagaagagcagtctggggcctggctggacaggtgagccctgagacctgagctctgctcccttctctgggctaactcccgcagctgggctgggccgagcctgtgggaacctgcttcttcctctgtgccctggggctgctcccctttgcctctcccaccaggaaccgatcccagaagtaggaggggcgtcttcccctcgtgggccctgagcgggactgcagccagccccctggggcgccagctttggaggttctcgtttggggaagcgggggtgggctgcgagtgggtggagggggctgggcgcggagccggccggaggcagcggcgcgggcggctgggcggcctgggagcgcccaggcgggcttggcgggcgggttacctgggggaggccgggccgggcgctagcgcgcggggtgggcgtggcgggcgcggggcctggagctcggcgccgggcgtgggagccactgggactactgggtccgggagggggaagggagggctgcgagcccgaacgcgcggcgagaaggccgaggggagggaggggagcgaggagcgggaggaggaagggagggagccgaggcgagggggaggcggcgcctgggcccgagccgccccagccctggctcctctccccggaacaggcccccgacagctgctctcgggagccgcctcccgacacccgagccccgccggcgcctcccgctcccggctcccggctcctggctccctccgcctcccccgcccctcgccccgccgccgaagaggccccgctcccgggtcggacgcctgggtctgccgggaagagcgatgagaggtagggagagcggcggcggaacccgcgggcggaggcctggggctcttggggtgggggcgcgcggcggcgcctgcagggcgaggggcgggggaggcaggacgtcccgagccatgcttggtcgtccagctcttctaagcctccctgcccgcctccccgatgctctggcataccgtctgaaaaccgggggcggggactgggtggaggtgaagcccgtgacctcccagaaagagttttgagcctccagccttgaggcaagtcccctctcactcagtgcggaggaactgagccccgggaggaggtgctcctgtgcagccccactgagtcagctcatctatcgcctgccctccacctggccagtccctgcgggcatctaactgctaagcctccgctcagccaacacccagttggtcagtctggtcacagtccagcaaaaagagggactgccactctaacccaccagtgacaccactcttcccggctggatggtcaattagctctggcatgagagaatgtcactgccggtgagcgccagcttcagggtcccacccccccatgcctggctcttggctgaacatttcttcccagcgcttccagcagccagaggcaggcgcccaagctcgctggctgttgctgagggcctgtaggtgtgtccaggactgagtggtgtggtggagacaggtgaaaggggagtgagtggaaaggcagggaaaggctgttgtccttattgccactcttcccacccagcgcccacctgttccctgccccctcgacgtccctctggcttggtcacccatgtgtgttagaggctgggccccagttctctggggatcctgtgcccaagggcccgggtgtgtgtgtctcatgctgtcttttggtcacaggagcatgtggtgtctgtcatttcatgttcacaggtgtctgaaggtggctattcactgagcgatggggttggacttgaaggaatgccaaggtgtgg

SEQ ID NO: 11121 - DNA, 6000 bp, Homo sapiens
aactgggctgcagctcgaaataaagatgtcctttctacctgcaggttccacgaagcctcacaggcaactttggtgatctcacctgagctaggaattcggttttttgatgtgggttctctttgagccattgtgtgagctttaaaatgtgatgtggagattttgctatactggtgtttccttgccggaatttgacatccatggtggctctggcttccctgtctggtcccaggaggaaatggagtgtcctgcactttttttcagcttcgctttgtgtaggaaggatcaggagacctggagtcagggcttcctccaatctcactctcctccataaaacagtgtctcctaagctttctgggggtgagggccttgacaccgtgctgttctgatgaatataactgtcccagctcctgaaataaaagcacaggtgcacaaaataccgactgttgcaagcaatgcctaggtggggatgtttcctaggcgccaggtttagcactttgactttgtatgtacacacacaggggccaggcattgtggtttatgcctgtaatctcagcactttgggaggctgaggcatgagaattgtttgaagccagaagttcaagaccagcatgggtaacaaagcaagacccagtctctacaaaaaaaaaaaaaaaaaaaaagggtatatatatacacaaacacacacacacacacacacacacacacactgggtgtggtggctccagtctgtagtcccagctactcgagaagctgaggtgggaggattgcctgagtccaggagttggagcctgcagtaagctgtgatcaggacactgcagactgtcagagtgagaccctgtctcaaaaacaaacaaacaaaacaaaaatacatacacacacacacagccagagccagcgctgagggagaggctggactcaggggcggggtcacaggcgtttctcaggtccttctcgtggtctttgtctctttttcctggaggtgggggactctgtacttcatgaggagaagttgtctgaagaaggtgggagatactcaggagcagggtccagagagggaaaaggatgaggaagtggagacaaagcagagggggcaggacaagaggagagcacgcaaggaatggggatggggaggaccttccagctgtcagaaaggtcacccgcagaatttggctcttggtttttctgctttatcaggatggatttgggaaaccagccggagtgggagataaggagtctactttgcaaaggacacatgtgagcctcctcctagtttgaactcatgagtagcagctaacagccaggacccttgtgtcgggcacgtgaggcccctttgcaaccagggcgttttctgcaccccaccagccacccctcctgggaccacgctggttccctccaaccctaacagggagagaaggaaggagaggtctggagggtttgggtcctcccttgtgctccttcttcctctgccatttattccctgagtgtcctcgcctttcctccgctacctggaccccactacagtaatgcacactggcctggactccctttgtaaccaccaagtgggttcatcttgccggctacctagacgaagccgatttatcaagacaggagaattgcaacagagaaagagtaattcatgcagagccagctgtgcgggagaccagagttttattactcaaatcagtctccccaaaaactctcatcagtttttaaggataatttggtggataggggggccagtgaatcgggagtgctgactggttggctccggtatgaaatcatagtgagtggaggccattctcttaggctgagtcagttcctgaacgtgggggccacaggactggttggcaggtccagatggggccctccagctgttaaaaatacaaaaacctgaaaagacatctcaaaaggccactctgaggttcacaatagtgatgttaccttcaagagtaactggagaagttgcaaatcttatgacctctggaataatggctggtaatattcagaattccagcccctctcatcctaacttaatggccggtggcctttcttcgttttacaagaacagtttccctttaaactataaactaaattccttcccaaggctagttcagcctacgcctagaaatgaagaagggcagtttagcggttggaagcaagatggggtcagttaggtttgatgtctttcactgtcatcatttccttagttataattttgcaaaggcggtttcaccttggcttcagccccacccatgcagtaacactgtgccctgtccttccaatcactgccactaggtggaagcagagcgtgcatcgcccagatgggctagattctcacaggctcactgctagaacgaatattcttgagactttagatctgaaagtcagcctgatttctgaaagccttggaccgtttccaaaatcaaatcaatactccaggaacaagatctgcctcgactttgcctctacccaaggacgctatggcaacgcagttttcaaacgtgctttgagaataaatggaacagggtcccctgtgtccccactcatttgcgttttcctttttattacagccaaccgcttttgtaaatattgttacacatctctctattccactgaaaacatctctttcaaatgcactttaagaaagattcaatgccatgaaaatatgaaggatcctcttgaaagagagtttctggtggtgggttttaatgaacattttcttttttaaaactctgtaactatttcgttgtggggcttagcttcatattttcaaactgaaatattctcttccttaacctccacataaatccaagtttataatttttattattttaaaattttatttatttttctgttttggggacagggtctcctcctgtcactcaggctggagtgcaatggcacaatcatagctcactgcagcctggaactcctgggcttaagcaatcttcctgccttcgattcccaaagagctgggattatagtcatgaaccactgcaatccacccaaatccaagtttacactaaaagataaaattccaacattgtaggggattggtcaggtggtgggaataattataaagataaagttataggaaatagacacaaaccttcttggaaggtggaaagttttgcaaaagcctcaggatagggttatagctgaaagcagcctaatccccttaccttgagttaatagcttcgagtaagtacaaagacatgtaagagagtttatctaaagagcatgtttacctttgatcatttgtaggactgctctctccgggggactgcgaccagattaattacccacaggtgtgttgactcaaagcctttgtcattaaatctgtgctgaataaaggcccacagggccagatagtcagggcacgcagctgccacaaccctttctgtgagtggcctggccctctggtgcactctttcactgaatatcggtgtctgagtacattattcatccatcgtgcagcctgggtctgccggtcagaccctggcacaacatttaagaggaaatgaaagtcacaaagttatcccagtctctggagtcactgtcaaaactttggtgaggaatcttccaggttttcccctacttcaaatatatattaatattatgtaagtgatattagtggcattttcgcccaggctggaatgcagtggcatgatctcggctcactctaacctctacctcccagattcaagcgattctcctgcctcagcctcccaaacagctggaactacaggcacccaccaccacgcccggctaatttttgcattttcagtagagacagggtttcaccatgttggccaggctgatcttgaacttctgacctcaggttatctgcctgccatagcctcccaaagttctgggattacaggtatgagccactgtgcccagcctccttaaccttttaaaaaaggttaaaagtatgctgggcacatcttttcatagcaatacttaaaattgctcttactctttttaatgacaacatagaattttatcgtgtagctgttctttgggagacgattaaaatcttctttatcttcactgtggtagtggagatgtgggtgtgtacaacagctaaaattcaacaagttgaacattttaaatagatgcagtttattgcatgcaaagtatgtcccaataagatgatttaaaaatattatcctctttgagacttgtactttgcttatgtgaaacaaaacaaaacaaaaaccctgttcttgtgcccaggagacacaccctgacacatctggaggtagagggtcatgctgtctgcaacttaccctcacaggctctgaaataacaataatagcagcatatttacagatttagagagagagaaatttgtggtaaaaatgttcataagtaaaactagataaagggcaaaaataaaagaaataatgaaactacgtcttttaaattttctctctccggccgggtgcggtggctcacgcctgtaatcccagcactttgagaggccaaggcaggcagatcacgaggtcaggagatcgagaccatcctggctaacacagtgaaaccccgtctctactaaaaatacaaaaaattagtcgggcgtggtggcaggagcctgtagtcccagctactccagaggctgaggcagcagaatgccctgaacccgggaggcggagcttgcagtgagccaagatcgcgccactgcactccagcctgggcgacagagcaagactccgtctcaaaaaaaaaaaacaaaaaacaaaaaaactctcctttactttttctctccccttttcttcctatctcttccctcatttcttcaacacgtccccccatccttccctcttttctccattctctgcatttgatccccggtatattccagcctccaggccaacaaacttctccgcgtccgccgggagcaggtcagggaagggacgcgaggcggcgctgtcaccgcattctgagcgccgcagctccctgggccccttgtatcatttcagtgaaggtcactccagtctttcatggaggccaaactaagggtgtaaattaggatcctcactgaagtggcgggaccctaagaggctttttcctggccccttagttgtgggttttcctgcgggcggcgcagccggtttccatcagaaccgcccagaggcggacgctgccttcctggggtgacggagcagcaggaagcgttttcggatcctggaatacgtgggcggcccgtgggaggggctgaggcgcagtttcctactcacccggatccgaatcctccgcggtgctgtttcaagagagccggattccagatcacgctccagcccggactcggaattcctgccctgcgggtctgcattttcataacgggcaggtgtgagtgccctgcagctggagaccagaagcctgaaggcagctcggccctccccagcccacagcgccgttattccgtttctatatcagtaaacacatttcattttccgtagaccagggcggggtgacgggtgatcccagtcctcgcagtgaattccgggcagcaaaattcaaaacacatgcggccaaggccgggcacggtggttcacgcctgtaatcccagcactttgggaggtcgaggcgggcgatcacctgaggtcgggagctcgagaccaacctgaccaacatggggaaatcccgtctctactaaaaatataaaattagacgggcttggtggtgaatgcctgtaatcccagctagtcgggaggctgaggcaggagaatcgcttaaaccttggaggcggaggttgcggtgagccgagatcgcgccattgcacttcagcctgggcaacaagagggaaaactccgtcgcaaaaactttcgggggcggagcggagccccgccctgggttatgtaagcgaccgcgctgggccgtttctctttcttttccggaccctgcagtggcgcctaaagtctgagagagggaagtcgcctctgtgctcgtgagtgcatggggtataaggcaagtgctgagggagaaaacgtagtt

SEQ ID NO: 11122 - DNA, 6000 bp, Homo sapiens
cgtctccgttacctggttgggtggggtcacagtgcccagagttcagattcagctcatgtcacccctacccctctgaaagtggacccaagctgcaggcctggggtttctcctaccagcaccatccccaacacacacctccttagaagggagaacaagcaaggcataggtacttgggcggagaaacagatgtacctcgggaagaggagaggagacacaaggggcttatgtcgggacacaagcacaacatcacaggaacatggaaagagagtcagcaaagagacaagacatccccaccagggacagccgagccagctgagccagagggggcaaaagaccacaggcacaaccagagggagccaagcatccgcaagatacaactctccaccagggcctgttgcagccactcaccagtcctccctgatcctggggcactaaggccagcacagccaggacagtgataggcaccgccagcaacaaggtcaccagagaagtggctcctgccacagctagcaggagggaacccctcccctggagcctcccacccctgccctccagccccagtgcccccattgagactgaaccagagccagagcagggggctttcatacctcagggacgggcccaccccctccctgtagacctgcacacctggctgggactttccgcacacccctgctcccctcacccagcttcctgtttacccagagctggggtggggcagctggatgcctgggttctctgaactggggaagaagttgaggttagggagacaggctctcagggtggaaccaaaggggtctttagacatcttctggctcagcagagagagaaactgaggcccagggagggaaggtagcttgcaggaagccagtcagcagagctgaaatgagaacacagatctccaggtttccaatgtggtttgcattcttctataccctcaaggtaggtgctggaggaagagctgatcccgtctctgaggtcaagggccggactaggacaaggactggaatcttgagggatggatgtctgggttccctgagaagaactgattcccatactgggctgacctcctcccgttcccttgctcatctccagccccctgtgctgagtgagaaagggagaggtaagccttagcctcaccactgactactgactcactaaggagggatggaaatggagctttacctcccttgctacaaaaagtaaagacagatggacgaggcatactcccaccctcagagagcttccaagtctacaatgagccctatccattagtaggtgcttactaaatgtttatacataaatgaataaaaggacaaataaatgcaggaataaccaaaacaaagcagcaaggaccacatgaatggtagatgtaggcagcatgagtggttaagagtcaagggagtagccggggtagtggcttacacctgtaatcccaacactttgggaggctgaggcaggtggatcacttgaggtcaggagttcgagaccagcctggccaacatggtgaaaccctgtctctactaaagatacaaaaagttagccgggcgtggtggcacgcgcctgtaattccagctacacaggaggctgaggcaggagaatcacttaaacctgggaggcagaggttgcagtgagccaagattgcaccattgcactccagcctgggcaacaggctgagactctctctctcaaaaaaaaaaaaaaaaaaaaaaaaagagtcaagggaagaaagaccaggtccaaggaagctggaagtggctccaatcatctccccttcttggtaacatctctatgtgtttccgtaatactaataataatatagctgacccacaaaatgcacttaacatgtttatgccactgatttacacactttaataatttttttttttgagacagggtctcgctatgtcacccagactggaatgcaatggcaggatcatggctcactgcagccttgacctcccaggatctatggattcacctacctcagcctcctgaatagctgggactataggcacatgccaccatgcccagctaatttttgcattttttgtagagatggatttttgccacattgcccaggctgggctcaaactcctggactcacgtgatctgcccgtgttggcctcctaaagtgctgggattacaagcatgagccatcatgcccagccaataattataatcctgacaaaaaccctaagaggaaactgaggtacagagaggttaagaaacttatggagctcacagagtcagtggcagaaccagaatttgaacccaggcatctggctccagagccttgataacaagacagtttaaaaactgaatactggggctgggcgcagtggctcttgcctataataccagcactttgggaggccaaggaaggtggatcatctgaggtaaggagctcgagagcagcctgatcaacatggtgaaaccccatctctactaaaaatataaaaattagcggggcgtggtggtaggcacctttaattccagctacttgggaggctgaggcaggagaatcacttgaacccaggaggcggaagttgcagtgagccgaaatcatgccattgcactccagcctgggtgacaagaacaagactctgtcttaaaaacaaaaacaaacaaacaaaacagtattaggccaggcgagatggctcacacctataatcccagcactttaggagaccaaggcaggtggatcacttgaggtcaagagtttgagaccagcctggccaacatggtgaaaccccttctccattaaaaatacaaaaattagctggatatggtggcacaaacctgtagtcccagctacttgggaggctgagacaggagaatcgcttgtacccagaaggcagaggttgcagtgagccaagatcacaccactggactccagcctgggcaacagagcaagactccgtctcaaaaaaaaaaaagagtactgacttgagatttgtatgtaaaatttgccttcctcaggccagaaaagaaatggggaaataaatactgaactccagtcaatgttaagcttctgaagggtttagatgtaaaatgtactgatatttgtaattttaaaagatatttaaaagtgagatggattgataaatatgtgataaagcaaataaaaaatgttaatagagccaggtgcagtggcccactcctgtaattccagcactttggaaggctaaggtggaaagattgcttgagaccaggagttcaaaatcagcctgggcaacatagtaagaccccatttctacaaagcctcatgtggtagctggtgtctgtagtcctagctactcagaaggctaaggtgggaggacctctgagcccaggaattcaaggctgcagtgagctatgatttcaccactgcacttcaggctgagtgacagagtgagaccccatctcaaaaacaaaacaaaacaaaaaatgttaatagtagcatctaggtggtaagaatatgttcactgtacaattattctcatttcaccctatgtttgcactttttaataataaaatgtaaaaaaaacaaaacaaacaaacaaaaaaccctgaatattattcagcatggggaacatggaggatggggagaagggtgggggaggaagtagaaggttcttgaatttggaaggggaaacgcaaattaatatggacccacccaggcaccacatctcctcctcaccccttgccttacaggcgctccccagtcttcaccctcctcaaggagtgggtgtgcaatcctccagcacccatctccttctccatcacagtgccactaagaagccttcacccaggtctctccagagagcctcaggccgctgcctttacttagttctgtgttcaatgccagaatgctgcctcctacaggaagtccacctgtattgcccacacctcctttcctgtcaccaacttgtcaccaactttctgtccttgatctatccacagggctcatgtagatctagtatggctgcctttaactctcatgtttgttaatcagacagccaagcagcctgctgcatagagctgcagaacaccaagtgggtcaccagaacaccaaatatgccagagctcccagtctgaactggagcagggtacatgtgtccacagacatatgccaagatcaagaggtctcaacagatgcagtgtaagaggtaatagagaagagttaatcaaggaagacacctgaaggtggtgggtgtttgctgactagtggcaggatcagtgaaatgactggagctgaggcagattatggccctagctacaggcccagaagtttgaaaagaaagatgttgtaaccctaaccctggagccgaacttcctctcctaacaatgctggggaggaacccaggctgggggagaagttaaagccagaggaggggcaggaatgtctgaggtggcaacacttctcttcagccagacagcactggccagtttggagtctgtccatcctgcaggccacaagctctgggtaagctgggaatgggcagggaccttggtggaaggatggtcacaccccagagtggggtgaagctaagatgaggggagggagagtatgggtttgagtttccctgggccgtcgaggaatcctctgagtctctgctccccaaagaaattaaagacaattcatttctgtgcccacggcccttatggcctccacctgcacttctgctccccaccccccagaattcctcttaaacccagaagggtcccagtttccagaccctagtcagtatatctggctctggggtgaagagaacggccccctcttcaccctcaaacaggaaccagtggttggaggggaggaagtgcctgaggggaagttatggggccccagatactcctccatgccccacttcagccctagcagcatctgcctgtgggaagcagctctccacaccagccaagggggcccccacactcccgcgctgctctgcggctcagggagcagcccacctgctgggtgtgctgatatcaccctcccttcttccccccagtgcccacacccacccaggcccaggctccttcccctccatcatccccttaccagcacctagaaccatccagggctgaaaagtcccctccaaaccacgtggtcagcccagggcagaggaaagggctgggctctggagttgggcagagctggccttaaaccccagctccacctttctgggatgggtgacctagtaaagtccaggcttgaatctcgggtctttacttgggcaacgggcaccatgataccctatgttctggggattagcagtgaggaatggaaagtgcccagctcagggttggcacataagggaggctccccagcctgggaacgattataacagagggcccctcacttcacagatgaggaacttgaggcaagtcaccagcccctgatcatttcgcctaaaagagcaaggactagagttcctgacctccaggccagtccctgatccctgacctaatgttatcgcggaatgatggtaagtaaagtgtctcttgcatctgcatagagagagtcctgggagcttaggaagtgatggggaacagtgatgtatgcagctcatgactaggtggacaggcctctggggacagctggtacaggagggaaagggacctcacgggaggcccagaaacctggtaagaggtgaggtattaaggtctgggatggagaagctctgagggtatatttttctgcctctaaaactgttggagagggaatctgagaaagctgcaaccaaccaggaggctggggtacgctggagaaggaatgggcttcctaaccttgagccctcttccctgaagatatatgtatctacgggggcctggggctgggcgggctcctgcttctggcagtggtccttctgtccgcctgcctgtgttggctgcatcgaagaggtgagcgctgcactccctccctccccctgcagcagtgccccctgtgcccccacccccacacgctttcccactgctttcccagaacactgcctggccctggagccactgggaagc

SEQ ID NO: 11123 - DNA, 6000 bp, Homo sapiens
agggaacgtaagaaatgaccaggtcagaaccaagggtggtccagaagctaacccttagcttagggacagtttcacagagaacacgtccatgatgcaagactctgctgagggcctggagcagtgaagactggggcaaggtcaccctctgggaagtgaagtcaccagagaccttgcggagcagctttgagagttctctgagtaggaaggtaacagaatgtgaaggacactggagagaaggccaataggaagcaaacaaaaacaggccaaggaaacccagtacagggggctgcagggcccagggagtgggtccctcatctctcctccccacgcttggccaggtccccacctcccgggagtgcgtgggctttgaggctgtgcaggaagtgccggtggggctggtgcagccggccagcgcaaccctgtacgactactacaaccccggtgagcactgcaggacaccctgaaattcaggagaactttggcataggtgccctcctatgggacaatggacaccggggtagtgagggggcagagagccctggggctccctgggactgaggaggcagaatggaggggcctgtgccctaactcctctctgttctccagagcgcagatgttctgtgttttacggggcaccaagtaagagcagactcttggccaccttgtgttctgctgaagtctgccagtgtgctgagggtgagactgagggcctggggcggggcagtggaggcgggatggccggggccccccccacactgtctgatgggttccccaacttcagggaagtgccctcgccagcgtcgcgccctggagcggggtctgcaggacgaggatggctacaggatgaagtttgcctgctactacccccgtgtggagtacggtcagtcttcccaccgaggccctggcctgaccctccctcggggaccggccgttttggtctctctgggtgtagcctgctcctcttacaggtcatgcacgcagcctgtttgctctgacaccaacttcctaccctctcagcctcaaagtaactcacctttcccccttctcctcaccccctcttaggcttccaggttaaggttctccgagaagacagcagagctgctttccgcctctttgagaccaagatcacccaagtcctgcacttcagtatgaagcaaaccggagaggcgggcagggctggggggagacagggaggctgaggtgtggccgaggacctgaccatctggaagtgtgaaaatccccttgggctgtcagaagccttgggcttggccataaatagggaggcagtggcacctctccatgggggtggcgaaggtggaatgagaggatctacacagagtccccagcctgggctcaccctgcaccttctcttcccctctgaccacttttgcgcacgtcatccccgcagccaaggatgtcaaggccgctgctaatcagatgcgcaacttcctggttcgagcctcctgccgccttcgcttggaacctgggaaagaatatttgatcatgggtctggatggggccacctatgacctcgagggacagtgagtcatctggtcccctcagtctcttgtcctccccatgcctcgccacctaggccttgcccctcagaagccagatgcctgtgctctccgtttccacctgccatcctcccgagccctgctgactgcccctttgccccctgcagcccccagtacctgctggactcgaatagctggatcgaggagatgccctctgaacgcctgtgccggagcacccgccagcgggcagcctgtgcccagctcaacgacttcctccaggagtatggcactcaggggtgccaggtgtgagggctgccctcccacctccgctgggaggaacctgaacctgggaaccatgaagctggaagcactgctgtgtccgctttcatgaacacagcctgggaccagggcatattaaaggcttttggcagcaaagtgtcagtgttggcagtgaagtgtcagtgtgtgttgctagggctgagagcagtgcccctgcccgatgcagttctgggcaggccaggttgacataaccttagactctctgagccctgatgacccttgggctgttcagctctgctagaacctcccagatgacccgctaggagtctagtgcttcacaggaccaccccgagcagaactgggacccaagagcctgcaccccaaggaccagagtccatgccaagaccacccttcagcttccaaggccctccactgcccggctgtcgccagtcaccacggcctcagacagggcttgtgctcagctgacacctgtgacacagctcttctgcctcatgagctgttgtccagctacacctccccgactctgtcctcgtgctgctggcggttctgaggtctgcagattttagctgagttccgggctgttgaaagcctgctgacgcttggttctgttatcagtggaatgaggtgactttcccggagttgtgcaatcctcaggtccggcagtgtcttcttccagttactggtttcaaacaagccaaaagtctgactttggtgtgtttgtgaatcctctgaggaagccgctgttctcctggggtctccccttcccaccggacctgcctaactttcccccatttagtggcacacctggggtcttcagagatgactccgcgtctgtccaaagaagtttggtgagatcagtttccgtagaggtcatgacagttcagcagcctgccatccagtcattcgacagaaattcgggaatctttcacttcatgccatgccctgtgccaggtgccagagatacagctgctcactccagggctcatcgctggggagacagataagaggacgggcagtccccaccctctgtgaaagatgtgatgtcagggagcagtgtggtcctgtggggcatctaaccaagtcaggggcattgccaggcagggacagggaaggcttcctggagcaggtggcctccaagtggggctctgaagactgagaaggagccaggaaaagagcaggggtagatgagggcatctggggcagaaggagaatatacaaaggcccagaggccgggggcaggacagggtacctttggggacattgcatgtaattgaccacattcggagtttggatttggaagtggtggaagagatggagatggtgagacaagtagtaagcacgtcagccttccaggtgcgctcctttccgatgagcactgtcttatcccacgtaactttgagaagtttgggcctttcccactgtggcagaggtttcctgaggctcttgcatacatggccctatggttgctcatcagatctttctcccagtagctgctcagcatggtggtggcataagcccattttccggagccagggattcagttgcagcaagacatggcccggtctgggaggtcaaccatgaagaaggcagtagctgtcattgcccaaccccagaaatcccaatcctgttttctccctctcagtcctgatcatggattcagcagcagcgaactcgccaatgtagtgggtggcacagccagggtcttgactctggctctgcagtagcacagtctggaaaagctctgaggggagagagacccccactggtccgagggtctggcacagagccagaaatgggggggaaggtatggggctgggtcgcctctgacctctcaggtaccatccaggaggccctggcctctcactgaacccggccactcctctttggcatggcctcttcccaaatccccaaactgcctccttacccacaaaagtggtctctgagtgtcagtccagtgggacccccaccccttatggcttcagttccccaaatagggctggacccttgatcctgatccagctgtggctatccagccccttcctggggactttggactttgaggggggcatgcccagttgtgctgggaatccatactttccctggctggagtagaacctgtggactgtagtcctgagggcagtcatgttctgcctgtgcctggaaacacaagaaacttgactgcagagagaagaaagaggagagaggaacagagcgaggaaaccgcccgtctccggggctttttctgttccctatccttgactttctaagaccagtggggtcccctcctctgcttctttttcctgagttctgtgaaattccccaattcttattttttatctcaaaccagctcaaggtgggctgttttcctttcaaccaaagaaaggtgctcctggtggctaaaggtacatattcgacagctagatttccaggctggaatcctgccctccacaacatgcgaacaatacccgtgttgcatatagagcatggctgtgaagagttgagtgagtgcccacaaagcacttagagcagtgtctggtacatgctattactccgcagcgggaaaccacttcctcctttgtcttctgggcacttttgtgagtgaaaggaggcactaataacaatcacactgggatacctgtatatactggaatgccccaggcaaaccaggcttaaactgtattactctatctgtagcttaaactaacaaacaacccacacaaatcacattttgttcttcaggcgattcaggaaggcctattaggcagggactgccattttctctctgagacaaacatcatgccagtaaactggcccacggtggggtggcagagggagagggcccaggtgggggcggacactattgcctgcacagttgatgtggaaccagaaagctgactctggatgcaggaaaaaggtcagggttgcatttcccttccttgcttcttgatgggtgatcaatttttttgaaatacggacgtcccaaggccaatgagactggtgtcattccagaaaagggccactctgtgggcgggtcggtgggagggtacctgaaggtggggtcaagggaggccccaaaacagtctacacagcaggagggatggctggggctcttgagctataagtggcacctcagggccctgacgggcgtctcgccatgctgctcctgggcctgctgctgctgctgcccctgctggctggcgcccgcctgctgtggaactggtggaagctccggagcctccacctcccgcctcttgccccgggcttcttgcacctgctgcagcccgacctccccatctatctgcttggcctgactcagaaattcgggcccatctacaggctccaccttgggctgcaaggtgagaggctgatctcgctctggccctcaccataggagggggcggaggtgacggagagggtcctctctccgctgacgctgctttggctgtctcccagatgtggtggtgctgaactccaagaggaccattgaggaagccatggtcaaaaagtgggcagactttgctggcagacctgagccacttacctgtaagggccgggggcattttttctttcttaaaaaaatttttttttaagagatgggttcttgctatgctgcccaggctggtcttaaattcctagtctcaaatgatcctcccacctcagcctcaagtgtgagccacctttggggcatccccaatccaggtccctggaagctcttgggggggcatatctggtggggagaaagcaggggttggggaggccgaagaaggtcaggccctcagctgccttcatcagttcccaccctccagcccccacctcctcctgcagacaagctggtgtctaggaactacccggacctgtccttgggagactactccctgctctggaaagcccacaagaagctcacccgctcagccctgctgctgggcatccgtgactccatggagccagtggtggagcagctgacccaggagttctgtgaggtaaggctgggctcctgaggccacctcgggtcagcctcgcctctcacagtagcccccgccctgcccgctgcacagcggcctgctgaactcacactgtttctccacagcgcatgagagcccagcccggcacccctgtggccattgaggaggaattctctctcctcacctgcagcatcatctgttacctcaccttcggagacaag

SEQ ID NO: 11124 - DNA, 6000 bp, Homo sapiens
ggggtttcactgtgttagccaggatggtttcgatctcctgacctcgtgatccacccgcctcggcctcccaaagtgctaggattataggcgtgagcccacgcacccggccttgcctggccaatattttttaattaaaagattttaactccatctggctgggtgcggtggctcacgcctataatcccagcactttgggaagccgaggcgggtggatcacctgaggtcaggagttcgagaacagctggctaacattgagaaaccccatctctactaaaaatacaaaaattagtgggcctggtggcgcacgcctgtagttccagctactcaggaggctgaggcaggagaacttgaaaccaggaggcggaggttgcaatgagccgacagggtgccactgcactccagcctgggtgacagagcaaggctctgtctcaaaaaaaaaagaaaaaaaggattttaagacctttctattttgaaataatttcatacttaagaaaagtttgcgcctgtaatcctagcactttgggaggccgaggcatgagcccaggggtttgagaccagcctgggcaacatggcaaaaccctgtctttacctaaaatacaaaaattagctgggcgtggtggtgtgcccttgtagtcccagctacttgggaggctgaggtacgagaattgcttgagcctaggaggccaaggctgcagtgagccgagatctcaccattgcactcctgcctgggtgacagagtaagaccctgtctcaaaaaaaaaaaaaaaagttaccaaaatagcaaaaagcagtcatttatactcctcacctagatttcgcaaatgttaacattttgtcatgtttacattaatatcttttttctctaaatatatatacatttatttatatacgttaatgttatatttaaatataaacatagattcaaattttcctgaatatgcgctcacagattattcaaatttttccaactgtccttacagaaaaaaatatacagtggaagatccaaatcaggatcttgagttgcatgatcttgttacgtctctttagtatctttttgtttgtttgtttgtttgagttggagtttcactcttgttgcccaggctggagtgcaatggcaaatctcggcccactgcaacctccgcctgccaggttcaagtgattctcctgtcttagcctcctgagtagctgggattataggcgcccaccaccatgcccaactaattttgtatttttagtagagacggggtttctccatgttggccaggctggtcttgaactcctgacctcaggtgatccaccctccttggtctcccaaagtgctgggattacaggcatgagccaccacacctggcctcttttttttttttttttgagacaaagtctcactctgtcgccaggctggagtgcagtggcgccatcccggctcactgcaacctttgcgtcccagaatcaagcaattctcctgcctctgcctcctgagtagctgggattacaggcgcccaccacgcccagctaattttgtatttttagtagagacagggtttctccgtgttggccaggctggtctcgaattcctgacctcagatgatccaccctcctcggcctcccaaagtgctgggattacaggcttgagccaccacgcccagctaattttgtatttttagtagagatggggtttcaccacgttggccaggctggtcttgaactcccgacctcaggtgatccgccggccttggcctcccaaagtgctgggattacaggtgtgagccacctcgcccggccagtaatgcatttttgatggggtttctacagaagtgaggtcgtatcttcagtgtatcacctcatgaagtacattatatccagtaaggtagttttgagtgtcctccctgctacctgtctccccagtaggccttgggttcctttgggaccttagcccaccttgatttcttcctttcttttttccttttcttttttctttcctttttcctttcctttcctttttgagatggggtcccgctctgtcacccaggctgaagtgcagtggtgcgatctcgactcaatgcaacctccacctcccgggttcaagtaattatcctgcctcagcctcttgggtagctgggcttgcaggcatctgccaccatgcccagctaatttttgtatttttagtagagatggggtttcaccattttggtcaggctggtcttgaactcctggcctcaggtgatttgccctccttggcctcccaaagtgctgcaattacaggcgtgtgccactgcgcccggccagattttctccagctcttctgataacctccccccaaatctctttgtagcttctttggtttctatgatgcaaatgagaccgtcctggagatggaggagcaactggtgagccccctgggattacttccccttctagccgctgtcccaccttattccagagccctctctgtgactcctgagctgaagggttcaccctgtggggaggaggtccaggatcccagcagtaactcactttgtctctccttgtgtctctcttccatgcttccacgccccttcgaccaccttgaaggtttatctgcgggattcttttgggttgaagactctattggcccggggggccatagtgaggtgtccaatggccggtatctcccacacagcctggcactccaaccgtaccctttatgagacctgcattgaaccttggctctcctgaggatatattcaggggtccccaggaactcctcggtccagagaccaagtggtggccttggaaagcagatgtcaggctttggtgtgcctgtgaccacctcattgctcccatattatcccccatttttagtagagacggggttttagtagagacttggcctcccagaacccccttcctctgctcctccatgaatgacaattccaggcctcccctacctcatgtcctctcatttgggggattgctccgtgctgtccctttctctcaaggccgaagttgggaagtgagaaaccatgtttttaacttgtggctgcttttgctgctgctgctcctccgtatctggctgtatgggtggagaacccaccccctgcccaccacaggggtctccttccaggccactcaggacatttttagcttctctcctccccatgttcccttttttctctaaagtcccctgacatcagccctcccaactcctaagagggactacccatgagagtggggttctgaggctcccctatggggacagttccgttcttgaagtgtcagtgttggggaatatctgtggcctatgaggcccatctcaggtttggggatcccccagtccctatgatcagtgttggagtacccccctgggagagcctagtttctttgaggccccaggccctcttttaactacctttgaataggtgttatccctgtatttatggaaataaagttccatttcctcagtgtgacttggctcatttccaggtggaggggacctggctccccaaggagggtgggggtggagcctgaggcctgggtgcccagatgcctggtctagggtggggacccccttggtgtttccgctctctctcaatgcccattctttgtgggttcctggttctctgcgggttctttcctgctgaagacaattctcttcctctcccagtccccaagactggggggttaagctcagggctccagtggtttgggcctcagcctcatgggtggaatgcgcctgccacccccaggctagacgagggggcagagggtcagggtgggcattcgttgtgccgcttttgagctttgtgggccagagctgggtgtagggctggacaatgagcctcctcttccttgaaagaaggaattttggctgagacaatagggccctgtctgttctggcatggggggtggtggctgactcaattctgttccccctaagccctaacaaatgtcatgaagagaggggggcagttttccccttggtgccctgggctgcccccctgcccctttgtgacgacttgcccttctagctttcctcagctgatcttgctttttctcccataacctgaactgctttgttccctgcagctggttctctccctgccccctaactctcccctagtctgttttgggttcaagggggtactggtggtgttacagagctcatagcttctgatctggggagtccagaaataggggcctcagagggttggaaagatacttctagggagccctttgctggggtggggatgagggtagtgggacttgaccctactgagctgaccctgctggagctaaggaggaggcttgtgggagggggcaggaatgggaggactctctggcccagcccctcctctccttcttagcctgccaggcccacccaccagtctgagctgcttctgctgaggctggtctgcttgaagcctcccaggagaaagaagccaggtgggaatggagagagagaggaaggcaagtggggagagaatttcaaatggggaaagagtggggtttactcagagccttagggtgggcatgagttgcggggtgttttgttggagcaagggatgtgcatttagggcgttatgtgacggtgtgggtatatgaggggagtagcagtgtgtgaaaggtgtggagtttccaggtgcttggtttgtgtgtacggtgtgaaggtatatagctaggggttttttttgtttgtttgttttgtttgtttttttgagacggagtcttgctctgtcgcccaggctagagtgcagtggcatgatcttggttcactgcaacctctgcctccagggttcaagggattctcctgcctcagcttcccgagtagctgggattacaggcgtccaccactgcgcctggctaattttttgtattttttagtagagatggggtttcaccatcttggccaggctggtctcgaactcctgacctcatgatccacccacctcagcctcccaaagtgctgggattacaggtgtgagccaccgcgcccaaccagctagggttttgaaggtatgaagttataagagggcatgttaaagacaggagggttggccaggcatggtggctcacacctgtaatcccagcactttgggaggccaaggcaggcggatcacctgaagtcgggagttcgagaccagcctgaccaacatggagaaaccccgtctctactaaaaatacaaaacaaaattagccgggcgtggtggcaggcgcctgtagtcccagctactcgggaggctgaggcaggagaatggcatgaacccgggaggcggagcttgcagcaagccgagatcgcaccactgcactccagccagggtgacagcgagactccgtctcaaaaaacaacaacaaaaaaaaaaccaaaaaaaaaaaaccctagctatataccctcacaccctacaaaacaaaacaaaacaaaattagccaggcgtggtggcgcatgcctgtaatcccagctatttgggaggctgaggcaggagaatcacttgaacctggggggcggaggtcgtgcggtgaggcaagaacatgccattgcattccagcctgggtagtaagagcgaaactccttctcaaaaacaaaaacaaaaaaaaacccaaaaaaagacaggagggtcataaggggagggttgactgtgtgtccctccaggttgtgcagaggggattagaagtaagtaggttagaggggaggtggagggagtgtgctggggtgtgagcttttatgatgctgaaaggatcatgatatgctaaggacaggatagtgttgggttgtacacacaggtgtaggcaatcctggtggctagtatgtaaaagtgaatgtcctgactcccttagagggtacctgcagagtgcccttggagggactagtgctggagaaattaataggagaggggacgggcatccattaaccttttcttgcctgcagcctgtagggtccagcgtcaaagcgaatcatggggtccagggctgagctgtgcactctcttaggcggattctccttcctcctgctactgataccaggcg

SEQ ID NO: 11125 - DNA, 6000 bp, Homo sapiens
ttatctatgctgttgtgttcactaaggacgctattctgtttatattatattcagtgactacggcctggaggtctctatgtcgttccatcatgattgcctcaaaaattagtgaggtttccatcagtggataattttttattattaaaaatttatgaagtgtcattctcaaatttccctgaacaacttttgaagcttttcggatgtctccggtggtagatcttggggtcattccatcaattatgtactctatagatatttaaaatgttgcccgtttctttctctcagacttactcacatttccacatgggaactggcacaggtggggagtgggtaaaggagtccagcaggctgaatgccttcaacaatcattttaccacatggtcctcacttactctcagctgcctcatatgtgtcacctcacaagtaatcaaataaaatgggcatgtggctaagctttgtaaatagtgaaaacatgaatgtcaattttttttacatatttctattacagatatagcttcacatttcttttctttagcaaaataagggatcattttattttaaaattgagaagtagaaaaaattggtaaaataaatcattttattctcaaattatcaacccaaattacctgttcttcacctcatctaataaagtcctataaaaagaaaagtgggccagacaaggtggctcatgcctgtaatcccagcactttgggaggccgaggcaggaggatcatttgagcctgggagcttgagaccagcctgggcaacatagcaagacctcatctctacaaaaaaagaaaaataaaaattagccaggcatggtggtgtgtgcctgtggtgccagctactcagaaggctgccgtgggaggaccacttgagtccatgaggcggaagctgcagtgagccatggtggcaccactacactccagccagggcaacagagagaggcgctgtctcaaaaagaaagaggaaagaaagcgaggaaggaaggaaggaaggagaaggaaggaaggaaggaaaagaaaagaaaagggaagggaggaaggaagggaaaaagaaagacagaaagaaagaggaaggaaggaagaaaggaagcacagattaattatttggtctcttactctcctctgcctttgtcgtccatctctttccacctctcttcatgcatccctttctccctcttccctttcaggatccatctctgactccctgctcctttatagagatggacagtgggtttgtaaaacaaaagttgaaaagtcagatagttaaaaggggaagtgaactggaaggtactttaaactttcacaactttattaaccgtggctgctcccattatgattttgttcggcagtggaagtttcacctgcttctccagagcgcttggcgtctttgttccaaatttcctttcttcaacctcacaccagagtgccctggtcaggcttggctcattcattaggcacaatgtgggcagtgcaggggaccctccatactgtaaagccacatgagaaggttttaactccttttaaaattagaaaaataatggaatattagagcctaagaaaatgttttaacttttaattcagcctagattatattgtctttataccaattcagtcataaaatataattttccatatttttgtggaggaagaggcccatacaagcaagaatgctcggggctcacatgtcagaatgcagccttggtcatgactgatcctggccttcgtatggttctgctacctgtgtgcctgcccgtcttccccaaaatctatgtggtcctcgaatatagcaactgtcattcaatacacatgtttgagcacacagtgagctaagttttaaggattcaaagatgaaaagtcatgctgtcttccctgcagagggtgctcagattagtgatggaaacagtatggggtgcaggaaagcagaaggccattgctgagcagggcagtggacccagcagaggctgaaacaatacaagtgacttggttccaggtgggccagcagggtgacgtcctctagcaaaatttggcacccaagacaagtaccagaagaaaagaaagactgcatgtattccacatatattcatgtttgaacaaggagtcaagatttatggcaaggataaggaggctttgttggtgacctgttaagaccaaccagggcagtcatgctggatagggaagaaggtgagctggaagaggaacagacaacttggacagccagatgttgagacggaggggttggaggtcataatgtggtcaaaaacatgttgatgagaggactcagctacaaagttgttaacttaagcagaaacctcaaggatggattttagaatttctccaggaagtcctaaaagataattccatttcagggagaaaaacaacagaccactgcaaagaccagggaacatgaaaggataatgtagtttgtcttgcttggcagatacttttgaaggatgttggactgtaaggctgtcgatatcctcctcagagaacttactacagtacattgtatctgttcccttacctacctgactcttccactattcagtttgttccttaatagtagaccatgcctgattggtgttttacacatctccggctatgtctgacacttgtggatgctcagaaagtggggaaggaaggaaagatacgatggtaaaaggcttacacatgtcttgacaaaaaagtccagtttggctcatttggctggagtcgtactgcatggctgccattctgctctggcatcctcagacaagcacactgcccattagaggaaaaagtgtgatataagtgttgagtcagaatgctgtagacatttagtaatctccttcacaggaaaaaaaaaaaaaaggtggggggaatgacagaaatccaaaaactagtagagcttccacttttcatttcagaagaaatcagttgctctcctctaaggaccattactattaacaaaacagagaccttagaaggaggcattgtttatttattatatattttgtaatgttattaccaatcttgttatactctttcttataccctacaattgttagcagaaattattttaaattaataagatcctgcatgcttttcctttaaaaaaaaaaaaaagaaagatctctgtgtagagtgtcctattctgagccagtcctgagaggaaaggaagtataatcaatttgttattaaccaatgaaagaattaagtgaaagataaatctcaggaagcagagggaagtaaacctaatttctgactaagaaagctaaatactatgataactcattcattccttcttttgttcaattacattatttaatcataagtccatgacatgccaggcactcaggaaatagtaaaaattggacatgcgatattctgcccttgtgtagcgcacactagagtgggaaagaaagtgcacttttaactggacaactaccaacatgaagaggggaggaagcaggggctggaaatgtccacagactgtgccaaaaaatgaagcccataatatttgaaagtcagtttcttccatcattttgtgtattaaggttctttcttcccctgttctccgccttcctgcttgtcatcttcactcatcagctgaccacgttgcctcttgtggtgtaaacttgtaccagttttacggtccctctggccagtacacccatgaatttgatggagatgagcagttctacgtggacctggagaggaaggagactgcctggcggtggcctgagttcagcaaatttggaggttttgacccgcagggtgcactgagaaacatggctgtggcaaaacacaacttgaacatcatgattaaacgctacaactctaccgctgctaccaatggtatgcgtccaccattctgcctctctttacttaagttatccctccataccagggttcattattttcttcccaagaggtccccagatcttcttatggcaattgctgaaattttatcatctcccatctctaaaatcacatattcccatgtaatacaagggtctttccattatgcattcagcaaatccttctaggagaggtctcatcaacctcctactttattaaacatgcccacagagagaagggcacaggaataaagcagaggcaatgtgtcgttgctcccaagcagaaggtaaataagacctctttgactatcaggtggtgaaatgctggtaggagggctcttccaggatgtaatgcagaacttcagggcagagctattcacacttcacaccagtgctgtttcctcaccacagaggttcctgaggtcacagtgttttccaagtctcccgtgacactgggtcagcccaacaccctcatttgtcttgtggacaacatctttcctcctgtggtcaacatcacatggctgagcaatgggcagtcagtcacagaaggtgtttctgagaccagcttcctctccaagagtgatcattccttcttcaagatcagttacctcaccttcctcccttctgctgatgagatttatgactgcaaggtggagcactggggcctggaccagcctcttctgaaacactggggtaaggatgagtttcatcattttttgattctttcttgtctgtcaagttcagaacttcctgccttttactcctatatccaaaaacttgttttccacacttcatgggtttcttttctgtctctcttttttttttgaaagaataaagcaaaaaaagcagagatttattgaaaatgaaagtacactctacaggatgggagtgggcctgccacttcatggttttctaatgatagacttcactcttctccctaagcctggggccttgagtctttgcagagccaaccctctaccccatcccatcccacacacatgcacatgagcacactctgcattctgacctcaacaacttcacttccacagagcctgagattccagcccctatgtcagagctcacagagactgtggtctgtgccctggggttgtctgtgggcctcatgggcattgtggtgggcactgtcttcatcatccaaggcctgcgttcagttggtgcttccagacaccaagggccattgtgaatcccatcctggaagggaaggtaagattgagactggttacagttgaagcggcagtatgaaaggaaggaaagtgggagggcgttgtggacatgaatgtggttgaaagttgtaggggaattgggaagtggcatgatgatgacacaggagccccctcggacccattgatctcatgtctgccctgttgcaggtgcatcgccatctacaggagcagaagaatggacttgctaaatgacctagcactattctctggcccgatttatcatatcccttttctcctccaaatatttctcctctcaccttttctctgggacttaagctgctatatcccctcagagctcacaaatgcctttacattctttccctgacctcctgattttttttttcttttctcaaatgttacctacaaagacatgcctggggtaagccacccggctacctaattcctcagtaacctccatctaaaatctccaaggaagcaataaattccttttatgagatctatgtcaaatttttccatctttcatccagggctgactgaaactatggctaataattggggtactcttatgtttcaatccaatttaacctcatttcccagatcatttttcatgtccagtaacacagaagccaccaagtacagtatagcctgataatatgttgatttcttagctgacattaatatttcttgcttccttgtgttcccacccttggcactgccacccacccctcaattcaggcaacaatgaaattaatggataccgtctgcccttggcccagaattgttatagcaaaaattttagaaccaaaaaataagtctgtactaatttcaatgtggcttttaaaagtatgacagagaaataagttaggataaaggaaatttgaatctcaaaaatatcaaaagtaaaaatgtattctcaaaactttaaatttatgaagaatgatgacagtagaagcc

SEQ ID NO: 11126 - DNA, 6000 bp, Homo sapiens
ccttcatggagggggtgactggagatgggccgttagaggttaggcagggtgtctagaggtacacatagggagagaggtggtccagggtgggtttgaacatgggaaggcctgggagagctctggatttggggtctgggatgcgggctgagggcagagtgcctgggctttggctgttctctagggggctcagcttgcatccccctctctgtgtgctggctctggaagaggggccctgccagcagccaaccctgtctgaggcaggtggggctgggccctgggtgggtccttgagcctggaggggccgcagccatcctgagccacaccctgctgcctgcagggagacgtggtgcggctgttccatgcggagcaggagaagttcctgacgtgtgacgagtacaagggcaagctgcaggtgttcctgcgaactacactgcgccagtctgccacctcggccaccagctccaatgctctctgggaggtggaggtcagaaaagccctgcttctggcaccccggactcagccttggatgccacccctccctcttccccaccatcctggagggtgggatattgacccctacctccctctgagtccctccagagtcaaaaggccagagagggtccagaacccacccacccagagatctccaggcctccctggggtctgactccccatgcctgtccagtctctccttcctgcctcacacctgtgtgcccctaggtggtccaccacgacccctgccgtggaggagctgggcactggaatggcttgtaccgcttcaagcacctggctacaggcaactacctggctgctgaggtgagcgggaggtagagggcatgctggggctcgtgtgtgcatgtacacgtgggtgtgcgggaacatgtgtgcacatacttgcatatgtggcacatgtgcctatggaccctgacttctctgcactcatgcatttatccaatattatcaaataaaggcatgactgtaaataagcctaataaatatcactgtgctcctactatgtgccaggcactattctaggcacaggggatacaaagtgagcaaaatttcccgtctgtctgtaatgcgcacacttgtgtgtgttggagcattggtgtgtatgtgtgtatgttcatttgtggttctatggagaggggccatgaagggctcccctggaatgatatgggcacccctgggagggtgcagcctgcctgcccaaacccagggccctatgtaggtgaccatgttttgcagtgggtcgtgtgggtatagtttggtgtccagtagctcccccacatcttgtatctctgtccaggagaaccccagttacaaaggtgatgcctcagatcccaaggcagcaggaatggtgaggagcaaagcaggtctccagtgagaccatgggcctgccctgggggtaggcgggggcaggggaggccgtgaaaacctgggaggtgggctggagggagacagatgggatctcaggtgggatcccaggtgcttcatgggcttgagaagagggagggccttctacctgatttggggtcctcatccagggggcacagggccgcacaggccgcaggaatgctggggagaagatcaagtactgcctggtggctgtgcctcatggcaatgacatcgcctctctctttgagctggaccccaccaccttgcagaaaaccgactctttcgtgccccggtgggtatgcgccatgtgcctgggagttgactggtggtgctcagggtgggccctcctgtctctgggactctctggatcccccactcctccgccctcctgcggtcctttagcctctggggtctctgtaggtcccatccctctggggatctagctctgagtctgtcggcggctgaccaccattgcatgcctgcctggtgcctggcgcctgccccagttggtctgggtgctcaagcacaggctgcatggcagtttgtctaggacaccagcagcacagggaacccaaacactggatgggaaggccagactctctggcctttgaggtcccgccaaccccgagattctaggacggaacatcaagaaacttctcaagtgtcagtacaggctttggcgtgtccttagctgtatgacctcaggctgctactcactctgcctccatcattttagtgggaacatcaagtttccctgtcaacagggctaatgggagagttaattgagtcactacataggcccacagtcccttccctgaaactcttgggggtagatggatttggtattcagattgtttttcattttagaaaggtaaacttgcattttgtaatcatagacattgagtatttttgtgtaatgcatgtgtttctatgaaatgtgtgcatcttgacattcaatgggataaatagttaaatagcctcatttgtccaaatgaattttggtcccaagtgtacaaacaagctttggttttggaagcgtggacaaggctgcccgtgtcagtgcagtggtcaggacggggcctgggcgcagggctagctctggctgttcttatctggcttcagcctcctcatctggaggggcaccagtggctcctgtcccacagctgttgagggtgtggagtagggtggcagctgtggcagtgttggggaggtaggccggcaggcagcatgacgtgctctgtggtgcactccccgagtcctttccctcccacccacctgcaggaactcgtacgtccggctgcggcacctctgcaccaacacgtggattcagagcaccaatgtgcccattgacatcgaggaggagcggcccatccggctcatggtgcgtgtccctggggtgggggtggggctggggccagggccggagcttgttcccaggtgccctgctgacccctgtctctgcagctgggcacctgccccaccaaggaggacaaggaggcctttgccatcgtgtcagtgcccgtgtctgagatccgagacctggactttgccaatgacgccagctccatgctggccagtgccgtggagaaactcaacgagggcttcatcagccagaatgaccgcaggtgggctgcagtggcacaggggttttctgagtgatcttgccctcccagggcctgcatttcatgaagaaaggagtcatgaagcagaagctgggcaaactggggagagagtaggggactggcccctgtggggccctggctgagcctgggaccctggagttgggtgcctcacggcttaggtactcccagaactaaccctatgatggagctggttactgtgttgagcctggtctcaaggccagttatgatgggtctgaggctcagagaggttacgagacttgctcggggtcacagttagtaagtggcagagtcaggatgcaaatgcagcccccttcacaccagactccccgccttgtgccctgtacttcctttccaggttgggatattctgagattctgtgtcttggggccactttggaatccagggtgggtggggctgggcgtgtttggagagcatttcaggggaaagccgggaagaggaattgtaggctgaggatgggttttgtgctttgggggccgctgagtgaactcatgaaagccatgttttgggagggactggctccccaagagggacacctgctgggtgggtatctcacactcgtcatccccgggtcccctcacccaggtttgtcatccagctgctggaagacctggtgttctttgtcagcgatgtccccaacaatgggcagaatgtcctggacatcatggtcactaagcccaaccgggaacggcagaagctgatgagggagcagaacatcctcaaacaggtgcgtgtgcacccatgaggggacgcagaggggccgggtgcccgggagagggatgccttcaactgcaggctcatcccccgctttaacaaaaatcagtatatatggggcacgaccacgtgccagggacttccctaagtaccccacatgtgttgacgaatttgatcctcactgcctggaggaggcgccgtgattcttaccccgttttactggtgaggaagctgaaacacaggccagagtcgctgtcccagggctcacagctaggaagcggcagccaggatttgagcttgtgatgttgggtccagagctgtgcttcaaaaaatttttttaaaaatttttttattatgagaatcatcaaatattgagaaagtattggaagaatagtacagggaacaaggtgcctcactgttttgctgccttggctttatgtagctcggttcacacatccgtctttccatccacacattgcaaaataggcagcattttacacccaaaagtttcagcaggcatccctaacaatagggacattgccttacataaccatagtacatgatcacacctaagaaaattacaacaataccaagtccatatcacatttctctaatgttcccagaatgtctttgtaaagtttgtttttttttttttagaaacgaggatccaattaaggttttttcattccattctgttgctctgtcactttggtctctgtttcagaacaatttttcacctctccacccagccccagcctttaaaacatttttgtaattatgtaacattttactttgacaaggcaggcctgtgtctcatctcttaagctctggccacagcggtccggcctgccttttctcttagccttagaccctgagctgccgagaccctctgctcctcccccaggccccagatctgagctgggattagaatccgcatcagggagggataggctggggtcagcttcgggattccaacaaggagtagggagagctggggctgaggatggctgggctggggttgtggtccagcttagaatcagctcgaagctgatgtccgggctggctttagggcagagtcagttgggactcagggatgactcctgggatgacttaggggtacagacaggtgttggggaatcagtcctcaccctctgtattcccccaggtctttggcattctgaaggccccgttccgtgagaaggggggtgaaggtcccctggtgcggctggaggagctgtcagaccagaagaacgccccctaccagcacatgttccgcctgtgctaccgcgtgttgcggcattcccaggaggactaccgcaagaaccaggtgcgccgctgccctgctggcccactcgctggctgcacgttccttcctcagcaagcgatttcctcaggcacatgtgctgtgccaggcactgttttggggcctagggtccagtagggcaccagacagcagggccgggttcatgggaatgggacctggcccggtgctcacaagggccttgcactgggttagatgctctgctgctgagcaagggtcctgctctttcattctgcactgggccctacaagttatgtagccaatccttccacacaaacaaggtccctgccctcgtggaggtttcgctctggtgggaaacagcccacaagctaaataactatgtaatgtaagccactcttctgcccagcgatgcttcctttcctggacctctgcctttctagggtattgggtccttacctcggggtttgggggcagcgttccagagcagagctgggcccttggcccacctgtgactctctgtgacccccagcctgtctgcccccccaggagcacattgccaagcagtttgggatgatgcagtcccagattggctacgacatcctggccgaggacaccatcactgccctgctgcacaacaaccgcaagctcctggaaaagcacatcaccaagaccgaggtggagaccttcgtcagccttgtgcgcaagaaccgggagcccaggtgggcccgaaccccctccccggccggcgcctgctcctccctcctcccttgcctgggtagaaactctgctggttgtgtgaactattcctgcacctgttggtaactgccaccctgaatagcactgggtggctcagcactgggaggccctagcctccctagcccttctctgggatcccctaaaatttggcccactctggcaacaatgggaatgactccttgtaccact

SEQ ID NO: 11127 - DNA, 6000 bp, Homo sapiens
atgggggtggggtatagagagaagacaaggctagctttttggctttcttaactgactagatagttctattgactgagatagggaaaatgagtgagcaggttttgggggaagtcaggtgttctctttagcacacgtaaagtttgagatgcctgttggatatccagttggaaatgccagtaggcaattggatttataggaatcaggatgtagttttgggaaccaaccattcatgttgtattgaaggttgtggactggatgagtgagtgttgctaaaacagaacagatttctgaggactgcgccttggcattttatggtgtaataagaagaacaagggtttcagagtcatatagaccagagttttaaattctgtcactattaggtattagcaaatcaccattacttcttctttttttattattgttattattattttttatcttttatttgagatggagtctcactctttcgcccaggctggagtgcagtggcgtgatctcggctcactgcaacctccacctcccaggttcaagcgattcttgtgcctcagcctccccagtagctgggattacaggtgcccgccaccacacccggccaatgtttttgtatttttagtagagacggggtttcactatgttggccagactggttttgaactcctgacctcaaatgatctgcccgcctttgcctcttaaagtgctgggattacaggcgtgagccactgtgcctggccaccattacttctttgaacatctgttttcttagctgtaaagtgcgtgttggaatacataccttggggggtttgttttttttgtttttttagagatgggggtttcactctgttgcctaggctagagtgcagtgtcttacagcagccctcccgcctcggcctcccaaagtgctgggattacaggtgtgagccaccactccctgcctaccataggggcttataactaagataatgttaactaagttaattaatgtgacagttaactaagataatgttcaaaaggtgctggtggccgggcgtggtggctcatgcctgtaatcttagcacttggggaggcttgaagccaggagtttgagaccagcctgggcaacatagcaagaccccatcactacagaaaataaaaaaattagccaagtattgtggtgcatgcctgtggtcccagctatttgggaggctgaggtgggaaaaatcacttgagcctatgagttcgagactgtagtgagccataattgtgtcactctactccagcctgggtgacagagtgagaacctgtcttaaaagaaaaaaaattttaaaaaaggtgctggcacctgggtcttccgtaaagggaaactcctgccatctgaggagcatggggcttctgaactcagggcctagaatggtagtaggatttcttggagatggatcctttagttttggagacctgtgaagcagccttcactgtttccttcctgtctgtctagctgtgccctcctggctgaagaagccccaagacagccagctggaggagggcaaacccggctacttggattgcctgacccaggccacaccaaaacctacagttgtctggtacagaaaccagatgctcatctcagaggtgagaaagaagagtgttgctagtggatgggcggggccttccctccacttgccctcttctgtgctcacctccatagcactcttaccctggaggcagcctccagggagaggtgggtgtgggttcaggctctgaggcctctcacctgtgctgcaggactcacggttcgaggtcttcaagaatgggaccttgcgcatcaacagcgtggaggtgtatgatgggacatggtaccgttgtatgagcagcaccccagccggcagcatcgaggcgcaagcccgtgtccaagtgctgggtgagccagcatgtcttgggggagcacccttcctggctaggcaggagaggaaaggggagggagcagcaggcctggccacggcctctccagcggccccaattcctcgtctttctacccaccctctgctgaaacagaaaagctcaagttcacaccaccaccccagccacagcagtgcatggagtttgacaaggaggccacggtgccctgttcagccacaggccgagagaagcccactattaagtgggaacgggcaggtgggtacagtgccggcatagggtaggggcaggcaggcagttcactgatcagatacatacctgagggctgctgggtgccccgcactgtgccaggaaatgtggagattagacaagcagtgcagggctgatgtatagtttagttaggaaggaaaaagccagacacagaagaggtcagattatagccttggacaacatggaagacaactcaaggcaacaagtgattggattggttcagacagtgctgtaaagtcctctcttccccttttccaaaatagtttatcttttccaacataaaaattacatggaggccgtgcatagtggctcacgcctgtaatcccaacactttgggaagccgagatgggtgggtcacttgaggccaggagtttgagaccagcctggccaacatggtgaaaccccatctctactaaaaatgcaaaagttagccaggcgtggtggcacatgcttgcaatcccagctgcttaggaggctgaagcaggagaatcgcttgaacccaggaggtggaggctgcagtgggccgagatcatgccattgcaccagagtctggctgacagagtgagactctgactcaaaagaaaaaagaaacaaaagttacatgggctcctttacaaaatactggaagaggccgggcgtggtggctcacgcctgtaatcccagcactgtgggaagctgaggtgggtggatcacgaggtcatgagatagagaccatcctggctaacatagagtagtgaaacctcgtctctactgaaaatacaaaaaattagccaggggtggcggcacgcatctgtagtgccagctactcgggaggctgaggtaggagaattgtttgaacccaggaggcggaggtggcagtgagccgagattgtgccactgcacttcagcctgggtggcagagcgagactccatctcaaaaaaaaaaaaaaaaatattgggagaaaaaatgtacagtcctgccgtttatcatctttgggtgtatgtcttctttttctgtgcatatgtttttctttttttacctagcagttttattgtatatatagtttcagttattaaatttacatgattggctgagtgtggtagctcatgcctgtaatcccagcactttgggaggccgaggtgggaggatcgcttgagcccaggagttcaagaccaacctgggcaatacagggagaccctgtctgtacaaaaaatttaaaaattagccaggcatggtggtgcatgcctgtagacatgcttattgtagaattagacaatacagataactatgtagtttttaaaaatattttttaaaattatttatttttattttttttgtaacggtgtaattttatacccttttttacttaccattgtcaagcatttccccacatctttatacactcttcatgaatatttgttttgatgatcctaataatatttcaacaattggattcactgtaatttacttaactgttccttaaatgttggagatttgggttgttaaccagccacccacccacccccttttttttcattgctgcaataaacatctttaagccaaagtttttttctggatttaggtttatttcctttgggaaagattcccagaattgggataattatgcacgaaagggggtatgaacatttttatagcccttgatgtgagttgccaaattattttttaaaaggttggaccaattttgacatttccacctagagtgagagagtacagttgtagattctgaggaggaagtaggctccctctgctcaggtctgggggaactttctgggagaggtgaggcttaaaatggatctacagcctgggatggtaaagagcgggaatgggctctaggagggagaagtgatgggcagcggagtaggaacagggccgatctgggcccaaacagagtccggtttggcagacgtggaatgtcacacagggcagtaggaggaagaggtgagactgaagaattggaagaggggtaaataacggaggggcttctaacacttggctcaggagtttggactttgcctgtgggtggtcaggagcgatggtgtgtttttgagtagaggtgagggactgaaggcattgccagctgtctgtgtaaccctgatccttcccataatttccctttgttacccctgcagatgggagcagcctcccagagtgggtgacagacaacgctgggaccctgcattttgcccgggtgactcgagatgacgctggcaactacacttgcattgcctccaacgggccgcagggccagattcgtgcccatgtccagctcactgtggcaggtgcgaccgtggcagggccctggggctgggagggccctctggggtagcaccgtgtaccctgccagccccttggcttacccctccctgcgcctcgctggtctcttttcttccagtttttatcaccttcaaagtggaaccagagcgtacgactgtgtaccagggccacacagccctactgcagtgcgaggcccagggggaccccaagccgctgattcagtggaaaggcaaggaccgcatcctggaccccaccaagctgggacccaggtagggccacctctctcccacacccgtccctcctctcctgcagcccccctccctgcgagctggccagcactatggcttctcccccgacaggatgcacatcttccagaatggctccctggtgatccatgacgtggcccctgaggactcaggccgctacacctgcattgcaggcaacagctgcaacatcaagcacacggaggcccccctctatgtcgtgggtatgggctggggagggttatgctgcacaggaagtggtgggcccagacgtttgtcaccttgtactcagcccctgtgtacagaacatggcacagaagccatttttgtggcagcggtggggattcggccgtctcaccatgctgctgcacagtcttagagtccttgctcagagccgggctgtcgtttatttaacatccaacggtcggtgtgtgtgtgtgtgtgttgtgggggagtgggggggtgttctcttcctacaatgctgcctcccaggttcctgcagcagccacacatatctctgggtggctggggaggaggaccaggtcagaatgcagtaggacaaggttcttttctccaggaggcccagagaggatgatgggtcaggtaaaaggccctgcacttaactctctgcccctgggagacttatttctcctctggggacttgtttctgcatccacaggtgaaagtggtttaaatgagaagctcttaaactttcttggtttggcagcagagttatttttctagacaaagtataatgtgaaagtttaaatggatgaaaatgaactgaggaggcccccttggtgggagccactggggtgtgtgtggcagttgggggatcctgcatggtctcccttcattcccctaatgcctcttgaggcccctcagtgtgggccattaaaaggcccctagaccagcagatcccttctacagatctgcttattgaaaaacctgctctgtgccaggcagtgcctggaattctaaacctgaagctcccaaatgctgctctccggggcctggctcacattatcaagtcacttgggaagcttaacaaataacgtgggtttgtggtagctccttgacaggtgtgcttatccgtgtcgcctgtcttggcttccgatgcaaagccagcttgggaacccctggcctcatctccttcagagtcttcgtttgaccttggtggggcatgaggacctgctggcccttgttaaagccagtgaaggtggtgaccctcccgggccatctgttaagttgccctgttgatggggttgggaggagttagtagagaagcagggcttcttttgc

SEQ ID NO: 11128 - DNA, 6000 bp, Homo sapiens
ctcactgcaacctccacctcccgggttcaagcaattctcctgcctcagcctcccgagtagctgggattacaggcacgcaccaccacacccagctaatttttgtatttttagtagagacagggtttcgccatgttggccaggctgatctcaaattcctgatctcaagtgatctgcctgcctcggcctcccgaaatggtgggatttcaggcgtgagccaccacacacagccaaatctactttatctgtgccttataaatggaacaacaaagcctggatgacagcacatctgtttataacatggtctattgaatattttaagcccactttggaggactacttctcagaaaaaaagattcctttcaaaatgttaccgtttattgacaatgcatccagtcattcaggagctctgatggagatgtataaggagatgactgttgtttttatgcctgttaacacaacattcagactgggcatggtggctcatgcctgtaatcccagcactttgagaagccaagacggcagatcacttgaggtcaagagttctagaccagcctggccaaatggtgaaacccgtctctactaaaaatacaaaaattagccaggtgtggtggcccacacctgtaatcccagctacttgggaggctgaggcaggagaatcacttgaacctgggaggcagaggttgccgtgagccaagatcacgccactgcactctagccagggcagcagagtgagactccatctcaaaaacaaacaaaaaaagaaacgaaaaaaactacaacatccattctgcagtccacggatcaaggagtaatttcaactttagagtattttattattattattatttatttattttgagatgggagtcttgctctgtcacccaggctggagtgcagtggcatggtctcagctccctgaaacctctgcttcccaggttcaagcaattctcctgcctcagcctcccaagtagctgggattaaaggtacacaccatcatgcctggctaagttttgtagtttcagtagagctgggttttccccatatcggcaaggctggtcttgaactcctgacctcaggtgatctgcctgccttggcctcccaaagtgctaggattacaggcgtgagccactgcgcctggcctcaagtatcattttagagacagggtctcactctgttgcccaggctagagtacagtggcccaatcatagttcactgcaaccttaaactcttgggctcaacccatcctcccacctcagcctcctgagtagcagtgactacaggtgggcactgccatgcccggctaattttttatttttatttttgtagagatgaggtcttgctatgttgcccaggctggtctcaaacttctggccacaagcaatcctctcaccttggcctcccaaagtgctagcattagaagtgtgagccactgtgcttggcccaagtattatttaggaaatacattccataaggctatagctgtcatagacagtgattcctctgatggatctggacaaagtaaatttaaaaccctctggaaaacattcaccacactagatgccattaggaatatctgtgagccaggcatgttggctcatgtctgcaattccagcactttgggaggctgaggcaggaggatggcttgaggccaggagtttgagaccagcttaagcaacatagtgagaccctgcctccattaaaaaaaaaagcgctctctctcccccctccccctccctctccctctccccacggtctccctctccctctccccacggtctccctctccctctctttccacagtctccctctgatgccgagcagaagctggactgtactgccgctatctcggctcactgcaacctccctgcctgattctcctgcctcagcctgccgagtgcctgggattgcaggcgcgcgccgccacgcctgactggttttcatattttttttggtggagacggggtttcgctgtgttggccgggctggtctccagctcctaaccgtgagttatctgccagcctcggcctcccgaggtaccgggaatgcagacggagtctcattcactcagtgctcaatgttgcccaggctggagtgcagtggcgtgatctcggctggctacaacctccacctcccagccgcctgccttggcctcccaaagtgccgagattgcagcctctgcctggccgccatcccgtctaggaagtgaggagcgtctctgcccggccgcccatcgtctgagatgtggggagcgcctctgccccgccgccccgtctgggagatgaggagcgtctctgcccggccgccccgtctgagaagtgaggagcccctccgcccagcagccgccccgtctgagaagtgaggagcccctccgcccggcagctgccctgtctgggaagtgaggagcgtctccgcctggcagctgccccgtccgggaggtggggggcagcccccgcccggctagctgccccgtccaggaggtgggggggggcgcctccgcccggccagctgccctgtcctggaggtggggggcgcctctgtccggccgccccttctgggaagtgatgagcccctctgcccggccgccaccccatctgggaggtgtacccaacagctcattgagaacgggccatgatgacgatggtggttttgtcgaatagaaaagggggaaatgtggggaaaagatagagaaatcagattgttgctgtgtctgtgtagaaagaagtagacataggagactccattttgttctgtactaagaaaaattcttctgccttggaatgctgttaatatatgaccttacccccaaccccctgctctctgaaacatgtgctgtgtccgctgagggttaaatggattaagggcggtgcaagtgctttgttaaacagatgcttgatggcagcatgctcgttaagagtcatcaccactccctaatctcaagtacccagggacacaaacactgcggaaggccgcagggtcctctgcctaggaaaaccagagacctttgttcacttgtttatctgctgaccttccctccactattgtcttatgaccctgccaaatccccttctgcgagaaacacccaagaatgatcaataaaaataaataaataaataaataaaaaactgtgattcatgggattcatgggaggaggacaacgtatatcaacattaacagaagtttggaagaagctgattccaaccttcacggatggaccttcaagacatcagtggaggaagtaactgcagatgtgatggaaacagcaagtgaattagaattagaagtggagcctggccaggtgcagtggctcacacctataatcccagcactttgggaggccaaggcaagcgcatcacctgaggccaggagttcaagaccagcctgggccaggtagcaagactctgttaattaattactaaagattgtgaaatgcaaacctacatctcttagtttttaaaaataggaaaattaattcttgacgttgagggatatggggcttcttactgagattaagtgggataaccataattgtcatttgtttagcttttcttcttcaagcactgtacacacctatgtaaaggcggataccaacaccatgcctgacaaacataataaaataaagatgcagaagtaacctgcccaacatccctctgctaaaagcattcaaacccaggtccgtataattataaaggttatgttcttcccactgcttccttaaaagatttattggaggactaccctaggcaaagcacttgccctaagcactctaaattaattattcaactctctcaacagtactttagtattggtattgtccctgttgtacaaataaagaagttgaggctcggccggggtggtggctcacgcctgtaatcccggctcttcggaaggccaaggcggacggatcacgaggtcaggagatcgagaccatccttgccaacatggtgaaaccccgtctctactaaaaatacgaacaaaaaaattggctgggcgtggttgcgcgcgcctgtagtcccagctactcgggaggctgaggcaggagaatcgctttaacccgggaggcggaggttgcagtgaaccgagattgtgccactgcactccagcctggtgacagagcgagactccgtcccccccccaaaaaaaagttgaggctcaaaaaagttaggtaacttgtccaaggtcatgcagccctagaataataagggaaaacagtgtgtcccaaaatggcattatttgtccgtggggcaggtatgtttgaatttccatccatccatctatctatctgagactggggtctcgctatgctgcttggactgttctcgaactcctgggctcaggccatcctcctgggatctaccggcgcgcagagactacgggcgcgcagggactaccgaggcgcgcaaccgtgcccggctccccacctcttcaagaaatggagattgcaatgcttgtgccaactagtaagcttacacagttgtgagcgaatactccacgtgagaggttataaatgacgttgcactaagggagggatggatccttaacgcaagtcaggccacaaaagcgtaccaaaacgcaactgtgcgtctgcaccagcgcgcctgcgtgcaaaggccagccgaagcagagagcagtgcacatgcgtgcagctaccagcatatgggcgtggcgaatagcgccggctaggtcttccaacctctaggtggggtgccagccggggcgggcccagcaccccggccgggcagtactttttttttttttgcatacaccagttctcaggatatcggaatccggtgcacagcagcttcttcaggtttgaggttccggatgcctgggggcggagaaacgggaggggaaaaacagatggcaaggtgggtgaccagcgtccagaaatccactggggaaacctcctcccgtttttacccttggtaccgcgagaatgggcggggtctggcttcggggcggaagcgacgggcggtcccggttccagggcggggctggagacagggagacccggctgggaagtgcaggcaaagccggctgttaccctgcacagccgtcaccctcaactttcccttcaggtgaggcgtccatggaacgacttctggcccagctgtgcggcagcagcgcagcgtggccgctcccgctgtgggagggggacaccacaggccactgcttcacccagctggtgctcagcgccctgccccacgcgctcctcgccgtgctcagtgcctgttacttgggcaccccgaggtgggtagagacgggcgcaaggcatctgtccatgtgtgcctgcagatctcacccgcggcctacatcttccggcagtgtcaccagaatagcgaggtctctggagtagggcagaagtagaataaaatctaagcattgctacttagcagcaatgtggctgttcttgggcaagtacctgccttctctgagtctcattgttgggaggtttaaatgagataatgaatttaagcatatagtgcagcgcctggcatgtttttaaaggtccgatgagtatcagaaatcatcagaattgtccattttcagctacccggactcagctgtcatgaattggaggcagaattgggggaacaacgtttttagccaaaagcgatgatgtgtttaagttgtaggctcagtttctcaccactgcaacccatgaaaccttagtgtttccagattaagaaaagcatacctaggctcagctgaagaggaagcagtagatagacaagaagagcaaaatcaaacattaagccttccccaattaagggctataaggtgtggatgctaaactcaacttgattttgtatttagttcttgtatggctagagatgactaaagttagtctcattctggctgccgagaagataggaggacggtgtggtctctgcctttgggagttcctagtctgatggggggaagtgtctctatccaagaggtctttcttgctttctcattagactgagttcccaaaagactgtgccaatttttaatagctgc

SEQ ID NO: 11129 - DNA, 6000 bp, Homo sapiens
gtagctgggactataggcgcatgccagcacccctggttaatttttgtatttttagtagagatggggtttcaccgtgttggccaggctggtcttgaactcctgacctcaaatgatccactcaccttagcctcccaaaatgctgggattacaggtatgagccaccatgtctggctagtggtgagaactgagcgagatcctgaactcagaagcttggcatatgtgtgtacccaatgcacctgtcacccacaaccctacaatagcacatggtcatcataccttctccggaagcaactggaaggagaggaagactctgcctgtgagtctatactctctagctcctctcttctgcttcctttaggtagaagtgggacaggcctttttgacctggtaagttttctttctttagggtcttacatgctgatggagatgatgatgctagtggcggctggtggggatgatgacaaatgctcatattcccaaggccttgaggtttacaaaacacttcatggacagtatctcatctgatccagcaaggcaggaattatacttattttatgaagtagaagaatgaagtatttataaaaccaaataggttgagtgcagtggctcacgcctgtaatcccaacactttgggaggcaaaggtgggaggatctcttgagcccaggagttagagaccagcttgggcaacacagtgagacccctgtctctacaaaataaattttaaaaagtaaccgggtgtggtggcgcctgcctgtggtcccagcaactcgggagactaaggtggatcacttgatcctgtgaggttgaggctgcagtgagacatgatcatgccatggcactccagcctgggtgacagagtgagaccttgcctcaaaaaaataatataaataaaataaataaaaataaaaaacaggctgggcgttgtggctcacgcctgtaatcccaacactttgggaggccaagacgggtggagcacctgaggtcaggagttcgagaccagcctggccaacatggtgaaaccccacctctactaaaaatacaaaaattagccgggcatcgtggcgggtgcctgtaatcccagctattcaggaggctgaggcaggagaatcgcttgaacctgggaggcagaggttgcagtgagccaagatcatgccactgcactccagcctgggtgacagagtgagactccgtctcaaataataataataataaataaataaaaattaaaaacaacataaaacccaggctataaacccaaagagatatacccagctatctcatagaatttcatttaatctgagggaggaaagcaggtggaggagagggtcttgaagtaagcatccaagggggaatgccacccagctgtgtccagctgtgcccagctaggagatagactgtgcctctacttttcttcccccaggagagggcccacaggggcctgcttgggtcctagtctccctgtcccagccactgagcatgcctggtgctcaggtgtgtgtgcagtctgcagactcactgcttctgaggtttaggcaagtgggtctcatatattgtcctgttccagttactccttccagttactcccacttactgaggctacagcggagaggactggagcccagaagagtcaacgttcttaaggaaacacaattagaaagtgcagtctgggctgggcacggtggctcaggcctataatctcagcactttgagaggtcgaggcgggtggatcacttgagctcaggagtttgagaccagcctgaccaacatggtgaaaccctgtctctactacaaatacaaaaaaattagcctggcatgatggcacactcctataatcccagctacttgggaggctgaggtaggagaatcgcttgaacccaggaggcagaggttgcaatgagccgagatcctgccattgcactctagcctgggcaaaaagagcaaaactctgtctcaaaaaaaaaaaaaaaaaaaagaagaagagaaagaaaagagaaagtgcagtctgggttccaactcgagggaaatcctgcatatgttcccttccctctcctccccctagactgggaagtgggggccagcccagctgcccgctcccctcaatataccaggtgccagaacacagctgtttcttcattgttccccaacccaggcggactgtaattggtggggcagagcagggcggggctacccctgtgctgaatccagtggggctatctccactccaggcaaatccagccagagactgattctgagcagcagttctgcccggtgagagctgccgtggattggtgggggtaggggactgagaggtcagggagtgtcaggtcagggtggatcaggagccccaaaagaaaaattgagaattgcctggagaagaactcctgctagactgagggagaagggttagggaactccaggggcattgaggctgtgcaagaggagggggtgactagaggaagggaggggccagggagcagtaggaatgcctggagctgggaacggcaagctgtaggtcttggtttactcttgccttggttcagtctccccatctgtgctatggtgagaaccttcctgcctcagctgccttgccaagagaaagggcttcatgaaagcaaaaatgacctacaaattgaggtcaggagcaggaaggtgtaaactgaagggagggggaactcctgcccaccccatgtccttgccaggtgaggcagaaccaggacatgcaagcctaaagtctgtgttgtcttcccaggcactgactcactggccctgccatgcccacgccactgctcccgctgctgcttcgattgctgctgtcctgcctgctgctgcctgctgcccgcctggcccgccaatacctcctgcccctgctgcgccgattggcccgccgcctgggctcccaggacatgcgagaggctttgctgggctgtctgctgttcattctcagccagcgacactcgccagacgctggggaggcctcaagagtggaccgcctggagaggagggagaggttaggcccccaaaagtgaggccacaagtcctggcagcagctgtatccacaaaatgctttcttttggagtaggataatcctggcaccagcactgaccgaagcctgcccagtggacagaagatatagtgagggttgtgcatgagagggatctgccacagacatgcctctccactcccaacagaaatgtctttctggaagaatgccttgcatctagcacaaaactgattattgcccctctgtcctccagcagttcctcccaaagaccactcctaatcacctctggcctcaggcgggaggggaactaacacccacccacccctgccctccctgcaaatgggaacatcaaggttcccagtgcttaactgagggacaagtgacaatttagcagagaggcaagatttgaatccagactgtcttccagactcaggacctaccttaaaataatatctgagttgcttatggaggcagacctgcctgcaaagcccagcactcagcaagtgctcaataaatatttgatttgaattctttccatggctttgaaagtctaatcacccagactgctgctctgcaaaacagtttaacctggcctggcagttggtgggggtgggggagaggagagatggacaattgtacaagggtttattttgctacctattccatcgtggtttcagtcctcacagcctggaagttgtttccccctgctaagtttcggtcagtatgtcacactgtgacccagaaatggcttgagtccatctaggaggaagtttgcctggctagctcacagtagggaggaaaatatcctccagcgagtttgaggacttctcagctagtggtggtgggaagaggggtgatacgtttgctaagagactgggtgggaggccacccagggaggcagtgcagaaatgcatccccttgagggtcatcccaccctagaagagactagggttgggtgagttgccttaagaactgacttcatcatttcctcctccctagtgggaggcccctcaggggtcaaataagagcctcagaagagtcaacatgcttaaggaaacacagttagaaagtgcagtctgggcagggcgcggtggctcacgcctgtaatctcagcactttgggaggcagaggcaggaggatcacctgaggtcgggagaccagcctgaccaacatggagaaaccccgtctctactaaaaatacaaaattagccgggcgtggtggcgtatgcctgtaatcccagctcctacggaggctgaggcaggagaatcgcttgaatccgggaggcggaggttgcagtgagccgagatcgcgccattgctctccagcctggacaacaagagcgaaactccgtcttaaaaaaaaaaaaaaaaagagttagacacatttgcatcccagcctccggataatttgcttattgttcccaggcaataatcctctctctctgggtgactcttgggctctatctaggttcagacgaggacagtgaggagtacaggatccaattgggattccagtcccctccccacacccgtcagaaggcttggttgggaaagaagtgagccccaagctatccgccccacccccagccctgcggggctttctgcctgccacacgccgtccctgctcactaccccatcggtttccttcgggagtcttcaaagccagtgcacgtgctcccaggtctcagggaggcgacccagggggaggggcagagagaagggggtccgagcccttgggcccctaaccccgtccctttccggagcctcgggtgcccaaaggcgccggccgccagtcccaggcccgaagggcccctcccactgagtcggctctggtctccccgcccctgagccgcgaggactggacgcagctggctgcggagctctgggcgggcgctggggtcgcctgttgcagcctctcttccgcccggcggcccacaccggtcaggcccggcgcgggctgcgctctccagctgtggctatggccccagccccgagatgaggagggagagaactaggggcccgcaggcctgggaatttccgtcccccaccaagtccggatgctcactccaaagtctcagcaggtgcgcggggcggggccggggggcctggcggggcggggtggggtgggggcgaggtctgcgccgttctcacgctgccgggcgggacagggggccagtagggggacccgctgggctacagtgtctcaggggagtcagaatctttggtttctggatgcggggccacttttctgggccttcgaaggccattattagatgactgcctccccaaactccccagccacttacagatgtcccaggaacatagggtagggggaagaggtctggaaaattagcctagaagaccagcccagacctaactgaacaaagaatttagtcttctcgaaccccgagccagtacccacactgtgaacacacctgtctttacttaaaaaatcttgatgttttattcatcatggagtctttaaaaaaaaacaaaaaccgagtctcgctctgttgttcaggctggagggcagtggtgcgatcacagcctactgcagcctcgacctcatggactcaagccatcctcccacctcagcctcccaaaatgccaggaccacaggcatgcgtcaacatgctcagctaatttttttttttttttttttttaagagacagagtctccctgtgttgaccaggctggtcttgaactcctaagctcaagtgattcttctaccttggcctcccaaagtgctgggatgacagatgtgagccactgcacttggcatcatggagtcttgatttgtagacattgcattaaaacttattttggtaagggctgggtgtggtggctcacgcctgtcatcccagtgctttgggaggccaaggcgggcggatcacaaggtcaggagttcgagaccagcctgaccaacgtggtgaaaccccgtctctactaaaaaaaaaaaaaaaaatacaaaaattagctgggcgtggtggcacgtgc

SEQ ID NO: 11130 - DNA, 6000 bp, Homo sapiens; identical to SEQ ID NO: 2441

SEQ ID NO: 11131 - DNA, 6000 bp, Homo sapiens
ggtaatggagagttgagaaggaaaatgaaatcatgcatatgaaaatatgtaaatggttaaagcactatacaaatagaaactcttaataaccattattaatggtggaggaaggctggaccaccacattctggaccatcaaccctgcccctcagaaaggagtgttaattcaccaaaaggtttgttttgtttttgaggtggagtcttgctctgtcatccagtctggagtgtagtggcatgatctcagctcactgcaatctctgcctcccaggttcaagtgattctcttgcctcagcctccccagtagctgggattacaggtgtgcaccaccacacttggctaacttttgtatttttagtagagacagggtttcaccatgttggctaggctggtctcaaactcctgatctcaagtgatttgcccacctcggcctcccacagtgctgggattacaggcatgagccaccgcgccctgctgtattgcttaggaaataatgataattttttaaaaagtctgtacatgtttggttcagatgtaaccacccatttattttcttttgattattttctatctgtggtttggttgaatccagggatatagaacccacagatatagagggctatatttttcttttactagccgcagcacttattgtactgactgatgagacaaatacattccttttgacccattccttaatttacattttactttagtttacacatctcagaagtttacacacttcaagtacttaaagtgacttgaagttttctttttaatcactgacaattttaaaaaattatttcttcatgaatatacacatatacatgtacaatttctggtgggttttttttttttttttttgtcaaattgaccctcaagttgatggttttagttttaagtgttggttcatggttttttgacatatgtgcttgttgttcaccaacacttgactttgttttagttacttttcagatctgacagttttcacgtgtattcaattcctttgctaatttgagacagagatcaaaatgaactagtcttaaataatcttggtgtttgtccatgctggaccacgcggcttctctctgctagttaccataagggtggtcataaccactcatcattctttttatacctatttattccttgcctaatcaggatttagaagcaatatttcaataatttactactgactttcctttgggtcattagaagaaaaatggtccctgtagaaacaatcttgtaaataaatgatagtgtagaaacgtttcctgcaggctacaaagtgacctcttgaaatacactaaattggttcttatctgtcgggacattcagatccttcctttatttcactttggaatagaagaataaattgggaaaaatgtgctctgcaatcctctgccctgccttagagtatgtaaatagcatcatgcacaaaaaattttcaagctgtcaggagtaaagtaagtatgataatttgggataattaaatgcttaagacaatcaaaatagaactgatcctagtaagcttttctcacttggaggaaacttctttaaaaagtatttactgatctaaatgtctttcaataaggctgttaaataaattgtggtacaacaatctacagtttgaaatatttcagtctttaaaaaaggagaagcatacctatatgtatgcacacagaaaaatagatggttgtttttaaaaaagaaaaaatgcgaataattcatatactatgatcccattcacataaaaaatagcagaaacaattgaaatatttataaagagagagggcattgactggaaagatacacacaccaaaccgtactcaattctgcattgagagcttttgcttccgtgtctatgtctttcgtttaccagattatcaactgctgtattgccagatcaaatacaggatactcaattaaagttgaatttcaactataagcaacaaaattttgggtgcatttcccaaatattgcatgggacacacttaaaaggtattcattgttttgttcattaaaaggtattcattgttttgccagatttgttaaatctggcaactctaccttaaagagactttaaattatttatccttgtattcctattactaacatagttacagagatatagtggattacaataaataacatgaggggggtaatttaggagagaactatcaaaacagatgattttgctaagtatgtgacatatttatctcaattttcatggaaatatcttcaaatttcattagtggtcctattatagaagacacacagcaggcaagtgtcagagctagaaatgaccctaaatttctgggtccctattcagcagccataagcaattgccagctgcaggaaggtggaggcagaagaagtaaaaagggaacaagaggtgaggtttacgttctgcctaagtggaacagagtagaactttgcacaaactccttaatcttgcctagaggcagaatgtgggatgtactatatgggaggcaggcaaatctgggcctggttcccacctccatcactcatttgaacaagttatgtaatttatttttgcgtcaattttcttgtctgtaaaactggagtgagaggacctaacttgagtaccgaagtgaagagtcaatgagataatatctgtgatcagcacagtgcttggcaagtggaagacactcagtcaagctaacttaaagccccagttttttcatttgtacaacagaacaacaacaataatagcaacaagcaataatactaacaatatttatcttgcctctgagttgtcttgaaaatcagatgagtatatatattatgtttctaaattctaaagtgtatctcactctcctaacaaagcagttggtcttcagatcaggaccagagttaataccatgccagagcattattacaggttttttccaatgagtaattaattttatttttaaacttatcatacagtaaaattgactcttttggtttacaaagttctatgagttataacacgttgtataggtttatgtaaccaccaccacaatccggatacagaacatgactacagctttagagattctttttcaaagtgttttacattcatgttgcaaaacacttttaaaaataagaaaagagatgtagataaacgtgctgaagatgcaaattaatgaaaccagcttttgtgcacaaatctctgcagtttccagtgttttcagcttttgtctgagccatttttgctgtcggctttgcagactatctctttctataaaagtaatcaggcgtccgttggagagttggggtctttcttcacactaaaggcacatgtcccaggcacaagcctcaggatccttatttgatcttttttaatacgaccaggtcttaaatttccgaaccatgttttccctaattgccattttctctctaaaatgaagaagcctggaagaaccttcttatcccttcggggaaattatttaattgggacaaaggggatgtggagttacagagagcaacgatagggctttcagaacccaaaacctgtctggtataataacagatccttccggtaaccaaccattcaatttgtccctctccccaaccccatcctctccatcaccatctgccagatgccccctgggacaatcgactttgaaaccaaacttctctcccaggtcagctcctgcaatccccactcctcatccttggagctttctccacagaagtgacttgacacaccgcgctacatctggggaggggggcgggtccgctttccgggagactcaagtctttgctatttgccttttgtttctgggatgcctttggctgcctttctcttccatctgcttttaattttggtaagagaaaagctaatgaatcaggaatgaatctcctctccactaatcttttttttttctttctctctctctctctcttaaagttggcgcgctctcttcacaagttccatcactacccaagaagtgagggggcgggggggacaggcgggaaggcattaattacacctaaatctgaagtttgcggcctcaagtaccactttgatggggagagcttctgaagcttccatacaacctgccgtgcctttgctgctgccgcagtagattttcagctcatttctttctgctgctgcttcgcgctgctctgtcatgcctaaatctatctcgtcactgccaaaggtgcctgaatcagggtgaattccacgagattcaccagcggttttgctccagtccaaggtaaatacagtatgcaaaatgaggaaccacccaaggatgtcggggaggggggagagaaagggattccctcaccttttccggcacattcctcgttaatttccaccaggaggaggcgcgcagcccagctcccctagtctctcttcttaaatccccctacctacggctgccgaggttggccgcgcgtcgggaatctccccgacagtcctggccctcccccgccccccgggttggtttttcccagctgcggaggttgggaggttgggccaggggctggggtgcgaagagagtcggcgcccgcaacgcggagccgggaagtcgtcgctactctggtggaactcagagttggttctggaggcggcggacgcggaggtgagcagtgggagcccgcggcctgggagagacccgggaggcgtcgttggggcccctccccatcctcgggtggagagtagggttggttcgggttgccactgtaccccgagtcccactgctgctttgttcccagactctcccctcctctttggagatgacttgaacccctttgagatccgaggggctggcggggcgcgggctggggggcgacagttgtagctccacttcctgctaatgcgagaaggtacaaaaagagatcaaaaagtcctgtaacctgaaacttccctcgcatcctaaccgggacctggtggagaggtctgggcgggggcggagacacccggaggccgaccttccgccgaggcggtgcaggaaggaacgggagagggagaagtttggtagggaaggaattggggattaagcggtaagttagacgcgggagacgagtctcctcgggaaaggcggagggcgggaggccggtcgggtttatttagtgtgggccagggaagaaggaagactttgcggtctgggtgtcggatgcgcgtccccctccggagtaaaagtgaccggaggggttggggaggcgaggccggggcgggcttttggaaggaggtctctgggacagactggagacgactagactcgaaaaggccggtttttgcactccggaagccgcggcagccaccgctgttcacgcctctctcctgcttgtcccaggtccctcagaggatccagcgaggggcgccaacaagaggcgaagaggtggcaccagggcggcggcaggaagaggagcgggagcaggagcgcggagcggagcgtcccgacccgccgtgcgtactttctggagggaaggggcgggggaatcggcccctgagggaagcgcccggtggcgagggggttagccaagttccggctgcggcgccactccctcggttccacgagaggaaagttttttttttccagacgcttccgccggctcgcgccctccgggcccagcctcccgagccttcggagcgggcgccgtcccagcccagctccggggaaacgcgagccgcgatgcctggggggtgctcccggggccccgccgccggggacgggcgtctgcggctggcgcgactagcgctggtactcctgggctgggtctcctcgtcttctcccacctcctcggcatcctccttctcctcctcggcgccgttcctggcttccgccgtgtccgcccagcccccgctgccggaccagtgccccgcgctgtgcgagtgctccgaggcagcgcgcacagtcaagtgcgttaaccgcaatctgaccgaggtgcccacggacctgcccgcctacgtgcgcaacctcttccttaccggcaaccagctggccgtgctccctgccggcgccttcgcccgccggccgccgctgg

SEQ ID NO: 11132 - DNA, 6000 bp, Homo sapiens
ttactacttaatttttacatttctggtggttgatacaaatgcaggcttcataagaaaagcctgtattaagcccatagaaaaaacaagcatgcctcccacctatcacaagcatttagaaagttgccgtctggtttcttggggcttttgcttgaaggatccataaatgctaaagaaagactttaaaaattttgatagtgtgacaatttctacttgatttatacatgtttattatctaataccaaatgtgcttgcctatctaaataatttatttttacattgttttacccattattatattaatctttttccaaataatctcaaaagtagtttaatatttttattgtaaaaattatttttaagtatttaaatttttgagtcaaaccagctttataagtgatgaaaaactcatttgggattaatgtatcatttctgggacaaaaaatatatagtgcaatgaaatcaattttgataactaaatgtttatattaaaatgaaggaggaagtgctttctggactccagatatatgtacattagtaacttttttctcctgttatacaataatatagtaaactaattacttaaagtctgaactcaggaataattatttatgagacaggatgagatgatccttttaagttcaatatttctgtatatatttacatattttctgtgtttctactgccataaagaatataaataaagtttattgcaatgtgtgtttgaatattgtggacgttgaacgtaatacagtactcctaaatagtactctgattttactaaaatcatagtatcttcaagagagaagaacataatttaagctcccatgtttctcctcagaaaataaggatggaagcacatgccaagtttgcagttctttggcatctaacgagagatctccatataaataaatcttcatcttttgtacgttcttttgacaggtcagttacattttatattaagatttcacagtcatatatcttaatgttgcctctttccttgagtccactgtctagcttggcaagtgtaggagatagcaatttacaaattttataaagagaatttattattttgaaaaccgtaagctgtattaaaatgcatggcatttttactcatccaccaggtttttactttctggttttggagtacccggctccacttcccttccttggacaactattcatcacgttcctgataatgttagtgatagagcaatggatacagctctcttgagactatattcacatttagtgaaactgcatatagatagtagattatgtgtttctcaagcaattattttcaatcttctgcctaaactagatttattaaaatctatagctgaaaacactaacagattctttccatgaatccagagaacttgtagctgcctgagagtggttttggtttttgtctggactacgtaggtgacttcaaatatcagatctgcattaaattccaaggagctgccatttttaggtggattcatatattgtcataaggtagtctcaccagttggtctcatactggtggccatgaatctatgttcaaggtcagctcaggatcagatgtgtcctctactgaacgttatttcagctggtgcttttcaaccagcattagcattttaagtcatctgatactgaaccatatattgaacccctacaatgtactgaatatattgaacctttactttataaataatcatctcttatttgacaaccatctttcctaattttacaagtgagggaatagaggtcaggaaaagttgttacttgcccaacaccacacaaaatatttgaatcttgggtttttctgattccaaaccacactttcataccttccacagatctttccttgaattaagcacagagctttggctcacaaggagagtgtgagcagaggaacatggaccaacatggagtaatgccgacttgccgaaggctcagtgcttgataatatgaacaggaaaatgttgctaaaacaagactaatcatattttttttcagttcttcagtattaatcttagtaatgtatgcctgtgaaatttcaaagcatgagtatatttttaaaagggcaaaaggtttttttcctttcttatacccaccgagactattgggattaagattattaaaatactatgatcaaaatttatcctgaagtatgactacttcaaaatagttaattcaaaataagaaacagaatttattaattttataaaagagtgtgacaaggtagatgtttggttctttattttaattatttgtgtttattttaggtcactgttcatcatgttagatagccttaacagtctcgatggttctactagctctgtgggacaagcctggctgaaccaagtcctacaaagacatgatattgcacgagttttggaaccattgctattgctcctgcttcatccaaaaactcagagggtttcagtacagcgtgtacaagcagaacgttattggaataagtctccctgttatccaggagaggagagtgacaagcatttcatgcaaaattttgcctgcagcaatggtgaataacacatagaagtagacagctttatttagaattattaaaataaagtgatacatgaatacaacagtaattgttgaaagaactgcatgtgagattttctccatgggcttattttctcccctcctcatgcactagcaatgctgtgtggaccatgtcagaatgtactttgtcaatgaccatcttagaggatgtgggtctctcagttgactctttcagggcaggaatcaggcacagctctgattagagacattcttcaattttgatggaaatatctttagagcttagttagcaattctggtcctacaggctctgtagatacttcattgggaatttatagtaaatctgtaatgcacattttgtatttcatgagtcattttcctcatcttttaagagaagaataatgctcaactttcaaggttttattatgaccatcagatgtagtcatgtttgtgacatgcctaaatattcactattactatattactacaaagtccatactttatagttgagtgatgccttctatacagtgatattgtccccttagattaatttatttcatttaagggacaaagactctcacatatgtcatttgtctcttgacaaaccctgtggtggtaatgaaaagatcattttactgagcaggttgctgatgcctagaaggctatggctttctcagagtctcatggctattaagtgatgaagctgaaaccaaactgtcatagtcctacttcatctctagtgtgtttctacagagtcttggttcctctctctggcttcttttctattccttcttctgaatcttgtaagaatttgcattaccctgcttattgccagaatgtctttgtgttaatgctttatctaactgtctgctgaattctcacctcccctctgagatcagtgccagacctcatcaatggtatcatgattctttccctaaatttgctagcatttggtatgtactactttgtatgtcactaagccttccaccttttctaaaagaagaccgtcattattgtatgccccctaaaaaatacagaaatgaattatgtatttgtggtttgctgctaattttaaagtctttagagagcttagaaacagcataactaaagtgaggtattaaggaggaaaaaacaaaactttcacctgcaataaaataaaatgtaattttaggaaaatataagtagatgatgacactaatgattaaaaattttgatcagtctacatttctacatttcaattattttaatgcattttgtatttttcttcttttactgtttttctcatatatcagtgagccaagtacaactcatcacatcaaaaggaaatggtgaaaagccacttaccatggatgaaatagagaactttagtctcactgtgaatccattaagtgacagactttccctcctaagtaccagcagtgagacaattccaatggttgtgtctgattttgatcttccagaccaacagatagaaatacttcagagttctgactcgggatgttcacagtcctctgctggggacaacttgagttacgaagttgatcctgaaaccgtgaatgcccaagaggattctcaaatgcccaaggaaagctccccagatgatgatgttcaacaggtagtatttgacctgatatgtaaagttgtaagtggcctcgaagtggaatctgcatcagttacatctcaattagaaattgaagctatgcccccaaagtgcagtgatatagatccagatgaagagacgattaaaattgaagatgactccattcaacagagtcagaatgctttgctgagtaatgaaagttctcagtttctgtctgtgtctgcagagggaggccatgagtgtgtggcaaatggaatctccaggaatagctcctcaccttgtatttcaggaaccacacacactcttcatgactcttctgttgcttccatagaaaccaaatctagacaaaggagtcacagtagtattcaattcagcttcaaagaaaaattatcagaaaaagtttcggagaaggaaacaatagttaaggagtcaggtaaacaaccaggagcaaaacctaaagtaaaacttgccagaaaaaaggatgatgacaagaaaaaatcttcaaatgaaaaactcaaacaaaccagtgtattcttcagtgatggtctggatttagagaactggtatagctgtggagagggagacatttctgaaattgagagtgacatgggttctccaggatctcgaaaatctcccaatttcaacattcatcctctctatcaacatgtgctcctgtatctccagttgtatgattcatccaggactttgtatgctttctctgccatcaaagccatcttgaaaactaaccctatagcttttgtaaatgccatttcaactactagtgtaaataatgcatatactcctcagttgtctctccttcagaatctattggccagacaccggatttctgttatgggcaaagatttttatagtcacattccagtggactcaaatcataacttccggagttctatgtacatagaaattcttatttctctctgcttatattacatgcgtagccattacccaactcatgtcaaggttactgcacaagatttaataggcaatcgaaacatgcaaatgatgagcatagaaattctgacactactcttcactgagctggcaaaagtaatagaaagctcagcgaagggtttccctagttttatttctgatatgttatctaagtgcaaagttcagaaagtgattcttcattgtttgctgtcatctatctttagtgctcagaaatggcatagtgaaaaaatggcaggtaagaacctggttgctgtggaagaaggtttctcagaggacagccttattaatttctcagaggatgaatttgacaatggcagcacgttgcagtcacaacttcttaaggtgcttcagaggctgattgttctagaacacagagtaatgactattcctgaagagaatgaaacaggttttgattttgttgtatctgacttagaacacatcagtccccatcaacccatgacttctcttcagtatttgcatgctcagccaatcacatgtcaaggcatgttcctctgtgcagtgatacgagctttgcatcagcactgtgcatgtaagatgcacccacaatggattggtttaatcacatctactctgccttacatgggaaaagttctgcagagagtggttgtttctgtgacactacaactgtgcagaaatttagataatctaattcagcagtacaaatacgaaacaggattatctgatagtaggtaagaggtgatttttaactttattggtactgacatttttcacatatatgactgcttaatgtctggaaagttggtcacaacttgagtaaataaagtaatggtttttggtaggttacaaatagtgtattactttccacaaaaaagaaaatttgacttgaggaagagtatcagtaaaagaatctagaa

SEQ ID NO: 11133 - DNA, 6000 bp, Homo sapiens
actgcacttcagctgggcaacaaagtgagactgtctcaaaaataaaacaaaagaaatgttacacaacattactaaaaatatatcttccaaagtaattactgaaagagcaacacttatttgacatgtttgttaaaaaatattctttgttactttgcagttatatttcactggcatagataggatttctctgttagacgcctataaggaaatggctaatatcaagtaaaatttctctatgatgtatatattattagagcttctccaaaataaagaataaatcagagatagagatgaaagaaattatcatccaaaaagtgctgtgtgaattgtgaataagaaaaagcctgccagggctagaatgaaaacagtgtgacaagattgtgtcttaatttactttacgccattaaccttatttttcttctttcttcattatttttttctttatttcttttgttatgtttcacaattgggtattttttcattaaaaataactattgggattgtgggtatacaggctagagagaacacacaattggctcatttaaaaaatgttattacatttttgataatgggaataacaaaatatttactgtgggaagttgaaagtaatattctgaggcccagtgagggtcactgatactggggagaaaacaatcaagagccatgcagaagtaaaatgcaatggaatgtagatagtttccttttctttctcctccctccctctctccctcccctcctgcctccccctctccattccttccttccttccctgtttcacacaaataagaagggaaaggagaaacacggatgtggggtgatggcagaggaagcaatgatatggttggaaaagctatgggctagggttcagaagagcctggtctgtgtccttagtgaactaggtaacctttatgaaatctcacaccttctgtggacctcagtttctcctcaagaaaatgaaaaggatcaaccaggaggtctgtatggtcccttccagggtctcccaactctgggtctaagaagaaagagggtgaagtagaaaagtagaagagcttttggggccatgagtttcatattcctctctggataagtgaattctgacgatttctgcttactacattatttctacttcattattttctgggcagcagcaacctgcattacctcagatgaattctgtagaacttcccttcttccattcaggagtggagaccacatgccttaaatcccagggtaacactggcacttaccagtcagaatccttttccgatgacttcattgacttcattgcctaccacgctttgcctcgtttgctccacttcagtggcactggctttcttgctgttgttgaacagttgaagcccactttcacctcagagcctttgcactcttggaaaaactctgcctcccaggttgctaatcgccttgctgcctcattttattcagccttccctaatcactcaatttaaaatatcaattgcacacttcttccttttactatgtatttaacctgctttattatttttttcatgtagcacatgtcactctgtgacctatgatatatttgtgattttttgagagcagggaatttgttatcttctatagccttagcaccatgaacatggtcaataactatttgttggataaatgaaagaataaatgagtaagacagtgttgctctttctaatacaacttccacaaactatgtggatatttaattatctatagtctatgtagtatctttttacagtgaaaaatatttgctaatatgcaaatttgagttttggaaaagatgtcccatttttgtagttcttactgggttattttaaacatagtccttgcagtagttagttgaagtagctttgaaaaatctaccagatgagtaagtggcttttcataaaagatttttacaattattatatctggatagtggaaagtatttttacataaaatacagtttaaaatcatactttaacataaaaatataattagtatgtatttcacatatcatttaaaaatgtataaattaaaatgataattataacattttagcaaaataaaagcataactgatatgttaaaaatggagtggaaggggctgggcgtggtggctcatgcttgtaatcccagcactttgggaggccaaggtgggtggatcacctgaggtcaggagttcaagaccagcctgaccaatttgatgaaaccccgtctctattaaaaatacaaaaattagctgggtgtggtggtgcacacctgtaatcccagctactcaggaggctgagacaggagaactgcttgaatccaggaggcagaggttgtagtgagctgagatcacaccactggactccagcctgggtgacagagcaagacttcgtctcaaaaaaaaaaggagtggaagggccaggaacagtggctcatgcctgtaatcccagcacttcgggaggccgaagtgagcagatcgcttgagtccacgagttcgagaccagcctgggtgatgtggtgaaaccccatctctacaaaaaaggttagctaggttgggagacacatgcctgtagtcccagctacctgggagggtaaggcaggaggatctcttgagcccgggatgttgatgctgcagtgagctgagactgcgccactgcactccagccaggttgataagacgcagtcttatcaacttatcttttgagacacagtctcaaaaaaaaaaaaaaatggagtggatgaggaatggctctatggtatgttacaaacacagagtaacaatatttctttttctttttctttttttttttttttgagacagtcttgctctgtcacttaggctagagtgcaatggcacgatctcagctcactgcaacctccgcctcccaggttcaagctattctcctacctcagccccctgagtagctgggattagaggtgcacaccaccacgcccatctaattttagtatttttagtagagacggggtttcaccttgttggtcaggctggtcttgaactcctgacctcaggtggtctgcctgctttggcctcccaaagtgctggaattacaggcgtgagccaccatgcccagccagaataacaatatttcataagtgatcaagacatttcatatctaattctttttttattttcaggaaatccagcaattggaattttaaaatataaagaaaaatattacacattcaatagtaaagatgctgcatattcatttgcagaaaatcctgaacattatattgacatagttagagaaaaggccaaaaaaaatacagagttaattcaactattggaacttcatcaacagtttgaaacatttattccatattctcaggtaagcagggtcaatattttatgaatttatgacatttaaaaatatagttaatttaaaagttgtattttgttgtagaatgcttcccaggtccacacagagagagtcagatgagggtctttacaggttgtctgaaagggattcatatctgaagatgaaaactaattgaatcaaagaataatgaaaacaggatatggagtcaaattgatgaattaggaaatggggaaaatctgaatcagaacaacttcattgacttataaataattgaagctgcagtatatttctgtatctgaaattggaggagctcaacacagataacacagatagtaacttatactcagagctgcaaaacaatttaacaggtttaaattgtagtagtctgaaaggccacagaatggatctcaaggtgggtttcttgtatgtctgtgcctattgattaattcattcatcttatttagtaagccacttattgtgtgtcagtaattattcttggcataagggatttcatgaaacaaaacagataaaaatctctaccggtttggaactcacatttgaatgccgtatattctaatgttcttcctctttgtctctcattttcgttgttcatctctttttttgttctttttagaggcaaggtctcactctgtcacccaggatggagagcactggcacaatcatagcttactgtaccttccaactcctgggttcaagggatcgtcttgcctcagtctcccaagtagctgggactacaggcaggtgccaccatgcctggctaatttttttaaaaaacttttttgtagagatggggtctcgccatgttgcccgggctggtctcaaacttgtggcttcaagttatcctcccgccttggcatcccaaagtgttgggattataggcacgagccaccatgccaagcctgttgttcatctcttaagtggtctttctttctctcctgtctcttgttgaattcctctcttttaaactcactaaaatgaaaacattttgaaatacatggtttaaaatgtctgttgtttcctttttttttttttttttttttaaccaagtcttgctctgttgcccaggctggagtgcagtggtgtgatctcagctcactgcaacttccgcctcccaggttcaagcaattctcctgtctcaactttctgagtagctggaactataggcggacaccatcacgcctggctaatttttgtatttttagtagagatacggtttcaccatgttggcaaggctggtctcaaactcctgacctcaggtgatccacccaccttggcctcccaaagtgctgggattacaggcgtgagccaccacgcccggacttgtttgctatttttatcaacattttaactctaaagcaggtgggctttgtgccattgacctggccagcagagatccaagcagtaagtagtgagaggactgttgggctggtgacagaggagcacagaggatggtctgaacacacaggcaagaagaccagaaacaagctagggactaagtcatctgaggagggtggggggaagtatggtagtcaggaccatggacagctcagttggtgctgctattctgacatcgtgatgtgctgtgttctgacattgtgttattctgacatcgtgatgacatcgttgatgtagcactccagctcccctttccaatgaagctattctgcagagtcctaggttcctactgttgtgatgagagattggtctcgtctacagtgcctttctgtatgtgagccaaatagtaggtaggcctacaatttttgtttccactaaaaagttactctgaaaatgtactaatttaacttcattataaggcttgtcagttacccataatcctgcgaggacgtgttaatacctcagtttgtaatatttgccaatttgatgaatttaaaatggtacttattattgtttgtttttttttctgagacggagtcttgctctgttgcccaggctggagtgcagtggcgtgatatcagctcactgcaacctccacctcccaggttcaagcaattctctgcctcagccttctgagtagctgggattacaggcgtctgccaacatgcctggctaatttttgtatttttagtagagacggggtttcaccatcttggtccagctggtcttgaactcctgaccttgtgatccacctgccttggcctcccaaagtgctgggattacaggtgtgagccactgcaccaggcccttattactgctttattgtgcatttttctgatagtgatgtttagcatttcttcttatttatctgttcaggtttccccttctgtacattgcgtatttataacttttgccgtttttttttccatttgctgtttctgtttttaagttgttgattggcagttccttgtctattctaaatattaatcctttataagttataaaagttgcaaatgtcttttcccagcctgacacctctgttaactttgtaagttgaatccttcattgaagacacatctttaattttaatgtagtcatatctattaattttttcctttacagattgtgctttttttaaaatcttattttagaaattctcctctgtcctaggattattctttacattttatttttattttatttttatttttttgagacagaggctcactctgtagcccaggctggagtgcaatgacatgaacatg

SEQ ID NO: 11134 - DNA, 6000 bp, Homo sapiens
cacacatctagagtctaacccccttctatctccagtataatcaccttaaaatgtacaaagtatataaaaggtaacccaaaattaagtagtgctctgttaaaatgcaagtgaaagatttaatgttgaaagtgtttagacgttttctaatgactaaaaggggaaatagttatttaggaatggcattgcaaatctttttgacattttcccatttgctcattaaatctttctgagaactaggttattttgttctttttcctccatctgagttttgtcattcaatatttatctgctgacaactatgcaaaacattatgctagatgggctgggtgcggtggctcacgcctgtaatcccagcactttgggaggctgaggtgggctgatcacgaggtcaggagatggagaccatcctggctaacatggtgaaaccccatctctactaaaaatacaaaaaattagccgggcgtggtagcacgtgcctgtagtcccagctactcgggaggctgatgctggagaactgcttgaaaccgggaggcggaagttgcagtgagccgagatcgcgccacttgcgctccagcctgggcaagagtgggactctatctcaaaaaaaaaaaaaaaaaatgctagatgcaatgaaccatgtaaaatgcactgcatctccactttcacaaagtttccaaactactgagaggaaaagagtgaacatgggaaaaacatgaaaatataatctctgtattttattttactgtatcactctgttaattctttgtttgcttatcagtccttccccagttccccaaagaagggaatggactttatcttcttactctttttctctatttgtggaattcactgtaatgaataattatgttaattttctagaacagaggtccctccaaagtacactaagtgcataaagaaacatttatctcctctatggggaacagaaagactttggcagaggaattaccaagggcaggccttgaaggatttgacagaagagaacagtgaggaagtttaaagaaaaaaaggaagtttttacagatgagaaagtatgaaaatagaggagtacatcacatatgataggtactccctgcatacaagttaataaaaagaagagcctgaataacctgagaatataatttatggagacagaaatggaggatttgagcaactgaaggggaggttgtgctgcataaactacatggaaaaaagtgattgagtaagcagttgcaactgctaacgttttaaggcaaactaccttggaaggtaccaaacataccgtgccctgctttcttctctttgggataatgtctattgtgtccatttaaggactttaatgattctgtaatttttagttaacatcaatttaaggactttaatgattttaatccattaagaactttaatgattttaatccattaagaactttaatggattaaaggactttaatgattccataatttttaattaatatgaacaacttcattcaagcattacatttatgggtaaggtgaaaaataagaaatctagcagaacaacatgcttttattttaccatcatgcataaaaaggaagacaaatatgccaatggtacacttccaatttgtcagagcaatttcacagtatttaagcaatttaggaaaaaagatatatcacttactaagttgttaccagggaaaattatcatgtaagacaatcaattaaaccatacttttgtagattatttttccatgaaggcaatttgacaagcctaacaaagaccaagttgttcaaactatgtttctaggaatatagtttaacagaaacaagaacaagttgaaaactgttatgactattcatatgtctctatattgtacaggcaagtaagactgttgttcttccaaatgttcccaattgaaatcaaaagaatatctgtacagctcaattttcacaataagtttagaatcagaaaaaaaaattttactaaatcctaatgaaataacaatcttccacataaattaggtcacaaaacaagtaagaaagcattcaaagttgcgctgtctttctttaaagaacccttgtctaggcaacatatttaacactttaaccccttcaattctccctgaaaagtatttttccattcatcatcattggggagtaagtactccttcctcgaaagctcttaacgacagcacagtcttcactctaggcccaatttttacctggcccatgcctctagccttttgttcagtttctcctgcttagggcacctttcatcccatctagatgtgtctctctttaactattctaggagttgataaaagggctaggaagtaggaagttgggaagaaggggaggggcgtaagagctctagcactctattttacaggccaacttctttgcctctgaaaatgacagagccaaaatgaaataaaaaccttgcttttacaaatgtttctgagctatcacttttttaagagaggattgggaggctaaggagggcggatcacgagatcggggttcgagaccagcctggccagcatggtgaaaccccgtctctactaaaaatataaaaattagccgggcgtggcggcgcgcgcctgtagtcccagctactcgggaggctgaggcaggagaatcgcttgaacccgggaggtggaggttgcagtgagccgagatcgcgccactgcactccaacctgggcgacagagcaagactccgtcctccgtctcaaaaaaaaaaaaaaaaaaaaaaaaaaggaaaacagggagagagagggaccttggcaggagccaatgtagggcaggtagcaatagaaagtgactagaggtgaaggaagagcaatgaagtaccataaatcacacagaacaagtggctcactgcttttctcctctgagttcattaacgtccagtaactgtccacagggcatgtgcccatactgctcaatgcagagctgagtaggtggaacaggctcccaaagctagaaatccaagtgacagcaaccagttcagaggccctgggaataaacagggtccaagcagtgcagataaaggcagtacaatctacagtatcatttgcttggcttacaagtagtgtgaaggatgacctcgtagcatgtgatattccagaacagcatgaaggtcatatggaagtggagaagcatacccaccaccgtctcaatcttgaggttgagagaactgaatatccaaaggaaacagggtgcagaaaagtcagcaaaaacaaagcacaatagaaggcatactcattgctgatgcccaagcacaggtccagcagaaggtggtaggagaccttgtgcaggagtattcccaagggcaaatgttaaccagactggaacccaaagggcctggggatctctacaggctcccttagcgggcgacgtcgggctctacggactccttcacgcaacaggtagtattgcagtggatttggccacagatcctctttaataatctcagcaattttgtcggactctggaaggctgtggtctgaaaaccaagtgaagaagctgcagatgaggtcttggtttctgcgaatgaaggactggggttcatgccccctgcgccatataattggagtagaaagagacaccactcggccggaggatcttacctcatattccttgacaatcagcttgtttctgaagtaggggtttcttctaaagaagaacttgaacttgcaaccggttctagggtgtctgagttccttcacctctaaattggttatgtaccttaacatctctgcatcttggcccctaatcatggcggacaactgggggtggtttcgaaaagcagtcatccagaagcccgggatattctgaatgatgtagttcctccgctccaggtagtgtcgacgcatccgcccaaacttgtgctccagctgttggaaggccctgtcggcctgagcattcacagtgtccagttccagctggatggcctccagagggtccatgcggagagcctcatgcaaaggccagggcccttcttcctccctcgcctcctcctccaatctatcctcctccgccacttctatttcttcaccttctggcggctgctcctctacctccatctgctcctccattacctccttctccgccaggccttccttcaccacctcagcgctctccctctcagccacggctgctgagacggtggcgcactttcctgtcttcacctcctccgcctcagcctccgcccccgccgtcagctcagacgcggatctctgggcgccacagatttctagggccttctctccaccctgaacgccctttttcaggctgcggtcggctgccatcaccacagaagcggctgccaggccttcggcgggaggctggccctcttcctgcccggctttgatcgccacatgaccgcgacccccaacaactcggatctggggagtaccgccacggcccgcggcatcctggggtacgcccccctcctctgaaggcggtggaggcgggagcgcgacggtctccgagcctccctcacccggctccgccatcacctgtgtcgcctcgctttggtcgcggagcctcaggtactggtgtgcgtcctggtcgctcgggacttggtcagaaataatgatgctgtgggtttggaggggagtggtcctcttgaccccatccaggccgctcatgttgctaacagtcggaccaaccgcaggcgaacgcccgttttcctcagaggccgaactgggagctaaccgccgctcgcaccgcccaccctacagtctcactaacatttcagcggcggtgtcgtcaggactggagatctcacggtatcgcgagaacttgctgagcccgggattggttccgccgctccctgccagccaaccggattctctgggctttatttctgtgaatttacccatagcaacagtaattttacctacgtaaataaatgtcgattgtgctgagtctggaagcgcggacgacccaccttgagatgcatctagcgactgctcccagcatgtaggagcagttgtaaaatcacagccgtaacagtgcctgctctccagtgtctgaaaacaaatgtttttctggtcttcacttttttgaggcaggaaggtaaatctattccctgttactccacgtaactagcagcaaaagacttctctttaagattaatagcaaaatgtttccccccttcttagtaaaagtgacataaaaatatcaattcttgcctctacggttactggggaaaaaaagctactcagcagcctcttaccactaaagcgatgcatagtattcattgctaattttcgatttataatctgcatcaaataagagtttgtgctgcatagtatcggtagaaattaagccaggatcagtttgctaaatgttccatgccttttcactgcaagaaagaggaaattataactatttccagccccaagaacttaatttattatcatatttagttatgtaagataggaatgtttggctctaacgaagcatctgtctttagcaatcagctgagttcattagagggggatgtcaatgtctctggttgaagtgttccagtttgttgacttgtgagttaaactggtgctgtcttagagagctacaaggcctcagagaaatatcagtggggggagccacataccaccattttgtgaggaaaggctagttaaaatggacaactaagatggccttgaagtagaaaacaaacttgcaaagggcaacatgcagctggtggactcaaggtataaaagaggcaaacgttattttctacttaatttgctttgtgtggtagtagcctgatggccctcaaagatgtacctgtcttagttatgcggccaaagggacttcgcagatatgattaagttaaagatttggagatgagaagatgattctggattatacaggtgggccctatggaattacaaatttcttataagaaggaggcaggagggtcagtcagagaagataagaggacgaaagcacagagagagggaaggaatggtggagaataggtgtgggagggaggaaagggaaatcgctat

SEQ ID NO: 11135 - DNA, 6000 bp, Homo sapiens
tttaaatcatgaaaagtggttgttggtcatttatgttgtaacgtgatggctttccgtcttctttaggaataaacattacaacggtggctattccattggtgctccttgttgtcctggtgtttgctggaatggggatctttgcagcctttagaaagtatggtgactttacatgtttaaatttcttctctaattatgcgaacaataaaaaaccaaaaagtttattcttcagaaatgcatatgtacaaaagcagcatggcttctttcaaaataaaatgttaacttatattttacaaacaagttagataaaagtagaaatgatcgagtattactttattaatctttttttatagacagggtctccctgtgtctcccaggctggagtgcagtggtgagattgctcaaactcctgggctcaagcaaaccccctgcctcaacctcctgagtagttaggattacaagcatgtgccaccatgcccagctaatttttttatgttttgtagagatgggatcttgctttctcacccaggctggtctcaaacttctggtctcatttgatcctcccaaagcactgggattataggcatgagccaccgcaccccaccatgtattactttataagcagttcttgtcatttagagacctttggtaaagacttaacctttgagtattgttgaagtatcctgaaattgatatattgctttagaagtatctgtgcttctcctccctgaagagtaaaaggaatattaaataggctgcttggggtatcaccaagctgccccgtaactcagcctccccaagcctgtttccttatgtataaaatatagtttacccagatgaattctgaatctcttccagaaccctgagatccatgtttattttgacaaatgttagatgttggatctaaacaaaaaatggaaagtattctgaagttttctcttcttatattttaagcaacttcagaatctataatgtgtatattagtacaaatagaatgaagaatagtttctgccatcatgagagaaggtacaaaagtctctggttcaggtagatattcataagttaaagcatgccttagtgtaatgtgcttgtatgaaatgcttctaaagacacccacagttttggactggagtatagtagagatgaagtgagaccatgtggtcatgaggaattgcttcaggatgactgcatgagctagtgataaacttaataaggcactgatttctaatatgcaaaataagattagtatatattcttctagtgaaatcttgtgacctttcttataaatgagataaatttatagataattctacatatttgtatgattttctaaagcacatggcagctgccatctcatttaattctcacatcaaccctatgaggtaagtactattatgatccttatgttatatagggagagagaggcagatacattggcttataaatattcagtaggactttttgtcttgataggaagaagaagaaaggaagtccgtatggatcagcagaggctcagaaaacaggttggttgaaaactctatctacaattttatctgtctttgaggaagggacaggatctgctgattgaaagcataaggaggccagtggcccacatttatttggttaaaagacataagccctgtagcctttaaagtagcatatctataaggaagaaatttattgtgttctgtctctttattttaatggccactttacttttgttcaatgtcatcccctatcatttgtcaacatccttttttcttggccactggagtttaggccacgacactgtctgccatcaaggaggtatgacaaaagccttatcagtgaactgaagtaggcccgtgttgttagcatctgcaggcctgtgctgtactttccaccctgagaaagtgagaaaaagaccaggcagggctggtgtgcaggtttcagataatcctgcacaccagccccgtctggtctttttctcactttcccagacacaggtgcccaagcaatgagttagccatggtccagagagagagggcagtggggcaggacccctgagaaagctcagggaccatttgagactccacctccccagggtctaaacaccagctgcagtgtctcctctgcctcacagatgccatgccagtgcagattgtcggagaccatacccagatgatctcacaaagggagaatctgggacctgatgagggcaaaataccttttaaaggcacagcggaaagcatggttagagtagtgtttgctgttgtggttaatgaccttggcatgctgttcttagcacacacacctgaggaggacattgatcactgtcagctgtcaggaggcagcctgacctctgactcatcaaggaacatgttctggaggacgcgcattacatttctgacatattcatttggtttatgttacctttattccagactgttggaagcagattaaatatccctttgccagacatcagtcagctgagtttaccatcagctatgataatgagaaggagatgacacaaaagttagatctcatcacaagtgatatggcaggtaagtgtcatatttctaggactgtgctattagattggaggtgctgcttgtgggggagggagacaggagagaaataaggcaaaatccttttctatttagatagggtccagtaaatctgaaatgtgttttttctgcattctgcacagaattacaaactgacactgagatattacttaaaagccctattcagccagtcttttcacctgcaggggatatagtgacatccatagtgatagccctgatgtactacttgtatctggaagccctgaatctatttttgttaccaaagctttgattaaggcactggtacagaggggctgaaaggaggaattaaatacagttcctgccctgaggaaggtgagataggaaataaaggaactctctcagtatgagaagggcctcagtgtccctgacaagccacatcaagagtcgagcttcccaaaccatctatggggaaatgctttttgtttctttttttaaaatttctactccatcatgaatgaatacactgtaaaatgcaatataaaatactagtaataaggaaattttaaagatacaaaatacaaagctctaattttttattattagattcaacagacataaaattaagagtaataaagagtaactaagagtagtttcttgacacttagtctcaatttctgcacctgtctctatggcactgctaaaaacagctctcagatacataggactctgtggggcatgctctgagtagcactgcgctctggcttctccctcctcacgtgcagcctgaggacctgcagtataggcatcacctgggggcttgttagaaagggaggccatagaactagaagctcccaggtgacgcctgtgcacatcagtgactgggagttgtcagcctaagggttggttgagtcactttgtggacaaggagagcatcctctgcaaccaaaatccatcctcttgttccttggaagtgacatgaagggagaacctaatttctgttgtcttatgcctttcattctccttcagcttctaattcagtctctcctccctcctccctgaatgatcctcaggctccttaaatgtgcaatgacccgggttctgtctcacccccactcaccacagtctctcccctaaacagtcccacaccctccccaacttccagcagtgcccttccctgcatgtttgtccatgctgcttctcacacccagacttccctctcagtccccagtccataattctcagcagcctgctggacacctccacctgcagatgtcacccgttcctcagcaaccacaatcgaatccattgttcctaaccctcaccacagatgctctgtgcattccttgtctaatggcttctcgactgcacatcccagcctcaaagagtccttgcctcccggctttcctcacaccccacctctcattggtaacaaattcctgattcctgtcccaaagggtcacttttcctctttcctagtttgtgacttctatgtgcatttctctttgcttttttacctctcactttttgatcttttcctcttgggtcaacctccacagttacctctgaaagtgccagtctttcgtttcccatagaattaaaccagacttcctagcaagacaatcaatgcttttccatgctctaacgcgtggctaacagcatatactcaggatgtgcgttcgaatcctactccatcgccccattgtgtgacctaggaaaagttagtctctctctgccttggtttcccatttgtaaaatggagtaacagttcctacctcgggatttttttgaagattattaacatcttgctattggaatagcgcctggcaaagagtaggagctctataaatgggagctcctggcatcatcctcactgtcaccactaggccctgacctgttgctttggtcctcatatcctattaaacaaactactctgtgtccctcatactctggccatatcaactctattttcgaggctgtttttttctccatttccacactgtgtgacttccacctccatagcttctccagagccagtttcagagccacttcctccctgaagtatgtccccatgccccaggacgtcgtcgtcgcccccatctctgagaagaccctgcgaagcttcctgagcaggcggtgcggttgtgtactgcctgcgggtggcttctgtggctttcacatcagggttttccgcagtgcctgggacacctgagggcacccggggggaaagtcagtcaccacgacctgaagcagagtatccccgtctgccactgacaggccggcccgtgtgtggtgcccgctagctgccatctgtcttgtggtttcagattaccagcagcccctcatgattggcaccgggacagtcacgaggaagggctccaccttccggcccatggacacggatgccgaggaggcaggggtgagcaccgatgccggcggccactatgactgcccgcagcgggccggccgccacgagtacgcgctgcccctggcgcccccggagcccgagtacgccacgcccatcgtggagcggcacgtgctgcgcgcccacacgttctctgcgcagagcggctaccgcgtcccagggccccagcccggccacaaacactccctctcctcgggcggcttctcccccgtagcgggtgtgggcgcccaggacggagactatcaaaggccacacagcgcacagcctgcggacaggggctacgaccggcccaaagctgtcagcgccctcgccaccgaaagcgggcaccctgactctcagaagcccccaacgcatcccgggacgagtgacagctattctgcccccagagactgcctcacacccctcaaccagacggccatgactgcccttttgtgaacacaatgtgaaagaagcctgctgtggtactgagcgtcgggctgtcacaaggcactggaagaagggagcctgctggtccagagtgtgcgtgtgtatcggtgtgtgtgtacacttgcatgtgtgtgtgtgatccagtaggatcctagagacaacctgtcatactgtttacaaaattgtgcagctggtttcgtgctgacccttagggtgcgtctgttgggttttgttgggctagaaaaatgaaaattttcagatggcgttttcattcctctgactgatattgagctgctttggtgttaaaggtgtaatgtgtacagagttgtatttaacaataataaaagtaacttaagtttgctctatcagattttagttctgcacagaggttaagtgggaaaatgcagctgttgcaaaatgtatataaatagtatgttcatttttttcagtatattatctgatactgtgttagcagcaggtctgcttaaacctagtcttgttgttattgagtcatttcctctcctttgataactagaactgaaagcatttttaacattcttctcctggaagaaatgaattacttgaagcatgaaaagcacaccagggtggttgtttatttagcaatta

SEQ ID NO: 11136 - DNA, 6000 bp, Homo sapiens
atgatattgcttaaaaagtgtctgatgatcacgttcttcactttcttaatgcaaaatttatgtaattaggctataactcaggaaaatactatccagaagactttatgtcttcatcatcttttcagagtataaaaatacacatttcatccagtctgaaaaatcatgactctctcaaccctttctgttcacacacataaatattacaacatgacaatagaggttatcaactcaccatttattgcttggcctcagattaatttaccagcttcattcaagccaggaagtgatcaaattccaattattaatcaagttcatttcaccaaagtcatcactaaagttaagattcaccccttaccccccaatacctattatgaaagaacatgttcagttgggtttaggccagagttatgtttcattgttaccacagtattcctagaagtccatctaattcagaaccacagcagaaaacaatattattagttgtaaccataccagttattaccactatcattatgacatcactaaacaccttatggcaagcatcaattaagaggtaaatgtaaagctcaaagcaatgaacaaatgacattttttcagctcaagtgtttcctgtaacattttattttcgcacactataaaagtataatactctacctcaaaatgttttaagagttgaatatatgttttcgcttttgttttttaaagagacagagcctcactctgttgcccgggctggagtgcaacgacatgatctcagcccactgcaacctcagcctcccgggttcaggcaattctcctgccttcagcctcctgagtagctgggattacaggcgcacgccaccacgcccggctaatttttgtatttttagtagagactgggtttcaccgcgttggccaggctggtttgtaactcctgacctcaagtgatccgcccacctcggcctcccaaagtgctgggattataggcatgagccactgcgcctggcttatgttagtattttaaaaaaattatttacgaaaaggaacatacttagcacaactaggtattaggaagtactcaaagtatcactttatcatgcttgatttcaaaagcctacgggaaatatgtctatccttcatccaacttgaaaccagtatacattctgaacaatagggtaatctcaaatgcaatcaaccaaatgcataaaaagataccaattgttctattttaaattagccttctaaccacacttgccaatacaaaaaagagaggcttttatttgatatttgtaaggaaacttaagaaaacactcattttagctgggcgcggttactcatgcctgtaatcccagcactttgggaggctgaggccggtggatcacttgaggccaggagttcgcgaccagcatggccaacatggtgagaccttgtctctactaaaaatacaaaaattagctgggtgtggtggcacatgccggtaatcccagccatttgggagactgaggcacgagaaccgcttggaaccgggaggcggaagttgcagtgatccaagatcgcaccactgcactccaggctgggcaacagagggaaactctgtctcaaaaaataaataaataaatactcattttatttttggtttataacagttactccaaaaagctgaaaaatgggaaaagccaaattaaactgaatcctaaagcgaaggctaaaagttcagtatttttcaaactacacttattattcctattttttactgccatttctttaaaaaaaaatttcttctgatttttagaaagtggttctataagccgggcgcggtggctcacgcctgtaatcccagcactttgggaggccgaggcaggaggatcacgaggtcaggagatcgagaccaccctgggtaacacggtgaaaccccgtctctactaaaaatacaaaaaaataacccgggtgtggtggcgggagcctgtagtcccagctactcgggaggctgaggcaggagaatggcgtgaacctgggaggcggagcttgcagtgagccgagatcgcgccactacactccagcctgggcgacagagaaagactgtctcaaaaaaaaaaaaaaaaaaactaaagtggttctatagtacctttggcttttcctttagtctagttatatatttgtataaacaaataaaccagtttcaggacagcttgaattaatccacatattaagataaactcattttaataccagaaattatttacttatccctgccttcacactttgttttcagacaagtccaattttagggctggaataattgctcaaattattcaaaagatatactgaacaatatttcaaaaataaaaatttccttccaattatcaggaaaaaaggtccctacatgaatcaactcagaggtcattatcttgaccttcaccatctgctcacttgcacaagaagcaacacaagtttttcatctaaggtagaactttttaaaacttaaaattatctaagataattttaaatatttatatttgctcaaaaagggaagaaacacaataaataattacattactatttcagcatgtaactgaaaaaaaactttacaaaggcatgtcctgacttgtcaatagtttattactgacaaattgagataaaatacatactttggtacagctatactgtccaaatttcttcaattagggtagtaattacaaagtatcctcttccactattattctatgccatagcaaatgtctctctagaggctgcaacataacaaagtccttcgttacctaactttaaatactaaaatgttctcttcttcctagaaaacaatgaaaaatagacaccatgcctcagtgatatacctccaaacaagctgctattatcacgaataaattttaataggttagattgcaaagacattacagatggcttttgacattttcagataaactgaaaccactccctccagcccctagggataatgaagtagcttctcaatcactgaagttacttagatgacaggatttgtgaataatctgtaaactcgggaaacctctgaactgtctccttaggacaaataacatacaatttagaaaaaaaaaatccctacttaatactgctttttactaaattcatgcctacattaaatttcaggatcaaacttaagtgaatgattcaaatcattcattaacatacattaagtgtttcaggaccaaacttaagtgaatgattcaaatctaactctggctttttaaaatgtacatatgtctttttaaaaaccacacatcacaaatatctaaactatcaaagaattgcattattcgaaatttcaatagcctgatactagtgactcggtcagtgcctgattttttttaaatagcagaaaatattaccatcaaaagacccctttccaaatgctgcttctgcttttttgttttgtaaataacagctttggaaatgtatgcaaaaatatctctaagttacacaagtcgagctcaaacactttgtggagcaaggttacttaacaggagtcccagaaacagctaaaattgtagggaaaattttgcgtatgtatatatggcattgttttttctgcgcagaatgtccatataactcagtttctcaaaaggcctcaaaactcaagattaaaagtgcctggaaagaccatcatctttagagaacatatcacaggcaacccaagacttattttttatcccaagttaggggaggatttatcctaattttgtggctcctacacaacttctgagcgacgcaagcatgaaatggctgtccgatacaaacagaccccttcagatacggaatgcagcaaacccctaattttccttgaaggggccacggaaagccaaacggattcgtaacccggttgctcaatggtccattggctactgcaggacgcgccctcctcttacgccgcaggggctgcggggcggcgaccaggttcctccgaggggctgaagttcccttgggggtggctgagagcggccgcatctctggcagcatcctccctcccgaaaacgcgccctaaaagtagcggctgcgggcgtgggcacagccaaccccagcctgcgcctaccagaagtcgggagggcgcggaactgcggcccctccgagacgcgcccgggccgccgccgcagcactgtcgcagcgaccttcccgcccgggtccccgcgagcaaacgggcaagccccgttatcacgcaggtcacacaccccacgagtaaaaggaaaaaaccgggcagacaataaagcccaacccgcgggggcccaagcgagctggaagttgggggcgctggggctgcagcccaaggaggagcggcggggacgacgggatgcggggctgatgcgcctgggacgcggcaagccatatgtcagcccgggtgctgacagcggggaggacactgggcacgcggcggcgtcggggaggcggccggggtaagacaggcctgaggcgggaggggagcggcggcgaggtcccgaggcgccgcggtcggccgtgacccccaccccagccggggcgctgtcccgttccttaccggcagggaagctgcgggctccgccggggctatcccggccgctggcctccggagccaggaagcgcccccacatcgcgggcgagagggccgggtgggccagggacgcccgactcctcacgtccgtcctcctgcttcttcggcggcggaaacttgcgcggagcgtgggcctcggcgacacgggcaggaggaaaggcgggatggctggttaacggctgctcagctacgggcggggagcgcaggggccagattcgccgcactgccggcgcctgccatggccaagccggctgggctgaggcccgcgccggggaagcggcgactcggcggtgacggctgctagatccccggctgagcccaggctcaaaggctccaggcgaagttgcagctgcgggttctctccgccccctccgccggcagagccagagccggggctggggccgcgagggggcggggcctcgggcaatgacttcaggcgtgcgcggcgccgcgcggggcggggactgcggggggcggggactgcggggggcgggtgagctaccccgaccccgcttcgcctccttggcggcgactgggctgtcccgccctcccgccgcatccctctgtctccatcctcccgccctgcgagttgagtagagggcagcgacttggcctattttgcgatactcgcccctcccttgggtaatccctcacgccctccctccgggcacctctgtgaagacacgtggaagacctgcccctggcgtcacaaccgctcgagatgaaaaagccaagccagggcgcggctgagggggcttccagcctcccttggaattaggattgggatttaaatcctcatctgtattccttcgtttatagattactttaggggcagaaaaggggtggttttcctttactaatttaatgggggcgtgggggcaacacaggcaccagaatatagcaccgggatgtgcaccggaaaaggcccgggggtaattagtacccgagggggagaggggccgtcattgtaatcgcacaacgtttcagattagcaagcagaaagtaaaaatggcaccaaagtctgtaaagggagccctttcctccttgccccctactccttcacgttcttcctcttcttggccagtttccacccttcacctgaacccttagtgcaggaggagacgtcctaaggaagggcgaaaagggacagcatcgttttatttttaaatcttacttctcactggcaatatggtgatgcttccaacgtttagttacgaactagttcgtataaaaaattctgggccagcactgtggtgggaggcgggctctgcagtaggcccatcactcagaggtaagtcggaacgcaggtcgcttaactagagaggctttgagttccgcttttcctgttctggaatcttgctaacaaaggcctcatatttgcatttttcccttaaagacattttaattgggaaatactacttaaaattcttggaagttaaattaga

SEQ ID NO: 11137 - DNA, 6000 bp, Homo sapiens
ccagaaattcagattcattcagactggtgaagaccaggaatgtatgtttttaacaaatgctgccaagtgactgtgatgcagttcaggaaaggggccagaggagcctcaggctggtcacacttagtgcctgtagctttgggcatccatccagtctagggggccatgaagagcaatggaaatgtaatctaacatggtgcatagacggcaaaaagcgtggtccagctgctaagactctgctcttaacaagaactttgcacaactcctcttagacagaccttggtctacatataaagcaccaactcagtatcctagaggtgaaggcatgaatatatgtgatatgtccagctgcgttggtcttctcatgtatcaaataagaaatatacctgtttccccctggtgaataaaagtgcagtttatagtctgtagatcaatgccagggattctgtaaacatataattatgcccttttattataagagggtattaacttaccatacaagacttggaaaaatgaagatattaaactagtttgggaaggtgcagcagggaggaacaaccagttgccaaaatttgattcatggcaaagtgagcaactaccaaaaaaaaagggaacaatttttgttacctgtttttgggcagctgtcacattaaacattatttgatggtatctatgatagtggagatcgacaggtagctacatgttacaggatactcggtgtccaattcgataattcgtatcttattaagatgaaagagtataactcattaatgcaaatgacaactgcatgggtgcttaaagaaaagacaactttgcaattaagttactagagtattaaaaaagaactaatgaagagctgtctgatgacttagttcacatactatggaactgtggagtgtttttgtagaatctcaaaattatatgaaagtcatgtatcatgaatttttttatagaatgtaaataaagactatactttcagggatcatttctatagtttgttactagaatgtaaataaacttagtgatgaattactataagcatctacacaatcatattttactttgagtaatgatgaaatcctagctaaaataacttctgttctgcctggtcatatttctagatatgataggtttgtcttcagctctatcgttgcatgaatgtgatgagatgtatgcaaagtttatctttttatacttgattgtttttgttatttttcccctagcaattgaaatatgtgagcaaaagcagatgacactggcaaaatactgtaattttttacaaacagaattagggccaattttacacatcatcacatagaaactgtctattgatatagctccaaagattctgtttgtctgaccctcatggactatacttcttcatttccagtctagtattttctgctaaattgtagggtttttttttctttcacattctctcaccatcaaactgtccatcacggctaaattactccctcacttcaagcctttccttggctattcaactgtctttgtcagcctttcaagcctttgttcttatttgactgctgttttaaattgatgctgttttcatacatcaatttcacttcctaacttgtcacttcagaatctaaaatgacccttcctaagtaaaagggaagctccctttcttatgaccactgggggagtgttatttctgtggccttcacacccacctcccactcttactcagcattctttggcactagtccctgggctgtcatcaaatgtacccatgataccgtggtaccatctagctggtgcatagtttagctttatggctcagccatctcttctttgttcggtccaggaaatcccaggtcaggtgcccatttcattttttcttgttctctatggccagaagatgcagtcattagacagaaatgtaatgttgcttactgaggaagaagactcccctggatttcatttacttcctacaaggagatacagctcaatagttcaacaccagaagagaaactcctttatattcagatagtgaacatatttctaagaagcctaaataatcctacctttagatactctatttagaattcattactaagctcctgcaaagtcttagctttgcttgtttttaattattaaacaatctttgactaatttgtccttttctaaatcctccaattactactatgtgctgaaaattagcctatattccctatgcctgccacatcatgttactcacttcttcccagctttcagccctggctaaggttgtgtatatcaaagcctggaaacatttctagctttagcgcagccttactgtacttttaaaaccagtgtgaggcattgaaaagacttgcccggggattgtgaatcttcttctggctctgtctatagctaaatatttcctataccctgagaacctctgagaacctcaatttttatcagctaaatggataatcggcaattagaagcataaattgaactagacaactttggggattcttgttggtttctactgacttacatctttttagtgagacggagtctctctttgtcacccaggctggagtgcagtggcgtgatctctgcaagctccgcctcccgggttcaagcgattctcttgccttagcctcccgagtagctgggactacaggctcccaccaccacacctggctaatttcttgtattttttgtagagacggggtttcaccatgttagccaggatggtctgaatctcctgacctcatgatccacccgcctcccaaagtgcttataggcgtgagtgcattataggcgtgagccaccacgcctggccagatctttttcttatcctcagtaatggagaaggcgtggactttagatagctagatattgataagaagttaaatgggatgtatagcctgagggtccaaagcccagtaagggaactttaaagtatataacaatgaaagatgaaaaccaatcttttctggctggagaaaacaccctgaagtaggttttgtttgtttgttttttaataaggctgtgagtagtattgagacaaaatgaactttttacatgaagtgtgatgtgtatttagtctttgtttttcaaagtaggttactacatataatgacacattgtagcaaaagagtatatttccatacagcctactttttctctggacagaaggctgacttctgagctacataagtcactgcttaagaaaaaaatagtcaccattgcttgggaggctaaggcaggaggatttcttgagcccaggggcctgggcaacatagtgaaatcctatctctaaaaaaagaaacagaaaagtgtaaatgacaataatatagggtatgcacaaattacacttgatataccattgaaaaatcttccagaggccaggcgtggtggctcacacctgtaatcccagcactttgggaggctgaggtagatggatcacctgaggtcaggagttcgagaccagcctgagcaacatggagaaacctcatctctactaaaaatacaaaattagccaggcgtgatggcacatgcctgtaatcccagctacttaggaggctgaggcaggagaatcgctggaacctaagaggcggaagttgtggtgagctgagattgtgccattgcactccagcctgggcaacaagagggaaacaccatcttaaaaaaaaaatctttcagagtgaaattagtaataaaatgatatataatagcattaaggttttggaaagaaggttatggatgtgtgtttataggtattcttacctggattcttgatacctatgctttgaataacacacatcaggattttgcttagcaaacacagatctaccaggcaaaaactgtcctcatttatcagacaaataaaaggagcagaggcttagcacaggtggcttctcaagtcacacagcaaggcagtggttgagcaagcaatacaccttcccaggttaaagactgcaactcatcatctgttgcttctaagacttactttgtctcaacaaacaaaacaaaacacttgttagatcttttcttcgttggcaaaaatgggacaggaagagtttgcacttggttttttgtgaaagaatgttagaaatacgtgaaaccgttggtagtattttgactatcacctgaaaggtactaaatgttaaactagtaatttgcaatctgtgatccttgaattgtctctttgtttctttcaggtggtgcccaggcaacatgggtgactggagcgccttaggcaaactccttgacaaggttcaagcctactcaactgctggagggaaggtgtggctgtcagtacttttcattttccgaatcctgctgctggggacagcggttgagtcagcctggggagatgagcagtctgcctttcgttgtaacactcagcaacctggttgtgaaaatgtctgctatgacaagtctttcccaatctctcatgtgcgcttctgggtcctgcagatcatatttgtgtctgtacccacactcttgtacctggctcatgtgttctatgtgatgcgaaaggaagagaaactgaacaagaaagaggaagaactcaaggttgcccaaactgatggtgtcaatgtggacatgcacttgaagcagattgagataaagaagttcaagtacggtattgaagagcatggtaaggtgaaaatgcgaggggggttgctgcgaacctacatcatcagtatcctcttcaagtctatctttgaggtggccttcttgctgatccagtggtacatctatggattcagcttgagtgctgtttacacttgcaaaagagatccctgcccacatcaggtggactgtttcctctctcgccccacggagaaaaccatcttcatcatcttcatgctggtggtgtccttggtgtccctggccttgaatatcattgaactcttctatgttttcttcaagggcgttaaggatcgggttaagggaaagagcgacccttaccatgcgaccagtggtgcgctgagccctgccaaagactgtgggtctcaaaaatatgcttatttcaatggctgctcctcaccaaccgctcccctctcgcctatgtctcctcctgggtacaagctggttactggcgacagaaacaattcttcttgccgcaattacaacaagcaagcaagtgagcaaaactgggctaattacagtgcagaacaaaatcgaatggggcaggcgggaagcaccatctctaactcccatgcacagccttttgatttccccgatgataaccagaattctaaaaaactagctgctggacatgaattacagccactagccattgtggaccagcgaccttcaagcagagccagcagtcgtgccagcagcagacctcggcctgatgacctggagatctagatacaggcttgaaagcatcaagattccactcaattgtggagaagaaaaaaggtgctgtagaaagtgcaccaggtgttaattttgatccggtggaggtggtactcaacagccttattcatgaggcttagaaaacacaaagacattagaatacctaggttcactgggggtgtatggggtagatgggtggagagggaggggataagagaggtgcatgttggtatttaaagtagtggattcaaagaacttagattataaataagagttccattaggtgatacatagataagggctttttctccccgcaaacacccctaagaatggttctgtgtatgtgaatgagcgggtggtaattgtggctaaatatttttgttttaccaagaaactgaaataattctggccaggaataaatacttcctgaacatcttaggtcttttcaacaagaaaaagacagaggattgtccttaagtccctgctaaaacattccattgttaaaatttgcactttgaaggtaagctttctaggcctgaccctccaggtgtcaatggacttgtgctactatatttttttattcttggtatcagtttaaaattcagacaaggcccacagaataagattttccatgcatttgcaaatacgtatattctttttccatccacttgc

SEQ ID NO: 11138 - DNA, 6000 bp, Homo sapiens
agaaatcaattgactgaaaacgaattcaaaataatgaaattaaagaagctcggtgagatacaaaaggacatagatttaaaaacacaaacaaatcagaaaaaacagttcatgatctgaatgaaaaactcaacaaagagatatcatagaaaaggaccaacagaaatccaaaactgaataagtcaatgaatgaaataagaaatacaatgtagagcttcaaaatccactaagtcaagcagaaaaaagaatttctgaacttgaagatgccttttgtgataatcccatcagacaaaaaacaaaaaagaataaaaaagaacaaagcctacataacatatgagacaaagaagtgaccaaatattcaaattttgggtgttcctgaaggagaagagatgagtaaaggcatcaaagaaactcctagttatgatagataaattcagcaaagttataggatacaaaaccaacatacacagatcagtagcacttctgaacaacaataatgaagtagctgagaaagaaatcaagaagataatcctgtttgcaatatttaaaaataaataaataaataaaatacctatgaatacatttaaccaagatgataaaagatctctagaaaaaaatctgtgaaacactgatgaaagaaactaaagaggacacaaacaaatggacagacatcccatgctcatggataaggagaacaaacatcgttaaaatgaccatattacctaaagcaatctacaaattcaatgcaatctctatcaaaatactaacgttatttttcatggaaatagagaaaaaaacataaaattcaaatggaacagaaaaagagcccaagtatccaaagcaatgccgagcaaaaagaacaaagctgaaagcgtcacactacctgacttcaaattatattacaatgccatagcaaccaaaccagcatggtagtgttataaacacagactctagaccaatgaagcagaatagagatccagaaataagtctgcatatttacagccaactgatttttcaacaaaggcactaagaataaacactgtggaaaggacaccctcttcaataaatggtgctgagaaaactggaaatccatatacagaataataaaactagatccctatcactcaccatatacagaataataatactagatccctatgactcaccatatacaaaaatcaactcaaaaaggattaaatacaaatgtaaatcctgaaattataaaactactacaagaagccataagggaaatgctgtaggagattggtctaggcaataattttatgactaagactgcaaaaacaaagacaacaaagggaaaaatagacaaatgggattagagcaaactaaaacacttatgcacagcaaaggaaacaatcaagagagcaaagacacaaactgcagaatgggaggaaatatttgcaaactattcatcccacaagggactaatacccagaatatacaaggaactcaaaaaactcaacagtataatatatataataattgcactaaaaattgggcaaaggacattaacagacatttcttgtctgtataaaagaaagtctgtataaaaacagacagactcatagaccaatgaaacaaaatagagaatccagaaatattattaagtccacatatttatggccaactaatttccaacaaaggtgccaagaataaacattggggaaaagacattctcttcaataaatgatgccgagaaaactggaaatccctatgcataagaatgaaactagacacctatcactcacacagttgatcacaaaaatcaactcaaaagactttcttttatatagactttctttctcaaaagaagtcatacaaatggctaacaagtttatttaaaaaatgcccagcatcatcaatcaccagagaaatgcagatcaaaaccacaatgagacatcatcttaccacagttagaatgactattatcaaaaagacaaaaaataacaaaaggtggccaggatgcatagaagagggaaattttatacactcttgatgggaacataaatatgtatagtcattatagaaaatagtctggaagtttctcaaaaaactaaaaatataactaccatatgatccagcaatctcattactgggtatttatccagtagcaggaaaggaaatcagtaaatcaaagtgacatctgcacccctatatttattatagcactatttacaagaggttgatatggaatcaacctaagtgtctatcaacagatgaatggataaagaaaatatggtatgtatattcaataaaatactatttagccataaaaaatgaaattttgtcatttacagcaacatggatggcactagagatcattatgttaagtgaaataaggcaggcacagaaagacaaatatcacatgttcttgatatatgggagtttaaaaagttgatctcatggaagtagaaaggagaatgatagttcccagaggctggaaacacagaggcagatgaagagaagttggttatatgtatacaaacatatacttagatagaaggactaagttctagtgttcaatagcacagtaggctgactatagctatatattgtatattttaaaacagctagaagagaatatttgaaatgtttccaacacaaagaaatgataactgttcaaggtgatgaatatcctgtgtacctttatttgatcatcacacatggtatgcatatatcaaaatatcacatatatcccacaaatatgttcaaatattatgcattaataaaaatgatttaaaaaaattgaagggagccaaaaagaagtcatgttttaatgccaggataagaaaggcaataatagaaaaaacagcattctaaaactgacatagttttctgatattgaagtctggattttagggaaggtacacagttcactgcagattaggacattttgaggctttatgttggtaggagcaggatattagtgatagtacttacgttgtatcaacagttgtgtacaacctgagatggagcagatggtttgagttttgagaatattaagcttgtggcagataaatggaatttttgctaaaatattaaatattggttaataaaatattttcaaccaatccttctttaaataattaatcccatcgaaacaatcattactggtgcttcatgcacttcagagaaaattcattgtggaaccacgatgttaacttttcaatttaattcacttccatgctgctggagtcccatgagcactagattgaatgccaggggtggtgggtcaaggattcaggcaagtttgggccaatttggagggtggaaatagggaaccacatattattctattttcacaaaggcccaatgaattctgtagggaagaagtcatggcaaaataaagggctgcagttttaagcagcagagatatgggcggccatcatgagtcccagcagggacttctaatgggtttggtgtagaggacagccacttccagtaagctggaacctaagggataaggaataaaatggtaaacactggaagaacaagttctcagaatacgagtgaaaaatgtgtgtgaggaggggttcccaaaactataagaggactttgaggggttttattccaatagacgctgtgggaatatactttttggcatccattattgttactctggtcttagcctgttgtcacctggaaaatgcagattacttttatatctctggaaagaatagtggcttggtcatcagatggcacactcaaaaggcacacataagtaggtttcttgtctctgtctttaaaacaataagcacttaaagtatcatttggagaaaacagcagttaccaggaaatcacttagctgagataaaaaagaaaagaatcctcgaatagcatttaatcttcaaaataagaattttccattcttgggtcagaccgatagatgacatggcatttagacatccaattcatacctttgcttgcaactgagcctcagacacacatatatgatggaaatgttctttggcattacactgctttcttagtttgcatcgctagtcacctttgtatcatttgcatctgatttggaaaatattttagaacaacccaataacaacttcgagattaaaaaataaaattctacacactttacagttccttgctattacatgaatgtgtaaattgaattccctctcaggagaaaaaaaacaaaacaagggctggcttcccaaaaatgttttcactggctttagggaactaaaacaccagtgtctgggtgagtaatacttcctgtaaaataaagatagatcaacacataattaagtcctggctcacatataattgttgttttggaaacagttttgaggataaatatggttatgctaatgaaactgcccatgatttccactaatgatccagtttattaattaggtcaggacatttttccaccttgtgctatccattttggaatgctgaaaagggttaaaaaaaaaaacttctaagagaacactgtaggcgaagaaaaagagagaaattttaaattagttatcaactcttctaaggattccagttggaggagtagatcgaaagtgctttttcgattatttatgggtttcgaagattcttcctactccactaggcagaaaaacagagttgtaatatacagcatttagaattcataatccttagcattatttctctgaactcgacatcctaaatagccagcgtttactaattccagagctgagtgtagttttgtaggaagttctactgaatgcggagaccaaaggggagcctgcctgctctgagggttttgttgaggctgagtgtgaactccgggcgagaaagcgcatctcagctcttagatcacacccactcagggtgtgcgtgtgtgtgtgcgcgggtgcctgcgcgcgtgtgtacgtgtggggaggtgtgcgccaaaggggtggggtgaggggcggcgaggagggctgtaggtgaagcgcggggagagggaggtcgcccgctccggcctctcccccaggggccctgcggctggccagcgctccggctgcacctcctggtgcgcgccgcggcggcgccacaggcccctcgaccctttgaccaccgccctcgggccgcgcgtccggcagccgggaccggtgatggcgcgggactgacggccgtctcctcccagacccctctgtcccgcctggggctcgctggggctgcggcgccgccccgagctgcatgtggggcgggcgcgcccgagcccagagcgagcggccctcggcgcccccgaggcggtgccccgccgcgccagagtacgaggaggagcggcgggccgggccaggctccccacgcgccgcagcctcggagcacgggctccccggaggggacttggggcgtcccagcccaggaggaaggacccggaagcagaagcggagccgcgagtcgagccgagccactgcccccgctgcccgcgggcgccgggtgggggtcccggcggctggatgggcagcggcggcgcgggccgcgggcggcgatgggcgaggagcagagcacggtgagcggcggcggcgggccccaggagtcgcagaccctggccagtggcactgcgggccaccctgagcccccgaggcctcagggggacagcgcccgggcgcccccgctgcgcgccgcctccgcggagccgagcggcggtggctgcggaagcgactggggctgcgcggacaccagcgccccagagcccgcgaggagcctggggcccccgggctggagtaagagccgagcaccggcgcagcctgcgggactggcactcaccgggcctctcaatccccagaccttgccactgcagttggagctggaggaggaagaggaggaagctggggatcgaaaagagggaggggatgaacagcaggaggcgccccccggcgaagagctggagcccaggacccgcgtgggggccgccgacggactggtcctggacgtgctgggtcagcggcgcccgtccctcgccaagagacaagtcttctgctccgtgtactgcgtggagag

SEQ ID NO: 11139 - DNA, 6000 bp, Homo sapiens
tactgttatgctgagaacccctaaaatgccagaatgaggaagagtttactctgggtcactaatacccacattagtcctgtggttgtcctgtgtactgattccaaaagtacatgggtccattggagaaactttggaaaataaatataaacactaagaagatgacaaaataacttgtaagcccatccatcaagtgtagatttatgtataaccaaaaattgggaccatattacccattctgttttatcatctgttctttatacccaataatgtgtcatttttccatgtcaattaaatattcttctaaatcatggctgtataacagttatatacagccatatatacagttatatacagttatatacagttatatacagaaggctgtataacagttatataaatggtctatatttctttagctattttcctactcttggacattatgtgtatgtctattttttcttatacatagtactgtaatgtatatatttacatctaaatatttgtacatactttcttaaccttagtataaactcccagaagtgcaaataatatagatgttttatggcatttgttttaggatttttcacagctacttgtacccaaaatgcttgaatcagtctagggctgcaatatattaaaagtgcagatagatatgaatctgtagaaatctctaatatattaatacaaattggtgtttacatggattcccttttcagtagcatgggctggaaggccactgtatacctataactaaaatgtctagtgccatcatttcctgcaaaataatttgttgtatttcttctcagattccttgctcctgcatggtcttcagctactgttgaaaacagattactgtagaactaaaacaaaaaaaggaaaaatgttaatgcactggtttatggcatttaagaaaataggaactaggctgtcgtacagttgacaaacattggtaaagttgtactatccctttggaagaatccgtagtgggcccagtcctttcagtgattggatacttctagtaggaactaccatttattcagtaaccctatgccctcgtcaccaatctaggcatgttttgtacattccgccgaaggctcctgccaactttgtgaggtgggtattatcaccacgtcatagatttaaaaatgaggcttagtgaggatttgaaacattccctactttcacagctgctggttgtctagaagtcagaagaatgcaagccgcctgagaccactgcagttgttttgtgcacaggtgtctctcccgcactaggtcagtgcttgagatgtagtaggatctcaagaaatatttgttcaatgctgaataatgaattgaaaggtggaatttgaaccaaagtcattttgaacttgaagctctttctaccaggcaggtgtcaatttctttagttttagtgtttcactgagagattgtgagatttgtccctatgtgatgtgcttgttcagtgctggatgtcccttttcctgattttcatgtgactagttatgtaaagggcttcacatcaagtttcactgcagtttcagaggatcttcttcagataaatctagcgtaactaaaatgatactgagtgcataagagaccaagcatgcatgaacaactgcttgagtggacttaggaactttttttagaagagattctaacttctgctttgagcttttgtaatgctccaaagttcttcaggaatgtgttgtctttgaatctccctttgaatatcttgtagaagtttcttggcactggatttactcaataggatcgaatccccatcctccagcaaacgaaatcccgtgaagactcccagcaccaggctggtctgaatcctcacagttctttttcagaaagcatgcaactttggtcaaagatcagaggactgataggcaatgtagtcagctgattcatttcaaatggcactttcataccgtctgacacattggaataccacatccagcaatctaccatttcctaaacaaaattttgtgtgtatatttgttgtaggtatcttttatgtaatgcagacacaatgtcacttaacaaactgactctgtcagcttagatgaggaaaattaggggatttatggtttctccccatttatgtttaattaaatcacagcttgctgatgttcagcttaacgattatttgttgaatgtttactttgtgcaaggcaccatgctagatgtggaaaacacagggttgaataaataaatccatgcctctcgggaactcacagtctagtcagagacagacaaatcttatggagcatggtaagagctgcagtaactaggggtgagggaagacctagagaaacatggtgctagcatctcctcggtgaggagggtctagcaagtccaagacctcatttcccaccggactcataacatagccttccacaatgatcccaagggatcgttctgggattattaaatccagtcctgtcactttcatatttcagcgcctgaacacactccactgaccgcccgcaggctgcctcaggacccatttgttccctcccttttccctccagccccttcccttcccactcctacctgcctcctttacactctgcctgcctaggttcaaatcttgctgtggatgcttatcaacccccggtccttggcaagttactaacctctgtagctcaccttccttaaactgtgttaatcgtaatctgtcttgtgatgttatagtttggattaaatgatttaatataaaactcttagaaaagtgcccggcacgtaggaattactagagaagtgacagccatgattgttgttgttattttctccttcccaggctggtgttgtctttcctacctctgtggctttgcatgaagcaccatggcgtatatatggtcaccactatgtcatttcttaggttgcttctaactatgtcatatctttatcatcagcctatggcatcattccagagttgttgttgcctttattagatttataaactctgacattaggacttcactgcaaattattttttttttttgtatttccccacagaatctaaatacattgcatcttgcagatactcaaacctttgtttactgacagagggagaggtccctttttctccaaatctctctttgtaaagccttttgaaacccttttcttcttttctgctctccactgtgttgttagtatgttagcattttttacatgtttctactgaagtccattgcaatcattcgttctaatgcttcccccggccaacttcctttgtttctctgtaagggtaggagttgttttatttgtatctctggtctttagtacagggactgcacattgtggacactcgtatttcaatgaatgcctgatacagaaagaataatacacatgatattaatgccattgtatttgagggaattggtgagggaaaaaaattttttttttagtatttcttttgactcactaaatgtctaagaactaatgatttagttaactaaagaagcaggaaactccaaatattccaaaaactttgcttttactttctgtctcccagtttcttgttttctaagataagatgtatttctatggtttcttagaaaatattaaaatttgaaaaatacctaaattgttatggagattaaaatggatggtagattatgatattgatgagttaaactgctttgacaggaaaattcaaactaaattaggtttcacagctctgaaaattattgaaggggaatttcctactaaaaatcattctgattaggtgttttgtaacaaagtagtagatattctaaatttcatcttttatggatgtgactgtcaatgagaaatgatcatttctattgtcatacttttgtttcagttctatgctatgcctcatcttataaaaggtaaatcaagaacttctttttaataatgaagaggtgatttttaaaagtcagcatgtgtcttcagctacttaacaagaggataaagagctatatataaaccatgtgtattttaaaccaatggttaccatttaaatgcttgcttaccacctagtctttccatagtagttttcctgtccatctagttcttctactcatatactcatatccaatttgtcctgcccctttcagccattccacccatgccttaattctcttatccccttttgtattctgttttccccacctttccctctcccagggcatgtcgtcttttttttttttttcccccattttcccacttccactcttagaatttcaggccattcaagtttgttatattccatgatttcagattaagctgggctcccagagctggagggtctttttactcttccctcgttgacagtctttgttgtcgccactggtttgttgccatctttcacatgggatgccctaagccctctctattccttccacactcccacccagatgcttcttacttggccaagaagattgaagaggttcctcatcagctgtttctagcttcctgttgctataccttagtttgttttgtgtgtgtatgtggtgtttttgtgtgtgtgtgtatatcttcctctcagccttctgacatgcctatctctgagcctaaccctctgagagtattttattgtataagtaaaatatgacttgttcaaccagcttccttaaaatgagcttaggttgttcctagtttttttgttcatttgttttatgaatacagttttgaaataaacaccttggacaactattttggccacttgtgagagtacagttagtactagctttgcatgattctctgacatgcacaaatttcagttaccacagtttaattaaataaaaccagctcccaacaacatagttcaaatttcatttaccaagatatattaactgtgagtaattgcgtaaagtacaaactttgctgctagctcatcagtccacaaatcactgtgcaaatagcaagtgcaagttatggtcagtgaccaattgcatcatttctttcaaaatctgccagtgattagcccataggcatcttttagtcagttcatgcacagacagcaaaagcatgtagttgtgttgttgctttgcctctcagaggtaaacctatatgacgttttcaaaaagtggataattgaaaaagtgaatgaactgatgaagaatgaaagtaaagaaaagaaaggaggtaataatgctggaagtgaaattgaagtcaaagtaaatggagttatggaagaaacagctaaccgtgggaatgctaacactgccatggtgcaatagactccagatatgaagccagaggagtctagtgaagctgaattttttgacataaatgaggagagtggttgtgagaaaaagaatgaagatatcccagagggagtgacactgccacaaaacttcctcttggagacatttcataatgttgaaggtgcaaagcttatgtgaaaacattggaaactgatctaaacttagaaaggaatatggaatatgacaattctccaaggcacagaaaatattctcactctgtattgtgagttatgtgatagatgagaagaaggtaagtactgtttggactattctagataagtttacagataaatacaatttcaattcttcatggtttttttttttttttttttttttttttttccttgagacagagtttcactgtgtcgcccaggctggagtgcagtggtgcgatcttggctcactgcaacctctgcctcagcctcccaagtagctgggattacaggagcctaccactgcacctggctaatttttgtatttttggtagagacggggtttcaccatcttggccaggctggtctttaactcctgacctcgtgatccacctgccttggcctcccagcgtgctgggattataggcatgagccaccgtgcctggccaattcttcatgtttttaatgttttaaattataatacactaaatatagatgttttactatgttttattttcttatacatttataattgacagtaaaacagtttttgttgttgttttggcttgtttttttttttttttttaattttttttgagcatctt

SEQ ID NO: 11140 - DNA, 6000 bp, Homo sapiens
gtggtaagaacacttaaaatctattctcttaacacttttcaagtatacgatacgatatgttattaactatagtcactacgttacagaactcttgaatttattcctgctgcctagctgaaattttgtatcctttgaccaacatctcctcaatccctacccttccctccttaaaccctgttaactgtaattcctctctctgcttcaatgagatggccttttttagatttcacatataagtgagatcatgtagtatttgtctttctgtgtctggcttatttcctttaacataatatcctccagattaacctgtgttattgcaaatgacaagatttccttcttgaggctgaatagtattatccattcatctattgatggacacttaggttgattccatatcttggctattgtgcacaatgctgcaatgaacatatcaaagaggtatgaagatttcatacctttttgaaatgctgattacattgcataagacggcctttaaaatggaagccacatgctgaggatggtggaacagaaagctcaggtgggtccctgaggatagcatagaaataccacaccaaatctggacggcctatttctggactcgtttcacatgagagagaaatgggccaggcatggtagctcatgcctgtaatcctagcactttgggaggccgaggtgggtggatcatttgaggtcaggagttcgagaccagcctggccaacttgatgaaaccccgtctctactaaaaatacaaaaattagccaggtgtggtagtacacgcttgtaatcccagctacttgggaggctgaggcaggagaatcacttgaaccccggagaaggaggttgcagcgagctgagattgcgtggctgaactccagcctgggcaaaagagggagactctgtttcaaaaaggaaaaaaaaagagagagagaaaaaaaaataaagttcttttctgtttaagccactggtttttaaatttgcggttttttttttccagctctatgtagctaaactgaaacatgatgaatataagtagcctttgcaacaatccaggtgagagaagacagtggtttggcccgggggggtggcaaaggatgtcagatactggacttttttttgaatcctataggatttgcagatggtttagatacaagaatgaatgaactattaatagaaaaactaagacttctggtttggggcccaagtgacttgagagtgtaatgatttacagagatgcagaaggctatggagggggcaggcttgggtgtgggactggggttggtgggaacggcagtctagggcacacgtggcagcatggccttgatagaagcaggaacacgatgaaacagggagggaggccaagagcacggggcacagattggtaggaaatgagtgagctctcatcctactgcttctattttctcaacaaaggctgatccaggtcatcccctgagactgaagggaagaaagcagagggtggagatgggaggtttgaagagaaagacactatggaatagtccttttagtgagtgggattgctgggcagccatgggtgtgcatctgtctgaaatctgtgctctctaatttaaagaaaagccacttaccagcgctgtgtgtttttctgcaatccagtccagttgcatggttgggtttaactgagcctgggtttcaccagacaagcactgtaggatataagatgagagaaacagggggaatgaaggggtgtttgcaagaaggagatcagaatgatggatcaggaatcaaaactggataaagaaagaagtaaacacatgagatggatgaacacagacttgacagttcttgaaaagaccgaaaaacagggtgggctccaaagaagccaaacagaaggatagaaggttgtgaagggggaaaaggagatttcggagatgcaattagtcatcagtgaggacaaggtcaaatgagtcactggagagagaaggaattgagaagctaaagatattgaatggaggtcaaggtgctgaataaagtatatttcattataagactaataataaaattcgttcacaacttcctctaattagatttgttatctgctttgaataaagataccattaattagtctaagtactttaaatttaatttttttttctgaagggatatttatgggacttcaaagaacaaagttttacccaaacaactaagtttttgttgggtgaaaatataaagcatttttttccatgtgaaacttctttgtatcttgatatctcttctttttcttctgtgagtttttttaggcggcgagtctattaacacaatcttttaaagattgacctgtttattctctctgaaatagttcatgtcatagcttgtttcttctaagctggactttgcccccttgtactttccttgcaactttttcatcgttttttaaaacaacatttattctcatatttacttattttctcaaatgtttgtttcctttcttcctgctccatctccctgttcctcagattcctttccttaggagaaaaaattggggtatttcccacagcatgctgtgagaaaagtctctgaacttcctgggggtgggacttgtgaacacagagggtcttgcacactattttatatccagcgagtgttcagattacagggccaggcctcagatacaggtccagtttgtggaaggcggtccctgaaacattatgaacactgctttgctccttctgtctcctagtccctcttcttaagctcaaacgttattaattgggagtctgttctgggctactcattgtactgattaaagtaattcacattaatgggcaatgactgatctactcaattctcttaggggaagtcacatttctaaaatgtgcatattaatccaaataaaaccctgattcatgagataaatgtaaagcaaatgattaacactctattcagggttttctgtcacagaacaaaatattttcttttctcttggggccccaaaacagccttctcatcccttagaaagtgggctaggacaatgtaaaattggacagtagagttgtgtgtgtgtacgtgtgtctctgtgtgtgtgcagcacctgtcacctcatctacacatctctctagctcatgatatatgtttcaaatcatgaaccagagacattcatatatgaacatggttaagacatattcattctttctttctttcttttcttttctttctttttttttttttttgagacggtgtctcgcactgtcgcccaggctggagtgcaatggcgcgatctcgactcactgcaacctccgcctcccgggttcacacgattctcctgcctcagcctcctgagtagctgaggttaagacatattcttaacgagtaagttctttgtctaggataatattttgtaattttccacagaatattcttcagatgcctaacttgatgaaggttttcaggagcctagtcttagaatcatagaggttcttggctcctggttccttcttaaatccaattgttcattactggaatatacaaatgagtagggagccagaaatgataggcaccagaaactgaggtttccatttctcaatgtggcctgaactaaatgaattaaatctcatcctcctatgggacgtgaaggaaaagggctctggctgggaagtactgctgtgcagtggttagtatagtgggtctgagggtcaaatagatttgagtgcaactcccaacccaactcctactactagctttgggacctcgggtgagtcacacagccctcaggtgctacagcttctataaatagtgatatagtattcttacttaaagtgtggctgatcagagcagcccttccgtggatcaaccaccccatcagaggatctatgtctaggattgagccttttctgccccaggaggttctttcaggtccagaggctttcccgtggagggaagagaggcagcaatgaaatcagcgtataggcggactgggctctttccccttcatgtctgcagggcaatgacctcctagagtccgctatgcaccccccacttgcctctctgggcactgcgaggtggagcagttgtaggaccaggaaaagcaagaacagagcgtcctcttcggctaccctacccgggagttcaggcgctgcgcctggccctctggggcgtgtttgaccataactcgcaccgcttgctcttttcccatttcagcaaagtcttgagcctgtattctagtaccttttatcagccttgggtaagcagctcgcacggggtatataaggagaatcaactttctgaactgaaaaaaatgtaaatagtaaagtcagtcgtgcttcttcctgccggtgactgtttacaagagggaagtcagcggggcccccaagaggtcgctggtggcgcaggaaccgcatccagattgtaaagaacgggggaaggaaaaaaaaagaaaacacccagaaactttcttccttgttgcgaataatcgccgcctccccccctccgcccccagcagaagcagtaacgtgacacccgagcgaaatcccgagacccgagcggagagggaggggagagggaggagagtgctgcggagcgccggagggagaaaggggaggagaaggaggaaaacccctgtcaaggaggtggagcgaggggatggtgtccgcctcctgttcctccctgccgttttttagagaagcctgaaccgggacaaaacacgccgagacctacagacacaaagccggggggtccacgctggcgctggaggcgagccccggcggccgcaagcgagcccgaggcgcggcggggcgcggggcgtggggacgctagcgggcgccggacgggcgcggcgccccgtcacgggcagcgccccgaaccggggccggacacctcggccgctcgggccgcggcggcggggaccatgccgaagaaagtctcctgagcccggcaacttcggcccctccccgcccccacccggctgccctccgcgcggccctccccatgtgcagccggccagccgggctctcctcctcgcggcggatgggtgaccttttcctggcacgggcaggctgtgggaggcagcggagcaggcgatgaagaagaagcagcagcatcccggcggcggcgcggatccctggccccatggggcccctatggggggcgcccctccgggcctgggcagctggaagcgtcgggtgcccctgctgcctttcctgcgcttctccctccgggactacggcttctgcatggccaccctgctggtcttctgcctgggctccctcctctatcagctcagcgggggaccccctcgcttcctgctcgacctgcggcagtacttgggtaaggaagctgggcaggcgctagggcggcgccgacagcgcaaagttgtgcggcggggagagggtcgcggcggggacttctcgcgctgccaccgcgcgccgccgccgccccgggtctctccaggtgctaagcccgtgagcatctgtgccgcggtcgggagcgccttcttcctcccgcgcgtccgactgtcctcaccgaggcgggggcgccgctgggttgcgctgccggcaggtaccccggggcgaggcaccgctcaccttccccccgccccacctccgccacccggatccggactggggcggagtggatgggtgtgtggggtgtgccggagtgtgtgtatcttcaggcctggcggcgcggggagtggcgaagggaagggaaggtcctcttcgttgcattgttagtgaccgcagttcagtcccgtcccgcgccccggggagtgtgggtgggtttagccctttgccaccgtccgctctgagaattctgtcccgcagatcccccgcctgcccgccggccctagtggctccgcgctgtccccgggctggcttgtcccttggctgccgctgcccaccccgccgcccgcagctagcctggcgcggggaacgggttgcatccaggggtttggggatgcccgagggcgctggtcagcctggccagcagtgtcgcccccagtaacccgaggatcctcggcgctgtgtgcgtctc

SEQ ID NO: 11141 - DNA, 6000 bp, Homo sapiens
atttgtgtatctggtgatcgagatgtctggaagagtggggagaagactgaggggcagatggggagtaagaagggtcagaaagctattttggttcagcagtatcaataatgtttttgctttaaatcattgtcttcttcaatgttgcttcctttgtcactcctgtaaatatgatagcccatttattcttctaatagaaaatttttcataattatttcctcacataagatgtttatggctttatatatatgtgtgtatataaagaggaggcacataatttatgaaagcagattttaaaagcctttctacagatgaaatgtaaagttcaattgcattttttcttttggagatgggtcttactctgtcactcaggcaaaagtgcagcggcacgaacgtggctcactgcaacctcaaacagttctcccaccacagcctccaggtagctgggaccacagacatatgccatcacatccagctaattaaaacaattttttttttttttttttttttttatttagagacggggtctttctacattgctcaggctagtcttgaacttctaggctcaaatttcttgatttcttccaaaagtattttctgcttgacattgtcatttgaagaaagatagttttaaaaaaatttgaagaaagagactatttttatccctataagcttgaactagggctttcatactgagtaaaagacagtatacagtgtcattgaggatgggtcatattatggctccgttgtcgaacactctagatctggacactgaaaagtggactactgatggattttatgcctctgctataaaaaccagcacctggggctggacgcagtggctcacgcctgtaatcccagcattttgggaggccgaggcggccggatcacgaggtcagcagatcgagaccatcccggctaacatggtgaaaccccgtctctactaaaaatacaaaaagaaattagccgggcgtggcggcgggcacctgtagtcccagctactcagaaggctgaggcaggagaatggcgtgaacccgagaggcggagcttgcagtgagccgagatggcgccactgcactccagcctgggtgacagagcaagactccatctcaaaaccaaccaaccaaccaaccaaccaaccaaccaaccaaccaaccagcacctaggccctggatgcatgtttaaggtagctaaacactcttaggttacactattctgatgggaaagaccaccagaggtgcccttggatacctggtaataagggctatagaagaaattatggaaattctacaaccctgtcagtgactatagccaaccatgcggctatagccagaccctgcaatgtgctcatgggtccagagccccctatgtgttatctcagctcatgggctttctctgttcctgcataacttcacttgctaggaggctttccttactttggcctccatgccaccctgagacatgcccttgtcctttgcggctcatgacctcagtgcaggtttccaaattcataccctcagagcttgaatgattggtccagttcatctttttcacatttggtcatgtcctaggtcactggccagtctatagtttggctgatctttggttgggtgtctcaccatggtccagttagctgtgatctgaagtgggcgtagggtggggaggttgtatgaacttgagttggttgttcaagtaacaggagctgagagcatggcaattttccttagaacgatagtgagtgagtggtcaggtactgattgatatctccaggtaagcagagtttcaattttggttgctcttcacgaggaaagccagaagcccagagctgttttgctagagtgatagaactgagatagtgttttgagcagtgcccagtgggaacatctttgctgagaagaacgaataaagaattttggcaattaactatgtaactgagtcccagactctgctatcatctggggtggcagataaaaacacacagtccaaataaaaaacctgattttttattttagcctgaatcacccagatcacagcaggattttgcttgaacaacccagacagattgcatccattttctgctttactgtgcttgtggaagccaggctgttagtggtttcttctggaatgggagaatgtatcacaaaaaggttggaacctgaaaaatttctagaatttcattgttctgtgcttcttaataaacaatgtgacactaccaaggaatgtgtgttgaccctctttttttaaaaaaataaagatgtagtggatagcacgattttgatgaaatgtcaggctttatttttcatttgaaaaatgtgtgtgagggaatcaggtgtaatggcatgatacatctctttaaattatacttacgagattaaatttgtcctgtgtttcaattacactgtattatactgcttcatttaaattgttgttttcttcttttttaattgttcaacctaattgtctaatagtgatgaatgcaatttaattagacacttttccttgaaggatatatatatattttccctataataaagcacagaatagtttaaaaaatgtattggtccaagcacacatttttatttttagtgatttcattagaacaataaacttcaaaatgattcataacaacctttctggattgatttgatggaactgtttttacccattcactgataaacctgtcaacagtttcctctcatgacacatacaaagcacgtgtgttcccatagtgtgtccttgtgtgtaattccttgtgctggttcagattctgaaatggagctttaaaagcatggaggcttgagttggtccatgtgagtttgaaccctggccgcagctggtatgggtacttaatctcagtatcccacggtttcctcaactgcaaaatgggtttttagtagtacttacctcactgggttgctacaaagatacttaaactagtatctgacatctagtacagccagccctccatatctgtgggttccacatctgaggattcaatcaacctctggttggataaaaaatatctaggaaaatagctgcatactaggggaaaaaaaaaagaaaaaaatatccaggaaaaaaattgtgccagtactgaacatgactttgctcttttcattctctaaacaatatagtataacacatatttacttcacatttacattgttttaggtattataagtaatctatggattatttaaagtatacaggaggatgtgcataggatatatgtaaatactatgtgattttatatcagggacttgtcctggaaccaatatcccaaccctaatactaagggatgactatatatgctcagaagacatttgttgtcatttttattctcttgcactcaagaaagcacatattggaatgcaaacgaatatcaataatagttttttaaaggataattaagttaatttataatttacatacaatatacattgtacatttatattttctaatgaaaaggaaataatctataaccttcagttcagaattcattagctgtcctattttgagaactgttgctctatgtaattttcatctctgtattgatgtgtaaaactggttttaacaggtagctaaatgctgtttgaaaagcatacttcacccattctggcaactaaaataattgaaagatttaattaatttagaaaaaatatttcgctttcaaaacacttgaactgttcagagcatgttattcaataatctacctttcaccagaaatcataataaacacaataaaaatgcttacagaacccccacaatgcgttagtatacatgattattccttgtgtaagtgaatcttgttgagattttatgttcagtcaattgcaattaaatactttacatattaactaaaatgtgtcctgctctatgtattctggagaagttactctcagacaaatttacatatttaaattattttatgggctaactgataagtatagagaagactgaagacagttaagatcattgatttcaaaatgttttaaagtgttgattatttattttggttttctttctttcccatgccagttttgagatgcacctcttacttggcaggtgttcctctgtactgggtactgggacagagagaaatacagtagcaagagggagatcctgcctccgccccattctaccattctcactgccagaaagccagccttttttcaaggcttgtagagaagaaaaagagaaaatatttttaaaaattcatttaaagtacctactgcataaaccacaccagacatgatgagatattaaaatgtcaatattattaaaaatttttaatatgattttacagcccctttgctactttaaaatgtttatcttagtgttaaacaaacaatcaataacctcataaacttaaaaattgctgcaggaaataccggacagtttatggaaggatcatatgacagaaggaagggctgaagagtgtgagaagctagacctctgcaggttaccgaagtcaagaacctcattaatcggtaacaagaagtgcagagcgggcttttgagtccatgcctgagtaagaaagtcccaaaaaacactcacagaagatatttccttgcccctgcttttagtttagctgtagctaactttggattaacaaaatttatgtgctgaatgatgttttatttttttttccaactccacatgcctgtctagacttcaagctttattacgaataaagagaaaatcggctggatggcataaaaaatatttcaggcagattaacacatgatttacctcttcttgaacatccatcttaatggaagtgctaagaaagttagattcgggcctggcttggcaaaagcaaggccaccccctcctctattttttcaatgagattttccaatcctagtcaaatggtggtgctagttctttatttttgagttactgcatttcctaatttcatggtcataacagcctcctgtctaccgactcagaacggattttaccaaaactgaaaatgcaggctccatgctcagaagctctttaacaggctcgaaaggtccatgctcctttctcctgcccattctatagcataagaagacagtctctgagtgataatcttctcttcaagtaggtactcctatttcttctcaatttattttttcctttttgatataatgtgctactgtttacaagcatattgtaacttcagagcttacctctcatctttaaaaaatgttcatttttttgtctttctgctccaaggatattttgcaaagttactggcaagtattcctgggatgataaaatgtgaaatctaaacttggtacagtggaaattcacttctagaataatatttagctgaggcagagggcaatccgactacccttttcttagtacagcacacacaggctgcctgtctgttccagataacataaatgtattggatctagcactagctaggagacactgtattgttgaactgtgttagaattttataagctcttaattggacaaatctcagagtagcatgaacacactacctgttttctgaatctttggagccataacttacgtgagtttgaactaagcgatgtgaataagccattatttgtttcctaaaggcagtcaagttttctgaaaagctacacatttagcagcaaaagaacgagcccctctgtcttgaaatgggcctctgattttaagcaagctcttttgagtcctggtgtcccattttctcagttcctttttgcctcacaatggcacatacataatgactccaccacatatagcagtgggctactcgggtaatgatgtggcagtcacaagacagggcagaatactttcattttggttagaggaatgccacatgtcttaggaaatgctcgctgaactgtaagtttcatactttgtcaagaagataaccagtattctctcaaacaagtccgtaggagccaacatgattaaaagattttaaagcaatttactcgatagaagggttgggcttaatcaggacttgtgatcatggcaatggttcctgcttaa

SEQ ID NO: 11142 - DNA, 6000 bp, Homo sapiens
tctgacagccatttaaagaagaccaaggctgggcacagtggctcatgcctgtaaccactttgggagaccaaggtaggaggatcactagcttgaggccagttgcttgagaccagcctgagcaacatagtgagaccttgtctctataaaaaatttaaaattaggctgggtactgtgactcatgcctgtgatcccagcactttaggaggccaaggcaggcgggccacctgaggtcaggagtttgagaccagcctggccaacatatagtgaaaccctgtctctactaaaaaaaacacaaaaattagctgggcgtggtggtgcacacctgtagtcccagctacttgggaagctgaggcaggagaatggcttgaatctggggaggcagaggttgcagtgagccaagatcacgccactgcactccagcctgggtgacacagcaagactccatctctcaaataaataaatatataaataaataaataatttaaaaaatttaaaaattagccaggcatggtggtgaatacctatagtcccagcagcttgggaggctgaggtgggaggatcacctgagcctgggaggtcaaggctacagtgagctatgatagcaccactgcactccagccagggtgacagagtgagactatttctaaaaattaaaaaatatacattttttaaagaagactgcagggaggggcattccttttcgagcccctgaatcatgacatgcgaatcatgggtactgtcagtgagtgacagcagccctgcttgggggcagaatggcacagctctccagataccctgagctgttctaaatcaccaagtgctctgcgtgaaaacgcttgggtgtgggtgtgttctgtgatgtggcccctcacctgactaagctgcgttctctaagggtagctctttatcatacaagtgagtgtatttgagtacataataaagaggcacataggaatgtgtggactggggagtatttactggcaccccacagtggggttctcaaacctgaaagtttcaatcactggggaatctcggtgaaatgcagattcccattccatagttgggacaagccaagaatctgcttatgtgctaggctgtcagatgatatggatgctggtggaccactcttggagcaggccttctcatctttggctgcagattcccatctgtattagtctattttcacattgctataaagaactacctgaggctgggtaatttataaagaaaagaggttttattggctcatggttccacaggctgtataggaagcatggctgaggaggcctcaggaaacttacaatcatggaggaaggaaaagagaaaggaaggaaaagaggaaggtcttaaatggccagagcaggaggaagagggtgcaaggggaggtgctacaccttttaaacaatgagatctcatgataactcactatcagaagaacagcaagggagaaatccacccccatgatccagtaacctcccaccaggcccctcctctgacattggggattacaattcaacataagatctgggcagggatacaaaaccaaactatatcaacatctcggaggagtttttagacatctcaatgcttgatatggtttggctgtgtccccatccaaatctcatcttgaattgtggttcccataatccccatgtgtcatgggagggacccagtgggaggtaattgaatcatgggggtggttacctccatgctattctcatgatagtgagtgagttctcatgagatatttgcttggcacttctccttcctgctgccatgtgaagaaggatgtgtttgcttccccttctgccatgattgtgagtttcctgaggcctccccagcccttcagaactgtgagtcaattaaacctctttcctttataaattacccagtctcagatatgtccttatagtagcatgaaaatggactaatacagtatattggtattgggtagtggggcactgctataaagatacctgaaaatgtggaagcgactttggaagtgggtaacagggagaggttggaacagtttggaaggctcagaagaagataggaagatgtgggaaagtttggaacttcctagagacttgttgaatggctttgaccaaaatgctgatagtgatgtgtacaatgaagtccaggctgaggtggtctcagacggagatgagaaacttcttggaaacaggaataaaggtgactcttgttatgatatagcaaagagactggtggcattttgccctgccctagagatttgtggaacttgagagagatgatttacggtactggtggaagaaatttctaagcagcaaagcatttgagaggtgacagagcataaacgtttggaaaatttgtagccagatcatgcagcagaaaagaaaaacccattttctggggagaaattcaagctgacagcagaaatttacataagaaacaaggagctgaatgttaatcaccaagacaatggggaaaatgtctccagagcatgtcagagaccttcatggcagcccctcccatcacaggcccagaggtctaggaggaaaaaatggtttcctgggtcaggtccagggccccctgctgtgtgcagcctatggactctaacccagccactccagccatggttaaaaggggccaaggttcagctcaggccatggcttcagagggtgcaagccccaagccttggtagcttccatgtggtgttggtcctgtaggtgcacagaagacaataattgaggtttgggaatctccacctagatttcagaggatgtatggaaatgcctggatgtctaggcagaagttttctgcaggggtggaaccctcatggagtacctctgttagggcagtgcagaagggaaatgtggggtcagagcccccacatagagcccccacatagagtccccactggggcactgcctagtggagctgtgagaagagggccaccatcctccagaccccagaatggtagatccactgacatcttgcactgtgtgcccagaaacgctgaagacattcaactccagccgtgaaagcagttgggaggggggttgtaccctgcaaagtcatagggcggagctgcccaaggctgtgggagccttacctcttgcatcagcatgacctgcatgtgagacatggagtcaaaggagattattttggaactttaagctttaatgactgacctattagatttcggacttgcatggggcctgtagcccatttgttttggccaatgtctcccatttggaacaggtttattttacccagtgcctgtacccccattgtatctaggaaatagctaacttgcttttgattttacaggcttatagacagaagaaacttgccttgtctttggacttggacttttgggttaatgctagaatgagctaagactttgggggactgttggaaaggcatgattgtgttttaaaatgtgaggacatgagatttgggaggggccaggggcagaatgatatggtttggctgtgtccctacccaaatctcatcttgagttgtggttcccataatctgtacatgtcatgggagggacccagtgggaggtaattgaatcatggagacagttacccccatgctgttcttgtgatagtgatctcccgagatctgattcttttataagaggctttttccccctttgcttggcacctctcctccctgctgccatgtgaaggacatgtttgcttccctttctgtcatgattatacatttcctgagacctccccagccctacagaactgtgagtcaactaaacctctttcctttatcaattatccagtctcaggtatgtctttattggcagcatgagaacagactaatacaatgtcccacaccaatgaaagactctctgacagcaggaccaggatctcagcagttctgctcaatgattattgcccaggatgagttggtgtggtgtgaggggactgagtgggtgatgggactgattcctaccactttggaaatcaaccaaaagtatcttgcaaccatctctgatagtatgtgctttaagagggtgagaattaaaatgaacagttatctttaatgttaccaactctgatgctcctcaggactgatccagtcccttaggtctggcttgcatctgtcagccacagagtctcagctgaagctctcatggaagttcttgatcttctccatccaccctgccctcctgttcttgactgcacagccagctgccctaacttcttcttggcaaggctaatagggctctgaggagtctaggtgaaataaaactggaagttttatcttcccagagagcaggggttctcaaaccttgcccacgtgagaacaacccgggtcattctgatttaataaatctggaacagggttcacaccttgggggagttttaaaagctcccatgtgatcctaatgtgaaatcagaaatgataagataaaatggaaatttaaaaactccacgtttgtattgtcattgacatttttagaactggttctaaaaattaaaggtgctattgagatgataaaatgtagaaatgattttcaaaatatacatttaatgattttttaaaatgtattttttacaatctggtttctccccctcccattctatacttggcatttttgaggtagccaatgggcaaagtgaagggaccctggagctggatttggagtccagcattccaggagagcgaattagggtggtgtgttaatgagggcaaggctagcagtaacaagtaacaccctagcctttccaggtttaaggcaggagtctggtgctcacagacctgtgcaggcgggaagaggtcagggtggccctcctctgtgcagtcaggcgactccccagctgtgtctcccaagatggcctggggcctctcctgccgcctacagggaggggagggggaaggaggaaaagggcggggctccacagggagggcctggctgggtggggccatgtgtgctgtgctccattggccagagctcagtcacgtggcccctgcacgtgtgcaacgaaggaggccggggtcccagcggagggtgagtcccagagccccagcctgggtaaaccgtgggcaccgggggccctgccagccgctgtgcctgctgccctggagcttacactccaggcggacgggtcccgccgaggcagagggaggctctgaaggtgtgcgctctttctcttcttttctccacagatatcgcaaacggcaccagttcaggggggtaccgcccgcctcccagaaccaaagaagtcatcatcaatggccagaccgtgaaacttaaatactgtttcacctgcaagattttccggccccctcgcgcctcccattgcagcctttgtgataactgcgtaggtgagtagtgcctgggcggagcctggcgggagcccgggtcctccgggtgggtttgcgcctctccaaccctgcgccacggaacactcagtaatggttaatatttcagcgcatttgcatgttgccactgattgagttcaccgggcctagagtcaccaaatatcttttttattctctttacaccctgcaccgcccttggctgcgagggcctcccccagcacaggcacgagaatggggtcctctgtctccccaggctgccaggtcagcaggcacgtgaaataaaatcatgtctcccccaggcctctcgattgccacaggtctggccacacacctacgggaggcacccttgtgcagttgtttgtcccagctcctcagaggggctgggggcgtttaatccccactccttctggggacaggaaaagaggcaggatccgggagacctctcctccaggggctggagttaggatctgtattcttcccggagacgacgaaggcctcccctctctgcctcccaacttccgccaggacaggctagggaaacaggcagagggaactgagagctcagaggtctgcagctgtaaggctgggccctaccaccggcccagcatgggccttctgcaagtgacccgggcccagcccctgggattatttggcaagcgcctgttgtca

SEQ ID NO: 11143 - DNA, 6000 bp, Homo sapiens; identical to SEQ ID NO: 3764

SEQ ID NO: 11144 - DNA, 6000 bp, Homo sapiens
ccttctgggcgctgggtgggccaggagagtcaggtccatgcttcagcgtgcagcgtcggctctgctcattcactcacttggcccgcacaatgtcttattacacaggtgagggaggtggggtgaccccactgctgggtcccttctcactgggctctgactggagacgacagccagagcagtggctggctggcaggggtggccgaggcccccagcagggagcaggaggagcaagcaagctgggcctaggggttgggggaggccccccagggaaagcctagggccaaggcgattgcgtggctctgatgcacacagaggagtctttgctcttcctcatgaacctgcctccagcatcagctgcaatagtggttctctcttcactttgagacctgggtgctgccactctgctgacggccacgcatggtttttgtccaggtgactcgcgactcgcgcacctacagcgttggggtgtgcacctttgcagtcgggccagaacaaggaggctgtaaggacggaggagtctgtctgctctcaggcaccaagggggcatcctttggacggctgcaatcaatgaaactggattacaggcaccaggatgaagcggtcgttttaagttacgtgaatggtgatcgttgccctccaggtaaatatttgcaatgaggtaaataaacttcaagctcatagtaaactagaaattagacatagcagcagaaagaagctgcggagtggagctccacggtcctatgagtgctgtaaccttgggcgtgaatgtgagctgttcctctgtacacccccggtgtgaatgctggtgtgtgaatcacgctgtgttctctcagttgcctggtgagttttggcaggtgaatgccggttgtcacgtaggtgctttaggatgggcagcttccttagggactgctgctgcattctgaggtgattgtgcctggcgaggcacagctgccacactgataatgttcttcttctttccagaaaccgatgacggcgtcccctgtgtcttccccttcatattcaatgggaagagctacgaggagtgcatcatagagagcagggcgaagctgtggtgtagcacaactgcggactacgacagagaccacgagtggggcttctgcagacactgtgagtaggacggctccgcgtccccacatggcctggggccttgatactgtcaaggctcgattcacactgagacctttgtggatgccccagtcagtggcaggaattctcttgcataaaatattttcttactcgggctgtttcccacagagaaacgtttgaattgctctgtgggattgctgggtaaccgtatctacagaccgtggtagagctgccgtgagatgctgtgctgggtggctggctaggcccactcactagctggagggccttgtgtccacataccaggttttagccctggtggttcagattatgcctcaggaaaatgaatgtctgctatgggtcttcaggattctgaagctagtgaggattccggtaaaccaggcgactcatttattgactttccgccatgtggcagcccaggtggggatggaggtttcttggtgagccacactcagtgccttgcccctgcggtgctcaggaagtttcatgagaggagccaactgctgtgacttgtgtctacggaccgtgagatgagggaaatgcatgaaaaattactaatttttggccaggcgcggtggctcacgcctgtaatcccagcactttgggaggctgaggcgggtggatcacgaggtcaggagattgagaccatcctggctagcatggtgaaaccccgtctctactaaaaatacaaaaaaaaaaaaaaattagctgggcgtggtggcgggcgcctgtagtcccagctactggggaggctgaggcaggaggatggtgtgtacccgggaggcggagcttgcagtgagccgagatcatgccacttcactccagcctgggtgacagagtgagactcggtctcaaaaaaaaaaaaaagaaaaattactaattttcataaatgtccagtatcgggggaaccagcccccgatttttcaacgtaggttcttttctatttccctaagtgttggccggtctgagaaataaggggaaagagtacaaaagagagaaattttaaagctggtgtccgggggagacattacatgttggcaggttctgtgatgcccccgagccgcaaaaccagcaagtttttattagcaattttcaaaggggagggagtgtacgaatagggtgtgggtcatggagatcacatgcttcaaggatgacaagaggtcacaaggcagaaggtcagggcaggatcacaaggtcagcgcgaaactagaatcactaaataacttccatgtcccactgtgcacacattgtgagggttcaagagcagagaaccggtttaactagaattcgccaggctggaatttccaaatcctagcaagcctgggggcgctgcaggaggccagggcgtgtttcatcccttatctgcaactgcataaggcagacacccctagagtggccatttaagaggcgcccctgccttcctcccgggaatgcattcttttcccagggctgttaattattaaaattccttactggggaaagaattcagcgatatttctcttacccgttttcggtaataagagaaatatggctctgtcctcaccggcccacagtcagccagactttaaggttatctcacttgttccttgaaaatcactgttatcctgttcttaaggtgcccagatttcatattgttcaaacacacatgctttacgaacaatttgtgcagttaatgcaatcatcacagggtcctgaggcgacatacatcctcagcttacgaagatgatgggattaagagattaaagtaaagacaggcataggaaattataatattgattggggaagtgataaatgtccatgaaatcttcacaatgtatattcttctgtcacggcttcagcaggtccctccgttcatggtccctgacttcccgcaatagtccagggaccaaaatgggatgtattaaggaaccaaacgtgttaaatttacgaaggattgctatagctttgttttgaggcttattttgacaaaacgttattccctattttctgaatcacactcctgttttcaagtacttgtaggtattacattattatcttaaattttttttttttttgagatggagttttgctcttgttgcccaggctagagtgcagtggtgcagtcttggctcactgcaagctccaccttctggtttcaagtgatactcctgcctcagcctcccaagtagctgggattacaggggcccgccacctcacccagctaatttttttgtatttttggtagagatgggatttcaccatgttggtcaggctggtctccaactgctgacctcatgatccgcccacctcggcctcccagagtgctgggattacaggcgtgagccaccgcgcccagctatcttattttttttcgtgatcattagtagattggtcaaatattgaatacccgtgtgaggaatcacctagggctgtggggttattaagaagtacgatgaaaggctgtgtgccaaggagctgggtctatttggagtcaggatacacatgagtgaatcaacatgagatgtggccagggcagcacgtggtgtgttgccagatggcggatggagtctgcaggtgctcctgaggcagcatggggaaggcgtgcaggaacgtgccctggtgcaggccttggtctgacattctcccgcctctgctcccctgaaggggtggcctgcccctccacacttgtgggtatttctagtcgggtgggatgagagactgagaaaagaaataagacacagagacaaagtatagagaaacaacagtgggcccaggggaccggcactcagcacaccaaggacctgcaccggcatcggcctctgagttccctcagtttttattgattattattttcattattttagcaaaaaaggaatgtagtaggagagcagggtgatgataaggagaaggtcaacaaaaaacatgtgagcaaaagaatctatatcataattaagtttaagggatggtactatgcctggacatgcacataggccaaatttatgtttctccccacccaaacatctcagcggagtaaagaataacaaggcagcattactgcaaacgtgtctcgcctcccgccacagggcagcttttctcctatctcagagttgaacaaatgtacaatcgggttttataccgagacattcagttcccaggggcaagcaggagaaagtggccttcctccatctcacctgcaagaggctttcctcttttactaatccacctcagcacagaccctttacgggtgtcaggctgggggacagtcaggtctttctcatcccacgaggccatatttcagactatcacatggggagaaaccttggacaataccgagctttccagggcagaggtccctgcggccttccgcagtgcattgtgcccctggtttattgagactagagaatggcaatgacttttaccgagtatactgcttataaacattttgttaacaaggcacgtccttcacagccctagatcccttaaaccttaattttatacaacacatatttttgtgagctccaagttgggtcaaagtggctggggcagagtggctggggcaaagctacaaattaacaacatctcagcaaagcaattgtttaaagtacagggctttttcaaaatggagtctcttatgtcttccctttctgcatagacacagtgacagtctgatctctctctcttttccctacactccccagcaaacagctaccggacatccagcatcatatttaagtgtgatgaagatgaggacattgggaggccacaagtcttcagtgaagtgcgtgggtgtgatgtgacatttgagtggaaaacaaaagttgtctgccctccaaagaagttggagtgcaaattcgtccagaaacacaaaacctacgacctgcggctgctctcctctctcaccgggtcctggtccctcgtccacaacggagtctcgtgagtgccttcccagtccacccgcggcgccacaccctcagcatgtgaacttcagactgcttgacgatggttggctcttttgggttctcaagatgggaatactatgcccatgtgaggctgatggtggttgagttgtgactgttcctggaagcagcccgcagtgtcaatcctggcacagagggtggttctgaggtcagagtgggggcaggagctttggtgactggaaacggagcctctggagctggaagaacctgggcggactgagttaggctgggtttgatttgcgtttgtgtgtagctcaggttgtgggaggcgtgtgggttttctcgggtctttggcaggagctccttaggctttgctggctggggtcagcccatggtcctgaccactctgcgtggggagcgcccgcttggccaggtgctcctgcaagacatcaccgaggagcaggggcatggactcacagggtttaagtggttctaagtgaggtgggaaacttgccgagattctagccactgcctctcccagccccggagcccttctttctactgtaccacgctgtgtccagggtggccgcaggtgtggacattccactccgcgtgtgtctggttggtgagctcccttcttcagtgaagacttcttttgccctttttttttttaattggaaaagctattttagtgctacattcagtgatggaatggagcccttagttatcagaacctttctctgaaagtaaagtgaagagccctcctgtgtcagggcagagacgtcacttgcatgccttttacctgcccctttgtgtcgttttctaggtactatataaatctgtgccagaaaatatataaagggcccctgggctgctctgaaagggccagcatttgcagaaggaccacaactggtgacgtccaggtcctgggactcgttcacacgcagaagctgggtgtcataggtaaggcctgtgggtc

SEQ ID NO: 11145 - DNA, 6000 bp, Homo sapiens
atagagatactcattcttttttatgtctgcatagtattccattgtcagactggactgccatttatttaactaatcacttaccgaggaagcattaagtttgtctccagtctttgctgttatattcacaatatatcacgaaatcttggcatgcacagacatttgcacacgtgtaagaaatttttagaagtgggagggtgaaagtaggctgcatttttatgttaatactgtcagagtgttttctgtagaaatcttagctatgcacaattatactaataatatgtgtggttctgttccctacaccctccctgacccaggggattatcaaatctttacatattttctagtttgatgtgcaaaaaattgtatttggtggtggttgtgacttgcatttctcttgttatgaaggaagttaaacatctttttgaaagtttttgagccatccatatttcctgttctttgaacagtctcttcatttcctttgcctttatgtgtgtgtatatgctgtgagaagcattattttcttatgtatttataggtacactttatgtatgatgtaaattaacccttctggatgacttgtaaccattttcctcgagtttgctgtttggttttttaaattttgtacatgatatttttgttatgtagaaacgtatggtttggttagagttgtatgaattaatcttcttttttatgatttcttatgttagctttaaggcttggaagattcctggaagactggggggaaatcctatgttttcttctaacatttttatgatcttataacttctttattttggggttggagatacctgttttgcttttctgagctattaggataaattgctagaaaggtcagaggatataaccagcatttcatgcagacgttgacttgcttgtaacaacgtcctaaacatttagtttggcagtggcccttattaatgtaaggattagaggctagccagctgttaagcagcctttccacctccgtttgggagatagctgtcttcccaggtcacaggtctccctttccttcttcatcttcctgttctgaaccatctgcagatctctccctctccctctccgtctccctctgcctctctgtagcaacattttctgcaggtgcctttactttggcctttagtccaagataggattgagtcgaaagttggtgtcatttaaaaacatggtgggggctgggcgcggttgctcacgcctgtaatcccagcactttgggaggccgaggtgggcggatcacgaggtcaggagttcaagaccatcctggccaacgtggtgaaaccccgtctctactaaacatacaaaaaaattaggagggcgtggtggcgggcgcctgtagtcccagctactcgggaggctgaggcaggagaatggcgtgaactcgggaggcggagcttgcagtgagcggagatcacaacactgcactaactgtctgggggacagagccaggctccgtctcaaaaaacaaaaaacaaaaaacaaaaaaacatggtggactttctgaatctttgtcctgaggttgccacaaactggtggtgtgtgggagccagcttggcttctattgactctgagcctgctgcacgtgtctatccaacttcacattcagtaatgtcatgctggcagcttgaaattcaccatggtgggagcatttacaccataggaattggcaaacagtggagatcagggttttttttcttcatagagccggttgttaaacatttatcacactaatgagtgtgaccctggaccacttgaaaaaatttttttggccgggcgcggtggctcacgcctgtaatcccagcacttcgggaggccgagggaggtggatcacctgaggtcaggagttcaagaccagcctgaccgacatggtgaaaccccgcctctactaaatatacaaaaattagctgggcatggtggtgggtgcctgtaatcccagctactcaggaggctgaggcaggagaatcgcttgaacccaggaggcagaggttgcagtgagccaagattgcgccattgcactccagtctgggcaacagagtgagactccatctatctcaaaaaaaaaaaaaaaaaaagagagagagaggccaggcatggtagctcatgcctgtaatcccagcactttgggaggccgaggtgggtggatcatgaggtcaggagatggagaccatactgactaacacagtgaaaccccatctctactaaaaatacaaataattatccaggtgtggtggcgggcacctgtagtcccagctacttgggaggctgaggcaggagaatggcgtgaacccgggaggcggagcttgcagtgagccgagattgcaccactgcactccagcctgggcaacagagcaagactctgtctcagacaaaaaaaaaaaaaaaaaaagaaagtttctttcctctctcctccttttcacagatttgagtgcctgttctgagctgagcattgtgctatgtgttggggatacaatgatatgtgaaagtagacagctcagcttccatagagcttagagacttctggggaaggcacacccaaactgatcaagtaataatcttttcattacaaagtgagttaagcgtgtagaaagaaagggaattgagagactagaacaacaacaacaaaaccctgacctagacagactggtctatgtaagaaagtgacatctgagatgagagctgaggtttgagtaggaggtagagagagaggcaaaagaggagagatgtgtgtgttttccagagacagcaaatggcacttgcaaaggccctgtggtgtgtagggcctggaattgatagcaattgatatgggaatggggggtggcgatggcttataaaccgtgctaagaacttttcctctaattttagagcaaaggaaaaccattaaagagtattaagtgggataagggatatgatgcagtcagagttcgtatttttgaaaagacctctctggctgcagtgagatctcgcgtggtggggaggggaggctgtgctgagtgcacaggagaaagccagcgaggcctgtagaagatgctgataactcccccagggctgacggggaggcagacactctcgggagataccagggagatgcccttagccagctgaggtgaggccttgggaatggagggcttcaatggagggcatgtggagtgagacgagggcctgggcccaaacaccgcacgtacgatggagacttggggctctgtagccacccataggcagaggggagggaggagagcttttgacagggaaaggcagcctgaccagaggttctggaggaaactgggcctgtttgggaagcagacatgctggcctgcgcaggggttctggggatgaatagtgggaagtcctactggaagctcagaggccagacaagggggcctgagcctgttcccagggctgtcgatagaaaactcggggcctttggcgtgttctgccattttctctggccctcctactcaacaagggaggatgctaattaagtttccacacagctgaaagacccagatatgtgaaaccatggggctagaatttgccttcaaattcagctggctttgcctttgctaattgcttagtctaggtaaaagattgtcctgggcgtggccatgtttaatatgattatctagtccaagccttcagtttagatgagaaggctgagctggagggccattggcttgtccaaagccaccaacctattagggtttgaattcagttctccttatcctctgccccagagtggcccttaccatgggagaggggctgggaagggctggcaggggctcccaccctttgtgacttctccctggcgctggcctttcagaggtgaccctcccgttgtgcttgagaatggtggttgctgtatgtttgggtttctggacagttcagctgtggctttgcatgggtggacttccgcagaacacctctctgggcagatttctctactctctgtcttcttagtcccggctagccaggcccccatcttgtcttgctgcttttaacaccacaggcccgagagacagaaaataagatggaaacctgcccacatcacttccctgcttgaagccttccatggctccccatcactgcagcacccatcaagggtgccctcagccctgagccccacatgtctttcctctcctcccctgccacccctccttgttgtagggggcatcttgtatatattaatagttcccagcccggtctctctcactgccttgtgccttgctcatgctattccacttgctcgagccccttccctccttccttcagccccttggttcctgctcatccctcaggtcagctcagtctccatctgaaggacggcaaccagctgtccccttatccaagccctcactggaccctggttggaaggatgcccgtctctctcccctcctgaagctctttgactttatgaggttaacaccataaatgtctgaactcatctgaacttgatgtcatgaaaagggcaagagtggccgggcacagtggctcatgcctgtaatcccagcacttcgggaggccgaggcaggtggatcccctgaggtcaggagttttgagaccagctggccaacatggtgaaaccctggtctctactaaaaatacaaaaattagctgggtatggtggtgcgtgcctgtaatcccagctactcaggaggctgaggcaggacaattgcttgaacctgggaggcggaagttgcagtgagccaagatggcgccattgcactccagcctgggggacacagtgagactctgtctcaaaaaaaaaaaataaaggggggcaagagtggcaggcctggcttgcagccccaactctgccacttgtcatgggtctctctcccagagcattactgcacctgtttcctcaatggtagaatgcggtcagtgctgcctgaccttgagggccattgtgaggacagacgcagaacactgggaagcgtgccccacccccacgtacctggcaaacagcccccaccctggaagcctcaggtgccttccttcctccccttggtggggtgaggacgaccgggatgagtcgtctgagaagcactttgaggggggaggagctgaaggccacacctggaagggcgatttattccttgggcgctgccaggtgtctgccgccttcacccagaaaccgatgatgttcggagccaggtatgcccttcagacaggaagcctgcatccagggtgatgggaggagccccaccaaaaagcaccctctacagggtttatgtgtctaagttccaacctgaaaacaaaacaggtcaccgggccacagggctcagagagaggccgggatcagaaagccaggggaccttcctgggtagccaaggcctggttagccaaggccgggagagtggggctctgcctggcgcttcactgcctcctggagttctcaggccagaaatctgagtttatgccattgagtggaagatgagctgcatgtgtttgaaagcctggcttgggtgtgctgcgtgaacatatggctcagagagagtggaatttgagagacgagttgttggtgactttgagctcatagcagcagagctcagagagcaaacgtaggggcaagttgaaaactggagaaagggctggggccccttcccacttgcagctgagattttatgggatgccatggactttgacctcagtattgtagaaaccttaatcttctgcaggctggggtttagttgttttgttctttgtgtcactattgatgagcagatctccctccacacaagtgatttagagattgacagggacctatttgtctgggaaagggcaggggctgttgagtgcatgaagtggattcctctaaaataaaccattgctgtgagaggataccgccagcacgcgcccacccatggcatctgcatggtattgtatcctgtcagacctctcttcggtctcttttggctacaagtaactaaaacaaatttaaattacattaacaaaatataaaaggaatttcttggaaagatgcagggc

SEQ ID NO: 11146 - DNA, 6000 bp, Homo sapiens
tatttagccaggtgcagtggctcacgcctgtactcccagcactttgggaggctgaggcgggtggatcacgaggtcaggagatcaagaccatcctggctaacatggtgaaaccctgtctctactaaaaatacaaaaaaatctgccgggtgtggtggtgggcacctgtagtcccagctgcttgggaggctgaggcaggagaatggcgtgaacctgggaggcagagcttacagtgagctgagatcgtgcctgggcactatactccactacactccagcctgggcaacagagcgagactccgtctcaaaaaaaaaatagttatttaaaatagatgatatattcaaatggctcagaacttacaaggtacagaatatatgatgaaaagtttcccttgtgtgccttccagccatgaagtcatctccctgtaggcaagcagtaccaccagtttctatactctcctctggagattgtttgcaatagctgaaatattctggagttttaccgggtagcagatactaagcgttatacatcttacatgctgaatagctgtaagataaatgagttacttagttttccacaatcagtgttccaaacatttgccatgtttaaatccctaaatgagttttcagtcttggcagcaacattgccttcagtgtcagaaagtgaagaaggccatcaagcatgaactctatcagattttgtattttctacttccaaatatattattcacccatcgttctgcattttcttcttaataatgagttgtccttgttctcttctaaggctaacccttccacctgtgttcatctcttcctgcggaattttgttacattattctttccttttgtaacgtcaggcattaatcctcctcagtgatttgattctgttaagccacacatctgcttatactgttcatccacatttgctgcacctacttatctttaccaagaccggtggcttcttgaaagagaaacagggacagcttttctcttctgctcacttcacatttattctctatcatggtctggtcccatatatctagtaaaactagtattgctaaggtcaccagcaacctaattgcctaattccttgttttccgttgttatcctgttgtagctcttttccagctcttcacaggatagtttcatctgaatgctccataagtacttcacattttatatgtccaaatcttttgccatgtgtcctactccataaactctttattgttttgatatggctccagtgattcaagctgttgtcttgttacttcttccgtttgtttttattccaaaacccattaatcagatatcagggatttctcttgctgaaatataccctgttcctgtctatccctgtcatttatggtttcagcctctctgtctctgttctcttttcctacttatgggtctcttttctcagaatagaaacttactcttactaaatgaatgaaatcattaaggatacttaaaatataacttacaacacagtttcacagtcattgaacaagtgtgtttgagtgcactctctcttaagtgcatgagctggatggtggaggattttaaaattatgagataatctttgctcttgacaagttttatctattggaggaaggagtattttatgtaagtgaaaagttaaatgccaataaacaatggcatcctgaagcatctcaatttattaagagtctggatacttcaaaggtgtgactgtctctaatccatattgatgcctggagaaatgatgctgcactgtgtttaaagttttaaataaaatttgttcacattttaaaaaaatttgttgagatacagtttatgtatcataaaattcatctgttttaaacatacacttagtaaatttaccaagttctgcaacataaattcagttttaggacgtttctatcaacccaggaagatctctggtcacactcttttttttttccttcaaaattatgtgactgatcctcacaggaaaattttgttaattagaatggaaatctctgtaggctgttaacaaggtacttgagagcagaggtgggcataatgtggttgcaagccacatctagcgatccccattcatttacgtattgtctgaggctgctttcacacagtagccccagagttgagttgaatagttgcaagagaggctttatggtctgcaaggccatatctgctatttggccatttacagaaaaagtttaccaagctctgttctagaaccttggagttcacaatatggtctgaataccagcagctttggcattttctgggtgcttgttagaaagagaatgataggctttgccctagacctgaattagatctgcaacatccccaaagaattggtaggcacattactgttcaagaggcactgctccaaaagttctgttttaattaatgaggtatgatgaaattcttattgctaatcccagcaaagctgtagagaagcaatatttcttcctaacataaagtgaagtctttatttcttttttttgagtcggagtcttgcattggggcattctcagctcatacaacctctacctcccggattcaagcgattctcctgccttagccttccgagtagctgggattacaggcatgtgccaccacacctggctaatttttgtatttttagtagagaacggggtttcgccatgttggccaggctggtctcgagctcctgacttcaggtgatctgcctgcctcggccaagtgctgagattataagtgtgagccaccgtgcccggccaaatctttatttttaaataatgatttttttttctcccatagtaatctcctcttaattgttctttttcttaggtagaagataaagaggaagaagatgtgtctggtgaacctgaagcttcaccgagtgcagatacaactatactgtttgtaaaaggagaaggtaatacagaagtattagttttaattcagatgtaggcattttaaaacgatgagcttgttcatatatatctgaatacccatatctgtaaagtaatattgttggcatttaaagggaatacgtaggtgatatagacacaataaaaaataaaccaaggggaaaaaataaaataaatactacctagtttaactagaaattgactgtccttttcaaagattttgtttttgagacagggtctggctctgtcacccaggctggagagcagtggccccctctcgactcactgcaaccttcacctcccaggtttaatcgattttcctgcctcagcctcctgagaaagatgatgttttaaaacttctttaaactgccacagcaaagtaactttgtcttttttttttttttttttttttttttaagatgtagtctcgctctgtcacccaggctggagtgcagtggtatgatctcggctcactgcaacctccgaggcctcccggtttcaagcgattctcctgcctcagcctccctagtggctgggattacaggcacgtgccaccacgcctggctaattttttgtatttttaatagacagggtttcaccatgttggtcgggctggtctcgaactcctgacctcgtgatctgtccgtctcggtcttccaaagtgctggaattacaggcatgagccaccgcgtctggccctttgtcacattttgagtgttaaccattaatgagatacttaatttttccaatatggtctaggttagagcctaggattttttgtttgtttgttttttgagatggagtcttgctctgttgccaggctgcagtgcagtggtgtgatctcggctcactgcaacctctgcctcccaggttcaagtgattctcctgactcagcctcctgagtagccaagactacaggcacgctccatcacgcccagctaatttttgtatttttagtagggatggggtttcaccatgttggccaggatggtctcaatctccacctcatgatccgcccgcctctgcctcctgaagtactgggattacaggtgtgagccaccacacccggccagtgcctaggttttattaaaagaaaataattatggctgataatttattgagggctatattctcaatacttggcatgtattatttagttctgacaaacccactgagcgtagtcattgtcgaactgaagtttggagaagaaactggtcagggctcccagttcataaatagattggagaacacaggatccagacctagatctgttggccccatagcctgtgctgtactcagtgaaactcagctttgtagactactgtataattattgaagacttaatattgaaagttatgaattttcttggtcttcttacattttctgttttattctcatgtgcttttgaactttatgcctgtaggaagtataattttattatgctttttttcttccatttttgtagctacatccttgggtcttaaccttcaaatttgcattttgattaattgcttaacgtggattgggattgcctgattaatttttacgttctaacagatgctagttttcagatgaaactcttggactttatcttttcttcattcttctatttacctgcacagataacactaagctggaggtgaaggtgacttcaccaacacacgtaaccctgctgcttgattatttcactgccaaaaatacgcaactcttttttaccacatgatttggatgtgatctggtctgaaattgagacgcttattgaatgcttatgtgggagtgctagcgtacagacaaaagggtttcagcctatacagcaacttgaaccaatttctcgttagtaggtgactggagtgctctattggaagggattctgacaccaaagtccacaggaaagggtgccagaatccattagtaatgcctttttaaatattttgtgctctttccatgtgttctaatttttttgtctctattttgtttctcagattttccagcaaataacattgtgaagttcctggtaggctttaccaacaagggtacagaagattttattgttgaatccttagatgcctcattccgttatcctcaggactaccagttttatatccagaatttcacagctcttcctctgaacactgtagtgccaccccagagacaggcaacttttgagtactctttcattcctgcagagcccatgggcggacgaccatttggtttggtcatcaatctgaactacaaagatttgaacgtaagatcctctaaaccttctttttgtttaagttagagatggatgggggcggtgacgttgtttaatagaatatatctgttcattcagttgcctgttttgtggttgaacctgtgatagccaccagggaagcaaagataaattgcacgtttcttcttcaagtctaatccagtgggggaggcatatgaaaacaggcactagaacatgctgataagtgatgcatactagagataaggggaataaggtgctattgtgtgggagtggaagtgaaaatggagatgtaagtaaagctatgagccggatcttaatgggaaaaggagcagtaagacacacaatggagtctacagcttattcagatgttaagatctgttgctgggtacagtggctcacacctgtaatctcagcactttgggaagctgaggtgggtggatcacctgaggtcgggagttcgagaccagcctggccaacctggtgaaaccctgtctctactaaaaatacaaaaattagctgggcatggtggcagtcgcctgtaatcccagctactcgggaggctgaggcaggagaatcacttgaacctgggaggcggaggttgcagtgagctgagatcgcaccattgtactccagcctgggccacagagtgagactccatctcaaaaaaagaataaaagatctgtcaaataatttgttttgtacctccttttgttgcttgcattttgcccattttactacttctgtttgtaaatttaaagactgtctataattgttttcccatcattttatgtactcatagataaaatagaaccatatattttcaatgtagtttcagcagcaaggtttatcatttactttttgatttaggagaacc

SEQ ID NO: 11147 - DNA, 6000 bp, Homo sapiens
ctacctgtttcctgcctccagtcccggttttccacgaggctgcggtctctccttgtccctgcttggctacacttccctgggctccacctcctcccagactgagcctcgccggtgtcaggcagagcccagcagagggcggcagggtgctgggagaccctgagctcccaccacgttttcccctgtggggttccttgcgaccttcgctggaaccttttccagcctgctgcctcctaggatttcacctaatggactttctcagcctgtcccacccatcccaaccctggccaggcctctcgcgctcttccccacatcttttccttccgtgtaccccttccctcgtcttttctcaattccatgtcctgtctccctttcttaggcttctgtctacccagccccaggctcccttccacgaccccaccactccctcaaaccagcctcccttccgtacccaactcgttccctccaaaaccgtttcctctcccccacatcctcagtgcttcactgtatcgactcatactcccacttcagacctcaggcgccagccccgtttctctcccgtcccactcgcatccttcccttcctaccctggttcctccgtgcttcagcctcccgcggctccctccgcccaccccgccctcctggcacgccccgtccccatttctcctcccctcgggtccccttaagtgagatccctcccttcctctttcgttcctttcctcctcgaggttgcatcccccctcccctccccgcccctccgactgtcgctcccacctcggcgctcgcttccctccccgcccccttcctgcctccccagctcccgcccgcccccccaccccccgctgccgcgcgccgcccgtgacgtcagagccccctcccagccccacatctccctcctgctcctcctcctcccctccgtcggtcagtcagtccgcgaggagagtccgcggtggcggcgacggtggcgagagccgcgggggccgtaggaagccaaccttccctgcttctccggggccctcgccccctcctccccacaaaatcagggatggaggcgcctccccggcaccctcttagcagccctccccaggaaaagtgtcccccctgagctcctaacgctccccaacagctacccctgccccccacgccatggggcccggggccccttttgcccgggtggggtggccactgccgcttctggttgtgatggcggcaggggtggctccggtgtgggcctcccactccccccatctcccgcggcctcactcgcgggtccccccgcacccctcctcagaacggcgcgcagtgtacatcggggcactgtttcccatgagcgggggctggccagggggccaggcctgccagcccgcggtggagatggcgctggaggacgtgaatagccgcagggacatcctgccggactatgagctcaagctcatccaccacgacagcaaggtagccctggacatgggggtgggtgggaggtgggggcttgcggggcagggggccagccagctgcacgcgcccccatctgtctgagtcgtctctgggattgcgaggcagacccctcccttgtgtgactggcaggagatgggctgggggtgcaggagcttggggagagtcgcaggggctggaggtccaagatgagggtctaggggctcaagatggttaagcatgctgcaaggcagacccttctgccccgctgcgggagtctcgcagaagtgtcggggtttggagaaactggtggtggatttaaggtattaggagacactgatcctctgagggagtaaactaaccctggaatgggttgggggtggagggaatgtcagaggtggggagctggattgggggtttacatttaccatggtaacaaggtaaaatcttggcgtaggttggagctggaaggaatagggacagaatgaggaaaattttgagagacttgagagctctagtttatttatcttaacaaaacagcaaggtagtggtgagccctacctgactccttctcatccttctattcccaaccctgttgagcattcccagactgtgggatagatggcatatggtgattggggaaggctaatgatcaagaggtgggcagaggcactgggaaaatgaattggattggggatccacatgggaacccccacaatagcatggggatgaagaagagtcaacatacaaggagaagagaacagaaaagaatggcagtgggggagaggggcaaggaggtagcgtggggataatgagagatcttggggcaccttatggaacttgggtcctgaccttcccttcccttatagcattgtggcctctaggatgtgagaagggaaatgggatgtagggattagggaggtgagttgagggagagagagaaggtaagcaaatttgggtccaggggtattaggggatagcttataatgaggttttttttcccacccctctcccctacatgaataattgggggtgcagggaaggatgtgacacagggaaggagatttaagatctcaaatttatcttcactgacatgtggccccagagacttaaggaattgggttagggtgaaatagagtacacaaggtgagaatttggtgatcttaccaaatatcaaccttggggtgatccaaggatttatattcatttttagaacatcactatacacctagaaataggtgtgtgtctgggataggtgtgtgaggggacagaagtgaggttgaaggtagggtgcttgaagagaagagagcacaaggattatcaggagcttggcaagagaacttaaaatcctttttgactgttactttctcgtggttctcagccttcagtgtacataagaatcaccagaggagtttgttaaaaatacagattctagctccttggtcagggatgaatcccaagtatttatctgtatttttactaatagacatcctatcttggtggattcctgagctgtaagctaaccccagaatgcctatgggaagagcagcagggtacaggaaaataattaggtattagggtacgggaggcaggaagagaagtagaggatcagatctggtagagggtcagacttgggacagtcagagagatcattggttttggggagtggagtgtgaagaaaatgacagggagagatgggtgcaggctttatgataggggatcacaggagataggggaggcctggctgtgagctcaaactcatccaccatgacaggtgattccctggaggtggcggggagcagacgtgggacctgggagaagggaactggagaacatcagaggcatcaagcggggtgggatgggaaggcagaagaaccagaatgtgtcaattggaatgagtcggtttcctgcctgcaaatccagatccttgcaagagcaaagagagggaggagaactaaggaaatctattggggagggggagagaatcacgtggtggagagaatctgcagtgatgaatagtgtgtggaagagggaaacggttgcaagaaaaggtagataagaaatcaggaaacaaaatggggggcatgccttgccctgttgatatgtatcttatatgttcttgtatgtcctcattgttcctattaaccctgtctttagagaagtggaggggcactgaggggctgtgggagaagctgggagcaggatctggagtaatagatgtggggagagtgcaggaaggtgggtcctgagaatggtaaagatttacaaagttgccctagtgggaggcataaagagaaaaccttccaatgttgttgagcactgcccttggccagagtgagggtagggtgggcaacagagaattctcagtgactgctggttcttcagattccaacagcttcccctggctcccccttctccaacttcccaccgtgtcccaaatgtcaggcctcagtgggaggtaagcaggctccagagtgctttctttatttcctttctacttatcctcccctcctggcaacatttcaccctccttagtcccctgagccccctgtctgtgtcccctctgccctggctccccactggctgccatttcgtcttcacatgcattggggttccagcagcttctgaaatgtcatatatcagtgggaggggaacaggcagtgggagacccaaggctggctcttcctcccccatttcccctcctcccaagcttcctttcttctccagctttctgcttgtttactttccctagctccaagcctctctttaaggcacctctcaaattgtctggtttcttgagagttccattctattcattctctctgttctttcctcatcctacattcttccctacttccaccccccagtgtctttttttctaatggacctgtcaaatgtcagcgcccagcaggagggatggatcactgagcgggaccccctactggtcttgttcctgttctctctttacttatcactagctctgaaaagagaagagggaggaaacaaatggaaggtggggagaaggggtttgcagaggtgaggaaggaattttcataatatggctttgagcaagctatctggggatgtggaaagagtttaccgtattcctactgacttcttccacccactggtgtttgaagcatagaaacatggggtaaagggcttggtgacagagggaagggggatgtctgagggtgagctgaaaggaggtaaggtggtatgttcattaataccaaaggaggggtgtgcaggagaggtgatgggtaaggctccagatggaagacagagaaggaagtttaatgaaagaggagaaaaaaggcacttgacaggaagagatgccagaaaggagaagaaaacggtaattaatgatgaaagtgagtaattgagaaaggaactaatttgttcgagaaagataagagcaggaattgcagacaggggaggggccccaggagagcttgccctcatctcctcttgtctttcagtgtgatccaggccaagccaccaagtacctatatgagctgctctacaacgaccctatcaagatcatccttatgcctggctgcagctctgtctccacgctggtggctgaggctgctaggatgtggaacctcattgtggtaagcagggctatgggggtcagaagatggggtcattcccttttgagctctactgaagggacgatggcgattgtgggtttgtattgaaaaggagtgtggaggacctgctactaagattcagagtcctctgcagacctgagctaggcagcctcctagcaacagtggcctgacagtgctgcagctgacctccttcttcagaaggaattgaaattagatcagtgaaagagcatcccggttgtgaggggtgtgtgggcctttgagaatctcttttccttaggcagaccagaggtggggaggtttggagagagtaaggaagagaaacccaaaggcaggaagagggttaaaggaactcttggccactcttggtgtcctcagtgaacagaccctgttgcactcactctccctgccccacagctttcctatggctccagctcaccagccctgtcaaaccggcagcgtttccccactttcttccgaacgcacccatcagccacactccacaaccctacccgcgtgaaactctttgaaaagtggggctggaagaagattgctaccatccagcagaccactgaggtcttcacttcggtgaggaggggttgggcaaggggtaaagggacataagctcaaattccagcaccaggagatgtgacgtgagagtcacttttaggggcaagaacttgattcttcattgaaagagaacgcattccatgtggattaagtgcagttctttctgtagccaggggaaagaatgagttgagtttttgggatcctctctgtctttatgattttatgatttttttcccctgtttgatgccctgttccccagacatatagacccagaatgactcagttctgttaaagtaggttcaatccaaagtgggggcaagagatgggagcgaagatgagataggaatccaggaaggcagcagattccagaggctttcaaggggggtgg

SEQ ID NO: 11148 - DNA, 6000 bp, Homo sapiens
cacacccaccctgggataatttgtcttatcctcccatcataggagtatctgtgaaggaacagaccaggagacaccctgagacagggctcttcacactgcagtcggagctaatggtgaccccagcccggggaggagatccccgtcccaccttctcctgtagcttcagcccaggccttccccgacaccgggccttgcgcacagcccccatccagccccgtgtctggggtgagcataggtggggagggccccaagctcacgtgagcacgttctggaagtctgacccttagggaaagagggagtcaagcccatggccactgggatcactcacaagtgtaactctccacctcaaaacccttccaactcccagagcctgtgcctctggaggaggtccaattggtggtggagccagaaggtggagcagtagctcctggtggaaccgtaaccctgacctgtgaagtccctgcccagccctctcctcaaatccactggatgaaggatgtgagtgacctggagagaggggctgggaggtagggtgaaccataactagcaacagggagggcagagggctaacgagggaaaggcaggctaggagctgaggaggaagagagggtatctgaagatatggagacaaaaagacaagggttttgaaatagtctcctctccccttcccccaccagggtgtgcccttgccccttccccccagccctgtgctgatcctccctgagatagggcctcaggaccagggaacctacagctgtgtggccacccattccagccacgggccccaggaaagccgtgctgtcagcatcagcatcatcggtgagacctctccccaagccctacagaccctgggactagggtgcaggacagcacaggctctaatttcctgccccattctggccttatccctaacagccaccccacctctccctccatgcacccacacccaagcctcccctgccccacccaaattctgccaagagagcagccaagcctctcccttcttccctctgagctaaaaaaaggaacagacggctgggcgcggtggctcacgcctgtaatcccaacactttgggaggctgaggcgggcagatcacctgaggtagggagttcgagaccagcctgaccaacatggagaaaccccatttctactaaaaatacaaaattagccaggcatggtggcacatgcctgtaatcccagctacctgggaggccagctacttgagaggctgaggcaggagaattgcttgaacccaggaggcatagattgcgatgagccaagatcgcaccattgcatgccagcctgggcaacaaaagtgaaactccatctcaaaaaaaaaaagaaagggaaagactccactggggctcccactaaataaccctctctcaacccgaagtcttcctttctgactggatccaactttgtcttccagaaccaggcgaggaggggccaactgcaggtgaggggtttgataaagtcagggaagcagaagatagcccccaacacatgtgactggggggatggtcaacaagaaaggaatggtgagtggtggtggctgtgctctcaattttccctgtctccgtacaggctctgtgggaggatcagggctgggaactctagccctggccctggggatcctgggaggcctggggacagccgccctgctcattggggtcatcttgtggcaaaggcggcaacgccgaggagaggagaggtgagtggagaaagccagacccctcagacctagggcttccaggcagcaagcgaagaggggtcggggggtggaacgacaacgtgccgcattccccccaatctttctcctcaggaaggccccagaaaaccaggaggaagaggaggagcgtgcagaactgaatcagtcggaggaacctgaggcaggcgagagtagtactggagggccttgaggggcccacagacagatcccatccatcagctcccttttctttttcccttgaactgttctggcctcagaccaactctctcctgtataatctctctcctgtataaccccaccttgccaagctttcttctacaaccagagccccccacaatgatgattaaacacctgacacatcttgctcttgtgtgtctgtgtgtgtgtatgagacacaacctcacccctatacccttgagggccctgaaggaaagggactcacccccatacttcaccatactataccaaacatctactcaagttggggagaagatgcttctgtcgggggtgggggcgaacttgggaagagatcccatcaatatatttcaccttttttattgaatttgtattaaaggaggtagtgagggggcggaagcacttaagagtcagaatccatattagactctggggagtgaaaaattaaattaaatcagtaagatggggagtgggggaagagtcagagggaactttgcccacctttgaagatcaaatcaagaaatcagggaaagcaaagacttaggagaggagaaagacattctctcaatccatcctccttccccagggcagagaattaaacaacgttactgagtgagcctctgagcagaaggctctcccatctatgcacagacttcactcctcctccccaggccttcctggacaatgtccagggctggccttagccaacagaaatagaggggtcaagggggtccaggagtacggaagggtcagcagggaccctcaatactgattcttctctggctggaggtgggcaggaagcagacatagctcaaatactgagcagccaaaaaaagaagaagatggcgagaaacaggaagagggaatcctgccagctggaggctgggtgaccctgtcccagatccacacctgtgggagagaggaaagctgtggaagcatatgctcctaggctgggagggggcctgaggggattcacagggctccctgatgggagctgagtgtgactcttacctgtaccccggcggaaaggctcatgggcattgaagacggtggtgaaaaagccaaagggaaaagcaccaacaccaaatgagaagtggaagcccccggtatcaccaaatggctggaatccctagggaggcagaaaaagtcagacaggaagccggcaaatctgtcaaggaagggacacaactggacaagaagactcacccctctgctctccggagctggtctctggccctgggggcggggtggagtttttaatctgaggaagtggagagagaaagttaacagggatttttctcctcccatcttccacaccgttttccaagggcagaagccttcaatcttccctaagcaacacctccagtctctcacctgggatcctggggcttctggctccctcgcccataaagcgggacaaccttctctctgctgatcccagctttacatactggacactcttgccgttctggccgtgtctccagccactggggagaaaaaaggtggtttccagtatacaagagggtcttacagctcctcagacctccccatttccctcttcatctcctgagtacgcacctgatgaagacatggccaactggatgggggagaaaaaaaaaaaaaggtcaaactagctacagaaaagagagacacagaccctagacttcgcagaatcccatctaacccctcttcccaagcaacctgctgttgcttttcagattttctgcaacctctaccatgccagccaacttagttagccttcctgcttgtctgatcttccaacacctaaagctctgtccatcctcaacacactcaaccctctcctttctcctctccccaacaaacacatacaaattttcgtgccctctcttttctgcctttcaagttaatttctaatttccttcagccacctctttctgggtctcctcttttcaaccccaaccccatcactccaaaccaaacccctttactagcacattcccccattactcactttcaagctcaataatgtccctatctttatgaccctttaacctttcaagtctgcctctccacagtgcccttataccagccccctcccagatctcatctgaatgtgatccatatttcctggttctccccgactcaactgatgcgtgcctcccttaacctttgtgtctcacttgtttccacctgcacagctaagacccctcacttctctggggtaaggtggctcgggtctcacattgtcctgccactccccgccccaccttctcttctcagcacatcacgtgcctcagctcctggttcctaagacctttctttccacagatctcgaccgttatactcccacccacacataccagcaaagtcttatgtctcctgtcgggcttcacctatgggaacgtgccctccgattatctgtatgactgtatgattattcgctcctagcctctccagtatataagcgagacccaccacctcccgcccccctcctcgattctcaccagtacaggtggccacacacactgaccacagcttcccgagcagtctccaaacatatattacattcgaaggtcgcgcccgccccgccccgctcgcgatttggcccttcggggcccccgtcctcctcctccgctgctgccatggccggttttgtttcgccccacgtacccttcagtccccccaaatacacatacacacgccccaacaaaccagaaaccacctcctgcccacgatcgttgggcaggcttcaaggtttcctaatcactattggtctgaatgcctgccagtcacaaagaattcaaaagaaaggattggcccaaagggtaggggcgggaaaaggttagtgcagtcctgccttcgcacaatggctattggctgatacggtctaagtcaatgtgcaatgccaagggattggtaataactcgctacacgctgtcgcctggccaaggagggctttattcgtctgagtagttgtcagtcataaccaaagccataagcaatttgctcgggactacctatagacctcgcccactataagcccctttctttccttcgcttcctcttttagagaatgtccggattgctattggactttggagcgtatggctccaaatcaactcattggctaaaacttgacggaaaatggtggttaggtaaaacgcgcctgcgcagcacgcggcgggacgggggtgggccaatcctgtgagggtttaaccttctctttttccacctcttcacccctatcttgtcgccatggtgactgctctacaattggcgaggcttgcacttcaaagtcctaggctcgcttcatccgggtccttcagctgtggactttctgctgattgggccttttccttttcccctgattggccgacatcgggaaagacggcgaagagctaggaaaagagggaaaacactagggtcgcagggttcaaaatggctccaacctcctttggtgacgtagagagcagaacttgggtctgcccctcccttttagttaagggagcagaactgggattagcccgacgtttggatagtgggaacatcgatctgcggcgctggtgttaacccaactcattcggctggacgactcagccctccccatattaggtgatttacagagcaaaactgaactaaaggcccacccctttcttaatgttgtacacagagtagaacaggattgacttcaactccgttttaaaccttcagagcaggaaagctctgggctcaacccctttgtgagtggtgcaaaagggacaaagcccgccccttttaaggagacccgcggaggctagacccgccctttcctctttataatttgcccatcagaaatagggtcttcttcccaggttggaccccggggagtttgggcttttcctacaatcactgaccctcactgtgactaaaggagcagaattaggtaacagtcctcccactaccaatcctcttcccgagggcatgtaaactaatgcagggtaaaggtgtggctagaggggggaccttgataaaagatcccatgtgactcaagagtaaggaaagatgagaagttagcagttgcgtaaagaaggactggggcagatgaggattc

SEQ ID NO: 11149 - DNA, 6000 bp, Homo sapiens
catgaaagaataataggctgggcgcagtggctcatgcctataatcccagcacgttgggagaccaaggcaggtggatcacgaggtcaggagattgagaccatcctggctaatgcggtgaaaccctgtctctactaaaaataaaaaaattagccggctgtggtggcgggtgcttgtagtctcagctactcaggaggctgaggcaggagaatggcgtgaacctgggaggtggagcttgcagtgagccgagatcgcgccactgcactccagcctgggcgacagagggagactccatctcaaaaaaaaaaaaagaaaaataactgctatatcgtactttgtgccttactctaagcattttacattgttacctcatttaatcctcccccacaaccccatgaggcacgtactgctggttgagtatcccttatctgaaatgcttgggaacaaaagtgtttcagatttcggatttattttggaatatttgcattatacttactggttcagcatccctaatacaacatccaaatgctacaatgagcatttcctttgagcgttatgttggtactctaaaagtttcagactttggaacatttcagatttgggattggggttatggatactcagcctttttttgtgtgtttgttttctgagacagtcttactctgtcagccacactggagtacagtgacgccatctcagctcactgcaacctctgcctcctgggtttaagcaattctcttgcttcagactactgagtagctggaattacaatggcatgccaccatgccctgataattttttttgtttttgttttgttttgtttgagacagagtcttgccttgtcgcccaggccggagtgcagtggcgcgatctcggctcactgcaagctccacctcccaagttcacgccattctcctgcctcagcctcccaagtagctgggactacaggtgcccgccaccacacctggctaattttttgtatttttagtagagacagggtttcaccatgttagccaggatggtctcgatctcctgacctcatgatccacccgcctcagcctcccaaagtgctgagattataggagtaagccactacacccagccactaatttttatatttttagtagagagggggttttgccatgttggccaggctggtctcgaactcctggcctcatatgatccacctgcctcagcttcccaaagtgctgggattacaggcatgagccactgtgcccaacctcaatctatattatcatccccattttgcagataaggaaaccgaggcaaagaccggctactaaacttgtccaaaggtctcccaatagtaatcagtctcaccaggagtggcctctctttgtgactctgtctctcccaccagcaccccctgccaaccagcttccctggcctgtgctgtgctccccagtggccggggtgattctcctggccctaggggctcttctcgtcctccagctcatccggcgtcgacgccgagagcatggagctctctggctgccccctggtttcactcgacggcctcggactcagtcagctccccaccgacgccggcccccactaggcgaggacagcattggtctcaagtgagaatgaggagaaacccaggctcaggaaggggagtctctcctatggcgatatttacaatcagaaaagataagaaatactattgcagaagtcaaagataggggaaggagagaggggtgggaagcctgctggaaattttggagaccctgatggtcataattccgtgtaacctctacccacccattcctttccagggcactgaagccaaaggcagaagttgatgaggatggagttgtgatgtgctcaggccctgaggagggagaggaggtgggccaggtgaaagggctggggcaagaatggtctggaggtgatggaagggatgaaagggcaaatcaaccttcactgatccttgctgttacccaaaggctgaagaaacaggcccaccctccacgtgccagctctggtctctgagtggtggctgtggggcgctccctcaggcagccatgctaactcctccccaggaatctgagatggaagcccctgacctggacacccgtggacctggtatgtgagtcaacccagaccaagaaaaaaaaaaaaagtcctttgaccctattagaatcagagagtcctttaatatcagaactagaggaaataattttagactgagtgccttagaacaatgattctcaaagtgtggtcctcagacagcaaaatcagcatcacctgggaatttgtcagaaatgcaaattattgggctccactacagagctactgactcaggaatttaaaatgttaggcaatctgttttaacaagcccttcaggtgaatctgatccagactcgtttgagaaaaccactgctaggccgggcgtggtggctcacgcctgtaatcccagcactttgggaggccaaggcgggtggatcacaaggtcaggagatcgagaccatcctggctaacacagtgaaaccccgtctctactaaaaatacaaaaaattagccgggcgtggtggcgggagcctgtagtcccagctgctctggaggctaaggcaggagaatggcgtgaacctgggaggaggagcttgcagtgagccgagatcgcgccactgcactccagcctgggtgacagggcgagactccgtctcagaaaaaaaaaaaaaaaaaagagaaaaccactgccctggaatgtcagagaattaagctgcaggttccttttacagaggaagaaactgaagtcagagaaaagcagaaaagtcacttggctaaagccacacagagccagaacttagcttcccaacacctcaggttttgattctctctgagcttacatgttgtcccttcccccttgttgtgtcctttagattgacccattactctgtcttaccaacagatggggtgacacccctgatgtcagcagtttgctgtggggaagtacagtccgggaccttccaaggggcatggttgggatgtcctgagccctgggaacctctgctggatggaggggcctgtccccaggctcacaccgtgggcactggggagacccccctgcacctggctgcccgattctcccggccaaccgctgcccgccgcctccttgaggctggagccaaccccaaccagccagaccgggcagggcgcacaccccttcatgctgctgtggctgctgatgctcgggaggtctgccaggttagcacacactgaggtccctacagggaatggggcgagcttacaagtaaagctggacagaagcatcccctagagtttgacaaggaggaaattggtgtgattgggaacctgacagggaaactgcggaggatggctgaatatggattgcgagtggggttaatagtgtaaggaactcgagttggcagtccaaggtaccccaggggtcactggccctctgtctccccagcttctgctccgtagcagacaaactgcagtggacgctcgcacagaggacgggaccacacccttgatgctggctgccaggctggcggtggaagacctggttgaagaactgattgcagcccaagcagacgtgggggccagagataaatggggtatgtagaggaaggggtgatgtatgctatagagaagttgagcagatggggtgggagatagcgtgcaaaatataggtgcagcagaggggcattccctctcatcctgctgttacggcggtcaatctgagatgcggtggaagtacgggccgcgtgagtttccccccccaactcccaccctcaacaccacactggccctccgctccagcttactggggaactggcatggaacacagtgtctgtggaaaggggggggaatctcgtggggggagactgtctcccggtctcaccgaccccagaacaatgccccattgtccctcccgcgcactggtgacgtcaccagggcaacacttcctgcaggccggtggtctcctgggcaacgcttcccgcctttgagggaccagccggcccgaatagcccttcccccaaggccagaacccgtgggaaaccggaacccaggcgtctggcccccaactggggtaacaacctcccacgtcgtcccctagggaaaactgcgctgcactgggctgctgccgtgaacaacgcccgagccgcccgctcgcttctccaggccggagccgataaagatgcccaggacaacagggttagatgggacagagggcttcccacaaaacagtcaggcgcacgagagatggaaagtgcggtaacccgcaaagcctgaagggataggggccagtggtcgcgcaagtgaaggcagaaaggcccagtcctgtgggcgtggccttccctgatatcggccctggctcttctgtacaggagcagacgccgctattcctggcggcgcgggaaggagcggtggaagtagcccagctactgctggggctgggggcagcccgagagctgcgggaccaggctgggctagcgccggcggacgtcgctcaccaacgtaaccactgggatctgctgacgctgctggaaggggctgggccaccagaggcccgtcacaaagccacgccgggccgcgaggctgggcccttcccgcgcgcacggacggtgtcagtaagcgtgcccccgcatgggggcggggctctgccgcgctgccggacgctgtcagccggagcaggccctcgtgggggcggagcttgtctgcaggctcggacttggtccgtagacttggctgcgcgggggggcggggcctattctcattgccggagcctctcgggagtaggagcaggaggaggcccgacccctcgcggccgtaggttttctgcaggcatgcgcgggcctcggcccaaccctgcgataatgcgaggaagatacggagtggctgccgggcgcggaggcagggtctcaacggatgactggccctgtgattgggtggccctgggagcttgcggttctgcctccaacattccgatcccgcctccttgccttactccgtccccggagcggggatcacctcaacttgactgtggtcccccagccctccaagaaatgcccataaaccaaggaggagagggtaaaaaatagaagaatacatggtagggaggaattccaaaaatgattacccattaaaaggcaggctggaaggccttcctggttttaagatggatcccccaaaatgaagggttgtgagtttagtttctctcctaaaatgaatgtatgcccaccagagcagacatcttccacgtggagaagctgcagctctggaaagagggtttaagatgctaggatgaggcaggcccagtcctcctccagaaaataagacaggccacaggagggcagagtggagtggaaatacccctaagttggaaccaagaattgcaggcatatgggatgtaagatgttctttcctatatatggtttccaaagggtgcccctatgatccattgtccccactgcccacaaatggctgacaaatatttattgggcacctactatgtgccaggcactgtgtaggtgctgaaaagtggccaagggccacccccgctgatgactccttgcattccctcccctcacaacaaagaactccactgtggggatgaagcgcttcttctagccactgctatcgctatttaagaaccctaaatctgtcacccataataaagctgatttgaagtgttacctttttttggaggaattggggagaagaatgggaaaaaagatgggagtgactgcataatgtcagcattttgtgcttttggctcagcatttggattggatggaggatgtaagtatagtttaaaagcaagaataagtatatttaggggccctatgataatttagggtattatctgaaagcaagaatctagtagccaagggagaaaccgcacacactaggtcaggggtccccaacccttgggccacagactggtactggtccatggcctcttaggaactgggccacacagcaggaggtgagcaagcattactgcccaagctc

SEQ ID NO: 11150 - DNA, 6000 bp, Homo sapiens
tagggaaaactgtgggaggaaatgatttgaagtgggtggttggaaataaaagttttgtttaagtttgagatgatttattgacatttgtgtggagcaatcagaaggtcaatggcatttaaaagactcatggtgggccaggcgcagtgactcatgcctgtaatcccagcactttgggaggcctagacaggcggatcaccaggtcaggagatcaagaccttcctggctaacacggtgaaaccccgtctctactaaaaatacaaaaaattagctgggcatggtggtgggtgcctgtagtcccagctacttgggaggctgaagcacgagaatggcgtgaaccagggaggtggagcttgcagtgagctgagatcacaccacttcactccaggctgggtgacagagcaagactccgtctcaaaaaaaaaaaaaaaaaaaagagactcatggtgaggccagggctggaggtatttatgttggtggcatcaataggtgtactgtgttaaattccagggagtggaagaggttacatagggagattgtctggagaaaaaagaaaagggcacaggccagcaaaggggactaagaaagagcccagggatgttgggaaaaaaccaagattacatcatatgtgtaagtcaagaaaaatagatttttttttttcaaggagaagggagaggccaattgtggtgagtaccactaagaggagggtgaagtgagaatgtgacagagaagcaacggctgggattggtggagctgatatttgcagtcagtagagtatccagggaggaaactggattggaccatttgaagagcgagtagaagagaggacaaggttaaggttgactgttttgagtagcgagcttcagggaaggactgtgctctgggttcagggagccagctggatcaaaaggaaaaggctaaagaggctgaagagaagcaggaggacctgtgaaccagagatgctcggtcattattatcaaggaaatattagagggcccctgtgtgcagtggtgactgctcatgaagaggtcacacagccagtatttcacacagcccatatttattagtgacttagaatataccagttactactctaggtcatgagaatggagtgatgaataaaatgaatctggtctccatcagtatatgccatgtaacattttgcagtgactgtgtaccaggcctatgaatttcagtatgcaatttcaataatgatcctgctgtatctgtggtatataaaaacatgtacatctctggaatctaaaattgaaaggttataagtaaaacccagtatcacaaatttggtgctagaaatcagattgcagtttaaatctgagcatgtagaaagtccatttcttctatgtcagcaggtgccttttgtgtgaggtttaggtatactgcattattagacataaaccagtgtttctgccctctgttttcagaatgacaattctttatgaaactaatagaagaacagaagacaattgcaaaatcatgatgaagatactaattgctttagaatcatgtaatagaaaaaataatgtgagctccagttatagggatcaaaaaattaaaatgggaatacatttgagtgtttattatgtgatcactgctaagaagactctttattaaatttcacacttacaaaaatcctgtgaggattattataaaatgcatttgatagattacaaataggcttatggttggcaaaaagtgacccatttaaaagaggtcatatttcaattcatattttctgattctagaatatgagagtttttccatcattagtgagtagtgacttgattgtgtctgaattattgacaaaatttctaatattcatatgtaccaggttgtttcttagagtgggggcagagatgcaagggcttctagttccaatgtataaaagaaactttcattcattttgcatttatcattttaaaagttctataagtctatcataggcatgtgttgaagaacataaagaagtattaaatcattccttcttctgaggtttgactagcaagtctggctagggttgtcagataacaaacaggttcctagttaaatctgaatttcagacacacgaccacaatttattggaaatccagatttacctgggcatcctctggttttatttgtcaaatctgtcaaccctaagtgggacacatgagcatggattacagtgctagccatgcaagccacagtgacagtgactttacaaatgtttattttttaacattctgtctgtaaagaaagtgcttacataatttaggaatagaaagatagacattgtttgatccagggtgcacacctctctgccatcatttctaaagggcaaacggagctttgtgaaggtctctacacaaagtctggggacctgctcatgttttgtaaactgtctgtatgagaacgtcattttcttggtttctgactttctgaggggacttgactacaaaaccaagagttctatctctggccaaggctggtaatttgatgcctgctagtattgttgggagtgggagactgaaagacgtgagttagttggggcattaaatgggaataaaatagctgtggttgtgattcactactacagataattagtggacaagtggcagagaaattaagaaagaagatgatatgaaagacaaatgatatgatttggtgactggttggtaatgcaaggaaatcagtaaatcttagttctcaacaagttcattttctggaaagatagcactgtattgggaccagaattctataaagcattcgttttatgtaggaccaagatattcacagatatttttcaatacaattctcagctgctccataaccactagtggcttgttcaacacaggttttttcagatggttcacacctgtggttcttacccagggatcgttcaccaccgctcctttccctcccatcacccttggggaacttgtggcaatgtttgagcaatttttggttgtcaccacaggggtttcttctgatatttaatgagtagaagccagggacactgctagagaacctacaatgttcagaacagcctcctttaccaacaaagaattatctggaccaaaatgtcaatagtgctgaggctgagagcactgtttcacactgtgctctttctgaaaattctagactcacatcttttatacactcagcacccaattcagttctttatggtttatttttgcttgcttcattatgcaaaagtagacagttgcataaattcaaccactttcttgttgaatccatttagtcaatgcaagtttaatagcttcatagttagtttttgccttatgcaatatttttcaacattttcatgagttgttggtcagcactacctctattaactttcaacaacttgcccttataagtcacaaatagtgatgctctgcaattatttttcactaacatgcctgagatttctgtagtgattctacatttggtatgattcataatgtaaaatgcttttatttattcatttcacttttaaccagaggattatttttcagttatttttgtcatttttacacttcaatcaaacataaagacaaaaacatctaaaatatatagtattttacatatgtgtatatttacacacatatatgtatgtatgtttacatgtattgaaactacagaagctcatgtcaccaataagagctctgagacacttttgaccccttactcttatcaggtgaaatttgccaaataagttttatgaacaaatttcttttaactgaatatctgagctttgtggatttagaaatgcaaaggaaggtttgtggacattcatgggatcatggttttattctccttaaatctctttgatactttcccactgtctttagcataaatctcagatcctaacaccacccacaacgcttttcaatacctggcttcttgtgatgtctccagtctaatcttttaccctccttcccctcagcctctctgctttagtgaactttgttctagtttcttgaagaagttcatcaattcaagcttttgtgcatggtatttcctaaacctgaaatgtgcttcccccgttttgcccaaacagacacagagtctccactccgccccctggttcacacctgcttaacctgccaagtcacatctgaactgtcacccttcagaaggtcctcctctggcaccctaatgtaattgagatcatcctattactctgtgttctggaactccacacttcagacatttctcattcctgtctaagctcttgtgtgtttggtttttggcctcacttttactgctctttaagctcccccagcggagtggagaggtctgttttcccgtgtttggattcccagaggcagtgcaagcctggcacaaggtcatcactaaaggagtgttcacaggatgaacgcggtgggagttagggaacgggtaaagcctgtgggatgagagaaggagcagagattgtctttggggtgcaggctcccaggaggaggcggcgcgggctccggtgctgggcggatcctcctccagctcctgcttggaggtctccagaataggctggaggcggggagggggtcccaaaagccttgggatcagaaggggttttcctgcctggtcccccagacaccccgttcgcctcaggaagacggaggatgagcctctgggctgcgcgtggtcggggttatggttgggatcagttaaggttccagtgcccgcaccccgcccagggagccccggatggcggcgtctctgtcagtatcttccccggaggccgcccctgtgaccggatccttcgtgtccccacagcacgtttcttgcagcaggataagtatgagtgtcatttcttcaacgggacggagcgggtgcggttcctgcacagagacatctataaccaagaggaggacttgcgcttcgacagcgacgtgggggagtaccgggcggtgacggagctggggcggcctgacgctgagtactggaacagccagaaggacttcctggaagacaggcgcgccgcggtggacacctactgcagacacaactacggggttggtgagagcttcacagtgcagcggcgaggtgagcatggtggggggcggggcctgggtccttgtgagctgggaatctgagtgtgtgtgtgtgtgtgtgtgtgtgtgtgtgtgtgtgtgtgtgagagagagaggaagagagagacagagagggagcgcgccatctgtgagcatttagaatcctctcaatcttgagcaaggacttctgaggacacaggtgtgtgtgtagagtgtggatttgtctttgtggcctttgtgggaggggaagcaggagggggcttcttcttatccttggaggcctctgtggggaggtgacatgggaggtgggtgcagggggctggagagagaggagaccttggttgtctcgtgtccttagagatgcagggaaggaaagtgtaaggtgtgtgtggttggggtgaaggtttaggggaggagagctgaggggtgtggaagatttgtgataatatgaggaggccagttccagactgtccctggcacccacccttcacgcagtctctgaaataaaagtgtgtggtgtttgtttgcaaaagcattagattaatttctaggggaattgaggagacctctgaggcacttctgaagcttctttaggtctaaatttcttgctattttttctgtttgttttcttagtgtgtatatttttacatagttgaaatgactgtgaaactaactttttgattaaaattttaatacactgttactattttattataatgctaatagttttctactacttacctattattcttttatatataatagttgtgacacaacttatctcactttcccctttgttgacctttattatgacattcaccaaaagttgaaaatatatgtttctggttattatttaatttatttttttatttggaattcttttgaattatcttgacctatttattgcccaattataattactgctctaagaattccctattgtatttggtaggtaatggacaatgat

SEQ ID NO: 11151 - DNA, 6000 bp, Homo sapiens
ggcccaggcgcggtggctcacgcctgaaatcccagcactttgggaggctgaggcgggtggatcacctgaggtcaggagttcgagaccagcctggccaacatggtaaaaccccatccctactaaaaatacaaaaaattagctggacgtggtgtcacgtgtctataatcccaactactcaggaggctgaggctgaggcagtagaatcacttgaacccgggagatggaggttgcagtgagctgagatcgtgccattgcactctggcctgggggacagagtgaggctctgtctcaaaaaaaaaaaaaaaaagaaaaagaaaaagaaagacaaggctgacaggctgacttattcacagtaggcacagtgcctaagttctataatacttttaagggcccacaaaatgttttcgttttgaatttattttaaaatcagaagaaaaaatgaatacaataaaaataagtatataataatgaattcaggccaggcacagtggctcacgcctgtaatcccagcactttgggaagccaaggcaggcagatcacctgaggtcgggagttcgagaccagcctcaccaaaatggagaaaacctgtctctactaaaaatacaaaattagctgggtatggtggcacttgcctgcaatcccagctacttgggaggctgaggcaggagaatcgcttgaacctgggaggtggaggttgcggtgagccaagatcgtgccgttgcactccagcctgggcaacaacagcaaaactccatctcaaaaaaaaaaaaaaatgaattcagcctggattatagtagtccttatactgatgtagttatgtaatataatttttaatattcttttatggaggaagggacccactaaggtgaaatggctaaggcccatgaaagccatgatgtggcttttatgagagatcgcagtgggttagcagaattgtttgagccaaggtgctagaggtcatggtctggaaagataggagttggtaataggaaagtgtgatacttaaaatagagatgatggagtgtgtgaagctattggtagcaacaaggtttagggtgggatcatctttctcactggagaggaagaaatcaaggaaatgagaagctggttttatcagatatctattgctatattaacaaaccattccaaaatttagtggcttaaaacaaccaccatttatctgcttatagcttggcaatatgggctgggctctgctgagcagttcttctgtttgtcttgcctaggttcactcatgtggctgcagtcatctggaagcttaactggggccaggtaatccaatatgactgcacgtctagtggttgttggccagggtacctcagctctcctccacggggcgtttcatcttccagtaggctagatggacttcttgacatgatgttggaagcattctaagaggcaaagcggcaagctgcaagtctcttgagacctagaccctaggaactcacacaacatcatttctaccccattctatcagctaaagcaagtcataaggccagcccagattcaagcaagaggttgagaaatatactccacctcttgctgggaaaagcagcaaaataattgcaaagcgtcttgtagaacaggaggaagaaaagtggccatctttgcaatctatcacacttgttggaagaactgtctatgtcatattgaatcatcaagaatcaccaataatttgacagaagtgagagtgaagagactgacaagccaggtgctaaaatcttcaaagcacaagggggcactaagtgatacctctaatggcatcaactacctttattatttcatgagtgaatctcagtacattttatcagttaaaaagaatttatttttcatgacttctttgactcagtcactcatcaattcagacttgatcataaggaaggagcctaaaacatggggaaaaaacctaccttcataaaaatgtgtggcactaataaatattatctgggagctgtatcctcagtggctctggtatctaatggtaatatatgactactcaatatttgttgaatgaatttataatgacaaaaaaagtaaacaacctaagcagccaataactagggctaagtaaagtaaatatagtatatctatttaatggaatatcacatagccataaaaaatgcttttgagaactatcaatatatgacatggagtaaaaaaaagcaggatacaatactgtaggtacattatgattatacctctgtaaaaatatctgaatggaaaaaaggaatcaaaacaacaataattgtggttttctcaagctagtaggattgtgggtggtttttttcctttccttttctttgagatggagtcttgctcttgttgcccaggctagagtgcagtggcatgatctaggctcaccgcaacctctgcctcccaggtgcaagcgattctcctgcctcagcctctcaagtagctgggattaaaggcaggtgccaccacgcccggctaattttgtatttttagtagagacaggttttctccatggtggtgaggctggtctcgaactcctgacctcaggtgatctgcctgccttggcctcccaaagtgctggatttacaggcgtgagccaccgcgcccagccagtttgctttctttttttttttttttttgagacggagtctcgctctgtcacccaggctggagtgcagtggtgctatctcggctcactgcaagctccgccccctgggttcatgccattctcctgcctcagcctcccgagtagctgggactacaggcgcctgccaccacacccagctaattttttgtatttttagtagagacggggcttcaccgtgttagccaggatggtctcgatctcctgacctcatgatcctctcacctcagcctcccaaagtgttgggattacaggcgtgagccaccgcacctggcctttttctttttactttattctaaaaaaatgttaggctgggcacggtgactcatgcctgtaaccctagcactttgggaggccaaggccggtggaccacttggggtcacttcgagactagccgggccaacatggcgaaaccccgtctctactgaaaatgcaaaaattaactgggcaggccgagggcagtggctcacgcctgtgatcccagcactttgggaggccaagcgggcagatgacctgaggtcaggagttgtaaaccagcctggccaacatggcgaaaccctgtctccactacaaatacaaaaattagcctggcttggtgggggcgcgcctgtaatcccagctactcgggaggctgaggcagaagaattgcttgaacccgggaggcggaggttgcagtgagccaagatggagccattgcacttcagcctgggtgacagagcgagaccctgtctcaaaaaaaaaaaaaaaaaaaaagagttaattaaacaaacagaattttaaaaaaatttattgaatacctactatgccaggcattgttttagacactggggatgctgtgatgagcaagaaaacatcccagacctctggagtttgctttgtagtggggagatggtcaataaacaataaatatttaatataatgtcagataatgatatctgacagagaaaagcactgaaagtctcgagaaaaaaaaattagctgggcgtggtggcgctgtgcctgcaattccagctatactggaggctgagacgaggttgtactgagctgaggttgcactactgcactccagcctgggcgacagagtgataatctcaaggaaaaacaaacaaacaacaacaaaaaacaagttatagatgttcattgtttaaaaaaaaaaaaaaaggggcgggcgcggtggctcacgcctgtaatcccagcactttgggaggtcgaggcgggcggatcacgaggtcaggaaatcaagaccatcctggctaccatggtgaaaccccgtctttactaaaaatacaaaaaaaaattagccgggcggggtggtgggcgcctgtagtcccagctacttgggacgttgaggcaggagaatggcgtgaacctgggaggcggagcttgcagagagccgagatagcgccactgcactccagcttgggccacaaagcgagactccgtctcaaaaaaaaaaaaaaaaaaaaaaaaaaaagtgttaatgctgaaaagtattaataagaaaaaaaaaaaaacctctataattcgatcatccagagaaaagcactgccaatgtcaaagtacgttcttctttgtttccggcttccccccaccgcactttacatattcttagcttttttggacatctttagacgtcaaaaaaaaaaaaaagtatttttaacagtcacatagtgttgatgtgccataatttatttgcctacagtaatttttgaattataggttgtttgcaatttttcaccaaaaaaaaaaatgtgtttaaacaaaatgaatggtacagccatgtcattactcaaattcagagagctcttcagggaagaggcgatcacagctgagaggaggccagctagggagctgagtgggtgtaagtgttatatccaatggagactgcaggaaaaatgagccctggggctctgtgcctgtggaggtggctgtgtgaaggtgggaagctgctctgccccgactagcgactgctccttccgatgttttgaatttaaagatggtgaaatctcaatctgaaggactagagatgggcgctagcgttcctgacctctgccctgttgtcctgcacaaactagaaattatgttctgggtccttgtctttttttgggggggggcgggggtcggagttttgctctgtcccccaagctggagtgcagtggcgcgatcttggctaactgcaacgtctgcctcccgggttttcaagcgattttcctgcctcagccttccgagtagctgggattacaggcgcgcaccaccacgcctggctaatttctgtatttttaatagagacgggtttcaccatgttggccaggctggtctcgaactcctgacctcaggtgatccgcccgcctcagcctcccaaagtgctggaattataggcgtgagcccaccgagcttggctgggtccttgtcttgaaatgtgtctctgagccattagccagaagggggcaaagaggcctggagggcagctttcccccactccccctccgttactctctgaatctgagctccaggtttgggcagttgaggtttagcctgaggccaaggacgaacgtgatggggtacaggagaagacttggcggtggagggggttttgtgtgcacatttacagagtcaggggcattcccagtccagaaaggattctcagaggcagtcacaaaaaggaatggggtggaagggctgagacttgagggagggaagggtggtgggggtagggccggggtgtggttgggtggatcgggttgatatttatatagggataggttgatcttggaaggctggagacggcaacgtggacaggaagaagcggagggcgaggaggagcagaggagcacacagatgaagcaggtgatgaaggctttacaagcggggaggcgtgggctggtgacaggcggagggcggggagcgattgcctgcgtgtgcatagatctatatgagaagcgtgatgagcggcggacaagcgaaggcagggctggggcgtgggccgcggagcgctggtcgggaaagtgggcatgggagatgagagaataacggggttgcgctcctttggcttaatagtttgctcccattgagactcctaagatttcctcctctcttggaaggaagctgggttcggggcgttgggtagccgcggagggccggggccccggggcgcgccgggtgctaggtgtgcgccgtgcgtcgcggggggggggatgggggtgggggcgggctccgcccctggcagggggcctgagcgcgcgcgaggagcagccgctgccgccgctcggggtcgcctggagccccagattcccgagcgctcggctcgcatggcagccgcttcggcgcccggccccgcggccagctaggggcggccccgcgctccc

SEQ ID NO: 11152 - DNA, 6000 bp, Homo sapiens
tgtgcatgccagcctagccctgaccccagggccattgtgctcatttgtgcctctaaatggaacacccaccctttcccttggtagatgtgtggcttgctgtcaccattcaggctctgctctgttgccaccttctcaggctgccttctctatgttttccaaaataaattcccactccatgattccagcccctttattctgctttattttttttgctaacagttattttgcatatcgtattgtacgtgtgtttctgtctgtaattaatatatgtttatggtctttctcaccagcctgcaatcccagggccttcaggtctccgtgcctagcatgtggtaggcactcggtgtgtggtatgaatgaaaaatgagtacatggtattgagggacactagttatggggctgccttgacaaacatgaggttgtattgagtaaatgatgaagcttttggtgaaggtgtctcttagtaacctgtgcagaaacaaacagccttgcctgagaagattacagtatatatccaattgtgggtgtggtaggggagagtttgggggaaatactgaacatgccagagtccagcccaaaatcaagcttgggatccacagctcaggactctcctgattagggcctgttgtccagggcctacctctacctgccccttctcccttttcactgtagtcatttcagaaacaataagcaggaacaataatttgaaaattattatcatttccccacatgtatctgttcttttagagaatgttttgttggctctttcaatatattcctaagtttgattgtgaaaagttctgcaaacctaggagaaaaattctcaagccgagaagaaatgcagtctaagaacagatgtaccgtttctgacaaaaatcgtttcttgcgtgtgcttttgtagagaacacatttcattttataaagatgaaagagtgctcctgtgcctgccagcttccacagggcctcttcaagatggtttagactcagattatttgggacagatggcttgtaacaggattcttcaatatctccaaatactaaattccacagtctcttttggtagcctgctgctggttcagtactcttggactgaaattttaccttatgtttaatcaagctgcttttctgttgccgtgatgttagcctagattctcaaattggactatgtcctaggcatttgtccttatagtaataggtcatttatcgcaattactgggcttcatatttttccggggccactactgttaccctctccattcctgccccaccaatctgtattttcactttgaaacatttcttcactcttgtttccagcttctttatttcctcattacatagaaactgaccctgactacagccctctgaaagatctaattaaaaagtgaaatgattgattcccttatttttgttagacatattcctcctgtttgatctcagaatacttttgtttgaattttgttacagcatggttttgaacatatattcagcttatattcatatcatcattctactgtctgctcatttgcaaactggattttgtttttgctttactatatctggatccttttccccattatgaatgtctcattttttctaggtcaccaggtatgctcctttatgtttatccctattttggcaatcctttgtattaatatacagtaggtgctagatatttgtgtatttaattagtacattccttttagttttgtctttcatgtttgggtaatatctgtttctgacaagttcctctcctgatatattatcaactccccccccccgccttgcccccaccttctcttgctgtctctctaggggtgtgttagggcttacaagtggacattgtgggttgtcagaatgattggagctcactgatggcatttagtggacagggaccaaggacaattaatgatccacaatgcacaggacattgattgtttccactgtaatgccagcagtgcccctgccgagaagcagagacagccgtgggtggttgacagtattcatcatggagccaatcctgtggcagacatacattcagaaacatctattgggggcttcctacatgccagacactgctctaagggccttatttatattaccttatttaatcttcttaaaggcagttactttggtcttttccccgtttttcagaaagattaaataacttgtccaaggtcacattgctaataagtgaaaaaaaatggggggtttcaaaccctagtttcttataatctagcaaaagtccgttcatgcttaatacctgattattgtacatttaatgtgacccataagtaagtaagttaatattacccattaggtaatagaatctaggttttaaaatgccttggaggaaggtgtctgtccccagtgagcagcttgtccatcacttattcaatccattagtcatagcctttatgaccttgttcctccttatttcctttcatttggctgtttgggatgcagcctagtggggagcagggaaccctgtgacctccatatacatggcccaccatacatcatagatgaaattaaattgtgttagtgtgatttcagtgtcacaaaatcatgatggttgtctttcaaaacttggattttctagatgattttcagtagatgttgaaaaaatagacacagccaaattgtcttttagccagtgctcttcctgaacccaccttgggcagaacttttaatagcctttaatagataaaacatttcttatttaactgtgttttaaagaggaattctctttacgaaacataaggctaaacctattctcttcagcaccaggattttctagaatttcttgtctctcctgaagtggttcaatctagggcaggaaagtggcttaggaccaaaattgcctttcttaggaatatagtatattagtaccccctcatcgtcagggagtacattctaaggcccctagaatggaagcctaaatctgcagatagtaccaaacactatattatatatagtggttttttttcctatgcatacatacctataataaagtgtactttataaattaggcaaagtaagattaacaacaataactaataattaaatcgaacaattaagtaaagtaaaagttatctgaacatgagcacttcgatcctgaggcagttgatctgataacccagaaggttacaaagtgactcaagggtgaagaagtgtctacggtgaggatacgctggacaaagagatgattcccatcccaggcaggatggagtgggactgcgggagattttatcatgctactcagaactgtgtgcaatctacaacttatgaattgtttatttctggaatttcccacctcgtattttcagaccatggttgatttcaggtaattgaaatctcagaaagcaaaactgtggattaagaggggactactgtatgttaaaatcttaattgttggattgcagaagtgaccttgtgctaaggttttgtaactattgaggggcaaaggtggctgacctggttattggcagatgggtatggggagctggtgccttcggggagctggtgccttcagggagctggtgccttcgtttccagccatgaattggtgtcagcagcctccccaatcacccttgggcaggaaagctgtcaggacagaaccctgttaactactttgaaagtgtcattgatggctcctcctatctctacgtcccatctcatctggattgacttaattgtaactactacaaccattagatgatttcgtggataaagtagtttatcttaaaattagccagtgaatacataacgcttcagtgtggcaagccaaggaagagaagtattgctaaatgattaacagcttagttaataaaatcagttctgcctttgcccttggacgttataatattgatgattattcctgtaagaagaatggccaggaaagttggaaaatctagtcagtatgcatatgaaaagttgattagctaccctctaaatgtaaatcttaaattggggaaggtagggagctatagaatcttagaagatggaggtaaatctttaactggtatctcaagatgttttattaagtgaaaataagcaagtaatatatacacacttctatatataatagtgtttttttagttttttttaactgtgatccccacagtaagaatatattttacatcacagctaagtacattatacttataaatatgatataataaaactaaagttttataaaactatattcattctcactgagagcaaagcattctgattctctactatgatcaattattatttttaatgctaagttgacatgatcatctactaatggtagatttcacccacaattgtgaaaacatccatttagcatgacctctttgtgctcaaaagaggagaaatctctggaagtatattgaagaaatgttaccattaggttccttgtgatgcgtggcttggggattgaggttgagggaagtaatgagatttttgccccttttttttaatttttaatacttgaatttttttttactgtagatatgaagtactgtaaaataataattgataaaagtaacaagcggaaaaaactgtcttgtcactgtggcattctgttccctgatatggctcttccttgtcttacctcaagtcctcagttgttgcccagacaggatctcttcctgtctgccacctctcattccagttagttccacttttttccccactgagatttcagcttcacggaaagagtttttatggaactaagaaaagaagttcagaaaactggcacttcatttataaagtgaactcacagaattgtgtctttccttttgatcttcaagttagatctagcacagaagtcacttctgtgaattaaattcttttaacctaaggaactgaacttaaccttgtctgtagcatattctttgaaaagaatttattcttttatgaaaaaatactgtataaaaaacattttgagtagagattaatcagtatctttttttttcttaataggttttcaaatggaacattttgatgcatcacttagtacctatttcaaggcattgctaggccctcgaggtaaggtggtttttggttttgcttaccttctgcagcatcactccctgcctatagtcccttgtaaatattgcatgaggagatagtagaaaatgttagcattttctatgataagtctaaaactttatcctggataacaaggaatttggagaagtctctgacagagacacctgctgtgggtggtcctccgttgactttaactggagtttaaaaatatgctgtaaagcttgtagcctgagaatactatagatttcaccattatcagtggcatttttttctcaattcttggcagtctttaagaaaaactagtttccaaaatgcagtgttgcaataggagtttaaaacctttccccttttacaattttaagggctttttaaggtcttctcattttgtatcatgttaactcactggtaaatatgcacctgaaccttacttgctgtatcttttagaaagtaaatcagcttcatattgccttcttttgatgtcatctgtaaaagtcttttaaagtcttttgtataaagaacttcttaggctcacagaaaaactagaaatggcttttaaacagacaaaaagaatctcagtttctcatgatttttaaaacacaaaagaaataacaaaaggacttagtctattaacatggcagagatgaaataataggtttcatgtcacctatgataatagtgataatagtgaaggcgtggagaaagagtacaacctctctgaaaggctgttttgccttctgttggaattaaaatgcacatgcccttttgcctagccattctactcctaatactttatcctgtggctagccttgattagttatgcaatgatacatatcaggatgctcattacagcattgtttttcaaggaatcatctggatgcctgtcagtaggggagaggttctgtaaattagtgtatggcccattgaaaagaacaaaaaagaataagttagatccatctgtat

SEQ ID NO: 11153 - DNA, 6000 bp, Homo sapiens
gaaggaaataaaatcagtatctcaaagagatgtctgcactcccatgttcattgcagcaatattaacaacagctaagacagggaaacaatgtaagtgtccactgaggaaggaatggataaagaaaatatggcatatgtacacagtgaaatattatccagccataaaagaaggaaattctttcatttgtaacatgaataaaaatgcagggcttacactaagtgaaataagtcagaaagagatagacaaatgttgtatgacctcacttatgcatggaatctaaaaaagttgaactcacagaaacagagaatacagttacccggggctgaagggtgggaaaaccggggaggtggtcaaagggtacaaacttccagttataagatgaataagctctggggatccaatgaatggagtagtgactccagttagctatactttattttataactgaatttgctaagagagtagatcttacatgttctcactacacacataaaaatggtaactatctgaggtgatggatgtgtcaactaatttgattgtggtaatcatttcacaatatatacatacatcacattaaaaaaagaaaaggcatggaagaaacttaatgcatactgcttagtgaaagaagccaatctgaaaaggcaatacattatataatgccaacaataggatattttggaaaaggcaaaactatgaagacagtaaaaagatcagtggttgccaggggtgtgggaggaggatagacagagggatgaagaactgcagcacagtatattgagattgttctgtatgatactgtaatggtggatacatgacattatacatttggcaaaacctgcagaatctacaacatgaagagtgaactgtaaagtaaactacagacctttgttaataatgatggatcagtttgagttctccctttgtgacacacataccacactaatgcaaggtgttaatcatgagggaaactatctgctcagtcatctgtaaacttgaactgctctttaaaaaagtccattaattttttaaaaatcaaaagaaatgtaaaaacaatcagtgaggatggttgtcaaactggtcagtgaaaaagttaatgcaacaattagtgagaggaatgtgggttcagaaaccagtcgtgaccagaactgtctgctatgagaatgtatcagaaactgctatagtctccatgcaattagtaataacagttgaaataaagtctacactgatgtataccatgggcagatttgtagataaggaatataacgctacttactgttatgtgagtacttgtttttttgttttttgtttaagacagagtctcactctattgcccaggctggagtgcagtggtgtgatctcggctgatcgcaacctctgcctcccgggttcaagcaattcctgtcccttagcctccagagtagctgtattacaggcatgtaccaccacaccgggctaatttttgtatttttagtagaaatggggtttcaccatgttggctagaactcctgaccttaggtgatccgcccacttcagcctcccaatatatgtgtacttttaaaacaagtgactccctcagatcttgttttattttcacaaaacttattctatctgaactttgaagtctcattaaggttttatccaactggtaaaagtagactaggatgcctatagagaaataaaggtaaaaataattatgtcaatctaacactagccagagtttttacagaggagacagactgccttgtattttgttattcatgcttcttacccttttcattctacacgtatgtgcaaattagctccttgcttcatattaactttcaaaatagcgctcggaagctttcaatctgacctttctgtggccagcaggaggagaccagggagcttaaggcattcccatatcctgggctatgtgtttagaattcttgctttgaattttataaagctactattcatacatctgggataagaaattaaaatacagtaagatactcattataaataacggtttcaatcctagatgggttatagtgaggggattaggttttttccagtcttcacttcctatagaacacagactcaaagaaaacacagactctgtgaaaggctagaactcaaatcttatgataactaattcagtgctcttttcataaaaatgtgcaatctttataagatctacatgccttacaggtatcctatcctgaaggtaaggagtgggtgtgtaataggtgacaatatatctaagttacttataacactgcctgacacaaagtatactctatgtgaggcatcagtaagcttcttctgtagagccagagagtaaacattttaggctttgtgggccataaggtttctcttgtaactaatcaaagccgcactggcagcatgaaagcagccataaaaatgaacgtgactgggttccaataaaactttatggacactgaatttgaattttatataatgttcacatatcatgaaatattcttcttctgattttttccaaccataaaaaatgtaaaaatgggtatacaaaaacaggcagtgggctggggttttgggggcatagcttgctttatataattagtagacattattatgatgtctataatatctttctagaaattatttttaatggttgtttaaacatagagtctgtttctatgttttttatttttaatggctgtttaaactggtaggagaggggggattcaaacccagcttgtgtgacatcaaggcccatgctctttcataaacaagactgtctggatgttctataatttacttagtcccctgtggttagaatttaggctatttccaatattcattattataactcaccctccagtgaacatctgtgtagttaagtctttacgcacacatgtatacccacaccttaaaatgtatttagtggtagctatcaaaacagctggtagggacgtgggcacacctgtaatcccagctactggggaggctgaggcagaagaatcgcttgaacccggggggcggaggttgcagtgcgcccagatcgcgccattgcactccagcttgggcaacaagagtgaaactctgcctcaaaaaaaaaaggctggcagagcatctagaaagaaacagactctaaagaagtaatctcaaaaagtaatcttttatggttataggaaagttcagacgtattagaaaaggagttttataaatacaatatatatacatagaacttatgtcccaaacaccattttaagacccttatatataattacaccatttagtcctcaaaactatactatgaagtgcaggtacaattatcataattatcatcatcatcatcatcatcatcatcattatccccatgttccaaaaaggaaactgaggcacagaagggctaggtaacttctccaaggtcacacagtaaactggtaggagagggagtattcaaacccggcttgtgtgacatcaaggcccatgctctttcttactaggctgcaccatctcttcaaccagagacttgtccagtgtgcacctccaggtactctttataatgtaccttcacacaatcggtggtggtattttttatattgagatcacatttcacatgcatgaacgatctcataatctaataactgatgccaattttaaccaataatgggacacttttggtggaaactgggtacccatctaaccttcctctattgtcctacaagacaactcccaacaacgccaattctttattaagtttccttgcttttcttacccaaaatagttgtccagtgaacagtaaaagttgatcggagcatactctcatgtcttattttccaacgtatggcccaaatctacattcaggtagtgctttgcctacgatggagggccttgtaccgcctgggattgctagtttcggttaagtacccctgtttgaaaacaaaaacagtggcgcgtgtcagaagtccctcccgcgcggcctcttccccctcttcctccgcagcaggaggcctgacccccgcgtcctgcacccgtgtggaccaaacgttcagcctcccccgccacaatcggacgggaactcgcgcgctttccgggctattccctgtttgtgctgagttatgggcgaatctcccaaaaaggagatatacgagtgggtcgtccaactttgaggggaaacgaggattctctttctcattttctctcctgatttctctccctacccggaccgcacttctcgaattatccccgtaaggaggaacgacgaatgccgccggtcccacgagactgccgccccccactcatgcccaaacaaggatagaatcttgtagcgaggcgacaagaaaataaataagcgggcgtttcaaaccgagtcctcgggtgtgcagacccgcagcggagtcgcgggagcgaggtgggaaatcctggccgcggcgccgggctccgcccgccggggggcgcggggcggcgggcgcatgcgcgtgcgcggtgcggccccagccctggctgccgccgcctgccgccgccgtcgcgatgcctattttagtcaaagcggctgcgggcttggggacccggcccgggcagcggagcttccggacccgccgacccgccgaggagcgcgcgtcgggctcccgtcgagcagctgagcccgtgtgccccgcgtcccgcgccccgaagctgccgctccgaactttggtcggcgctgcccaggctccccgccagggaccagccgggtaaggatgggaggcgcagctgcagccggctttccccccgcgccgggttgtgtgcggcctcgcgctcccctggctaaatcgggaagcgaaagttggatctcagcccctcggggagcaactttgtcggccctggcggcagctgcttgttctacgcgcccgggcagccgggggcgccgccctctgtccctcctcgctggccgcgccctcgaggggctcccggcccttggaggccgcccttctccccgggtctgggcgctgcggccacagagaccctcaacggtcagcggccgccgctcaggtcaggcagccccagcgtccccgggccctcggccccaccgagtgccggctcccgcgctctgcggcggcaagccccttggtgagctccgtctctgctctctccgccgagtctccggggttcctcctcgccccctgtagggccgcctcgagccgcgcagagcctgcgtgcagccgggcgcgcggtgtcgcccactccgtccccgctcggagagtagggtgggccacggcgctcactcctcacccccgcgtcccgagagcgcctggccgaggaggaccgttgccacggaccctcctcctttaaggagcgaggtcagagggccccgggagagcgccgatggctggggacccgaggtccgcgccacccacccgcaacctccttccccgagcctttgggaacgggttgttggccagacaagtcccagaaactgcctgctttgaagcatgaataagtgcgaaaagactcttagcaatgtaatgccatttgccattcgggagatgtgcgaagattcagttagaattacagaatgaattaactcgactagcaagacgctcgtttgcagttatctttttcatttttttagtttggtagaggtttaatgttagtttcagcatttagctatttagccctacaatcacctatttgaaaaacgataaacaaaactttactagtataggtaatttaaggacttcaactttgatgatctgatgagggaaaaataatttctcttgatttagtcaaaattaatctgaaaagtttaccaatttagcagtctaacctttctctttccacctattctctgtataagaattgttaagtgtaagccacttaacgattaagtggtaatcaaagtaaactgatctgatcaatattttcgacaataggtaactggcatttcacaatagacaattatatagatatatagatacatatatctatatatatctctctctctctttaataaggtgtcgtgcgtcaaaacatgtttaggatgaccgtaccttc

SEQ ID NO: 11154 - DNA, 6000 bp, Homo sapiens
gaccgcagagaggtgaggaagatcattgcctcagaaagccttgtttcagtgctttgtttgaagcattgccataattctcatcttgttagaattggaatatgaatagtatattcatattgattgattaaaggatgatatttgaagcttggtttagtgatttagctatagtgtggatgctgtaagtgtggatgcgttgtctgcccccacacttttttttttttttttaaacttttctaggaattcatcacagtttagccgctatgtttgcatcttgcaggtctgggaaacctcattctggcacttttggtgttgcgatactggggattgttgattgataaatttattctgcagcatagttggtgctgtggttaaatgagcttttctatacccatccattttctgtattttaatctgagtaacttgattaatttttaacctttactattcgtccagcaaaacgttaaaattctacttgaagctgctgatttttccaatgagattgtaaatcagtgggaaaggcatattcctaatttgatgcatagataataattgaataggaaaaagatttttgtgcagtgtgtctaaccttgaaagactacctttgactctttaattttggtaggggttgccccatcccaatgtgaattttgtaactgaacatttcattagtattagatcagttttacttcacacagggtgcataatatagttaggtggtacacgaacaaactttttttgagacagtctctttgttgcccaggctggagtgcagtggcacaatcataactcattgccacctcatattcctgggcttaagcaatccttctgcctcagcctccccagaagctgggattacaggtgcatgccaccatagctggctaatttaaaaatttttttgtagagatggtgtctcactatgttgcccaggctggtcttgaactcctgggcttaagcagtcttcccactttggcttcccagagtgctggaattacatgcttgagctactggacctggctgaaacattttaagtaattactttaatatgtgttagataaactaataactgtcagacctgtggttttgtaatattgcttagagacaagattaatgaagatttcattagtattagaacgtttttgaaaactgatttaaaggaaaactgtatttgtactgctgcatatttgatgatgtaccagttagaattagtttcagctatgaaggacataaacccccaaattacaatggcttaagcagtggactgatttacttttctctcatgtaaaggaagtctggactagagttcagctctgcaaccattagggactgaggcttctttaggtttttactctttcacctctcaaaaatggctttgaccctactgtccaaggtgggtccttatgttccagccatcacattgattattttcctgccagcaggatgaagaagggaatgaaagaggcttgtatcttactttaaggatgcttcctagaggttatgcgtgatggcctggaagcactggagactaggaaatgtcttttcaggaggaagggaggtgttgataaaaattggtgattctatttctaaagaagagactggtatttgggggcaactgtcagtctcttccacaggtagtatttaagtgttgtaaaaattgtgaaaagtactcaaatgattgcaggtcaggaactagcgttatagattgtgatattttaaatagctttgatgtatatggtttttcttttttctttttttaatagtttccacggccactccagtgccaacagccaattctacaggtaattcaagatgactgttttcttccttttccttcagtatttttaagctttcttgatggattagttttaaataattatgtaaaagttgttagtataattttaaagatgagtaaaaacttaaaagtcttggaccacagcaattaacgttaatctctaccttttgtgacagtgacacatagctccagtgttttatagtcggtgaatgtgagcagatttgctgaggctgtgtacattgagtctataaagtactttttatagatttagtggaaatcttgggaaatatagaagcctaaagcaaattataattctcatcatccagagcaaccaaaatgttttcagtgattaatttcttctagtcttttttatgtgtatctaaataaatacactttttatgaaattgtacgataacgttcatgcacctttgtatttctttttttcttttctttttttttttttggaagcgaagtcttgctctgccgctcaggctggagtgcagtggtacgatctcggttcactgcaaccttcccctcccaagttcaagcgattctcctgcctcagcctcctgagtcgctgggattacaggcacctgccatcatgcccaactaatttttgtttttttagtagagtcacggtttcaccacattggccaggctggtcttgaaatcctgacttaaagtgatccgcctacctcagactcccaaagagccgggattacaggtgtgagccaccgagcccagcctgtattttctctcttaatgtaagcattatggtatacactttacccatcctgctcttgattagagaattaggccgtctctcattctccatgcagtgaacatcttacatggaattgcatttgtatttatctctgataggtttgagtcaaacagaatttctaggtcagagggtatgattattttaaggctctccagaaagatttattattttcattcccatcaacctggaaagtttttaccgtgccctcaacagcatggataagaactccttaaaatttactaacttgagaggaagagtaaatattaaatacttaacattttaccaatattaaatgcgtctattccaagacaagtactagggtaaatggtagggttaagccagcattttgtctactgtaggaacaatgaaagatctcagtgagcacagcgtattgggaaatttgtaagaaggaatgtgtattgggtgggatgcagatgtggtgatagcttggtagtgaaactgcactggaaaacttggagagagcctctgaagtggagcagcgggtcagcacatgcggaggagatgtgaagtagtacggtgagttcaaagagtgtcccatcctgtacaaggtgagaaggagttaagctggtccatcaccagttgctcaccaggtgagcagaattgggaaacacctttgtatgccttgctggtagacttagatgttatcctgaaagattttaaagtttataggtcatatgatcagacttgcattttaataaaacaacttattctggcattgtggagagtagattggaacgatgccagaaggaactcaggagattagatagcctgttacaataattctagagaacagatagaggtgggctgcagatgtttgcaaataagtttaggaagtagaaggggtaggacttcatgactgagaggaggagaggtagagtgatagggagaaggggaggaattttcaccaaagtaagcaagaaagaggaagagcagtctattgatggttgggcctgtcatttgggattttagtttaagatacctagaatccatttaagtgggatctgttcagtattcaggaaactgcaagtcaggcaagagctcttggctaaaaatataaataggcataggcagtagtagaggcactggaggagcatatagaaagaagggatggggcttgaagaccagactctaggaaacagtaatgtctaagggctaggaagaagacgggaggaaatagggatgggggtagggtagtaaaaaagcccagagaagtatgtgcaagaaactaacagtatgtggttgtgggcgtagtttttcaaaggaagaagtagtcaaatgctgtaacaaggacaactcatcttgaaacacttacgcagtggtgtgtggagctggcttggaccagcttttgctagccagttattgtgtagtagctcttcccagcccatgttcagtgataccatgttggtaacttgaaactggttaccatggaaatagtcatgccatggaagtctgcaaatgatacaaaacttattttgagctgatgattatatggtgatgtggtcgtaaatatttaacactcattagaagacattgactaagtaggatgttgaaggttgctgaaaccagaggtgtttggagaaaagtaattttcagaaggttggttatgaaaagaaaatggggtgcagggagtgggggaacaatttattcagaactgttgttcatttcttgagaactgggttcactcttgatgtagttctctgcagctttctccaccctgggtcctcctgtgaattgccatgagtcttttgtgctatagctctctttggtgctgtaaagggggaaagcagcaagggcttatctgcagaaaatgcatcagttgactgacactagttgaagaacaaacctttaggcggtttcttttccgggcatgtgtaccgtctgccgaagagagcaagtgagaagtgaaggggtagttaaacaatgcaaagagaatctaatttatatagaagggtgtataatgaggttaattataatggccctccttcagtacaaataatagaatagccaaaatatgtcagatacagtggaaaatgttcatatgaagtggaagatgaactgtattaagcaattgtaatacaattttagctcttgttatatacatgcctagaaaaatggcaagaagtaacctgttactctgatgggactaattcagtattttttttggcattttctagattttcttaccactaatagcaacttttataacttatgattattattatttttttttaacctttcctaatgaatctttttttttcagtaaaagaaacagtaggtcaacagaggtatattccctaagtggtgcttttattttgaaaatattgtcaatgcaatacttttttcaaaatcgaaaataaaatattttgcctacttattaaaaagaaatagtttttaccttgttctgaggctgggtaatgagaaccaaattgcaaatttgcagaatttttttcctaacattgtcaaacaattggtaatagtgttttgagattgaacagaatttgatgtgtttaatttgtaaagtgtatttttttgtggttacacagaagcagtaaaaaccttgacagaaataatgagctttaacataaccacagcctctaatctaagaattctgtgtaaggaccagtcttaccagagataaggtcaaatattttcctgtaagattttctcagcatggagagttgagagaactgtttaatcaagagcaggatggatggaagtatgtacaacaatgcttgaagtaagagggaaaaaagaaagcaaatgggtctgaacatatccatcagtattatttgtatatcacctattagcttctaagtagtatcaatattaataaaagaagtcttaagctctctgtgactcatggtcatgtgaaaattagaataccttagtttcctaggattcagtcaaccttgggattatgggtagtcagcctgttacgagagtcctggtctttaaagatctacttttagcaacaattcaggtatttagcaatatctgaaaactgtcaagccctgctcttttagtgtatatttactgttaaagcacagaacttcctcttttatattagtagaatttgggaggatgctgattcctattgaggtttttgttcgattgtttgaaagtctaatgcagtgaaaagattactcatttctgtgcttcatcaacagttatttggcaccctttccctgtctttcgtgggttaagcatatcactttgaagtctgttcagttatgtactttaaacagaagtaacatttgttttccaaattctctttagccttcaaacccttttttctgaaatagtacaaaaatgaatgtttgcatagcaccttacatttttataaaaatataaatctcatatgattaatcttcctcatctttccccagatcatccctagcggcccacc

SEQ ID NO: 11155 - DNA, 6000 bp, Homo sapiens; identical to SEQ ID NO: 3448

SEQ ID NO: 11156 - DNA, 6000 bp, Homo sapiens
atgtaattacttttagtcttttttcttttttaacagatagaatgtcaattttcattgtatcattttaagatatagtgatttactgattcttaataatattttcaataatattctttttcccagataccatgtttgtgtggaagtgccccgtgtttgctatgccgatgctgtcctagtggaaacaactccactgtaactagattgatctatgcacttttcttgcttgttggagtatgtgtagcttgtgtaatgttgataccaggaatggaagaacaactgaataaggttagtctcgtttcttatttattgattaactgaggctatagggtatatatgtatatgtataaaattgattcggggatattgtaaacagaataatatagaataagacagtatgtaatcctagttgtagttcataatcttttaggaaaaagataatatacattagtttgttaagttctatgatggtggtacaggaaatgtactgtggtaatacacagaaagaagtataattctaaccaggtgtcagaatctcaatgggtcatggaaaaaaggatgttctaagaatgattagaacttgcatatacagagattgaaaaatagaaagcataatgagtataaaagagcttttcaagcaaagtatctatactttaggaagattaatcttacaattaataaagtataaaagtcaagcagttaaatatggaggctgttgcagtggtataatcaagaagagaatagcggacctgaaataagattttctggatgtaaaattgactgagcctagcactgaaatattggcagtgatatggaatcataaataacaaccaggttctggtcctacaaaaccgggaggaaagtattgctattaacctagaaaggaaaatttttagagagagtcaggttgtggaaggagattgggaacacataataaatttagtttctaacatgttgacttggtggtattgtatcgtgtacatgtatatatatatatatatatgtatgtcttactcagttcaggctgctataacaagaatatcataggctgggtggcttaagacaacaaaaatttatttctcagttttggaggctgaaagtccgagatcagggtgccaccatggtcaagttctgatgaggatcttattcctggtttacacatggccatcttacatttttgaaagaaagcagcagctctcttctgtctgtttttataagggcattaatcccatcctgagggctctaccctcatgatttaattaccacataaaggccctatctcccactatcctcccattgagggttagagtttcagcatttaattttgggtagacacaaacacgaagtccataataatatacagcagtaagtagaaaacatgaaggaatttaaaagagaaatcagagctagagactgccttgaggatagaaattgaatgttgaaaccatggcagcgtatgctgaagatcattcagagtgagcagagctagaactctgccaaaatctcttacttaagggagttagtggagaaaggaaaacctgattctgatcctagaaaactgggagggaagggataacagaaaagaacaaagaaaatgtataggttctaggaagaaagttttaagaatgacagggatagtgtctatataaaaatgagattaaggaatgtgattaagcagtagcctttgggtttggaaaccagtacatgactagtatcctggaaaagcagtttttttagagtgctgggactggaaagagtgggaggaaataatttattcttatatatatgaataatagatgtattaatagttctgaacagtagtctcagaaatagcacttacactactaaaacaagtctatcgtgctattcaagtagaatgcaagtttttaaaatgtaggataaatctataactcaaaataagcaaccagcatagagttggtattgtagtttatgatttgcgcagatggggatttaactcttttttccccactgtatgtgattaaaatgtatcagactcatcttgagtacatattcatcataaattgtaaagcaaatgccagttttctaaacctttacttaaactatttgattacatgtaatttttatttttacttaatgaaaaaaaatgatggatcataaactcttttgtttttctagattcctggattttgtgagaatgagaaaggtgttgtcccttgtaacattttggttggctataaagctgtatatcgtttgtgctttggtttggctatgttctatcttcttctctctttactaatgatcaaagtgaagagtagcagtgatcctagagctgcagtgcacaatgggtaagtttttaaataagcttcaatataaaagcttgggtagcctcttcttgataattgccagtttatccaaggaaactttaaggtaaaataaacttatacaatttgcagaattactttattcatgaatgacaggataagaaaatcttgtttttactggagaatgtcagactttggatattaaataatagctgtgataacctctgatccacagtgttttatattttcatactaaaaaagaggctctattatatttgtgactactaagggaatagctatttctccttctactgttaactttaggtggaccagtccacttacatagaactctcagttccctagacccagagagcagatttttctaggttggttgtattggacaacccagaaagaaacttcagggtttcttttatcaatcttccttcatatagagcactacttctggtacccttatttgactgttttaatatctgctgttgcttatctagttatatgtgctaccaaagacaaaaagtataaacaagtagaatataaatattaatgagaaaatatgtgacgggttgcttttcctttattttgttcctttggtcattgattattttattaaattattagagttttagatggaggcatttatcatgtgtttataaaaactattcatttatacagttcaccttatactttgatacattatcccacttatgtgaaataagcctgtgaaatggaactaacattctcatttttccataatgaattagtgagaaatacatctttctcaaaatggtcttaaaagcagtttatgtaattgttgttttttctgataatcaagtgtattagggttctctagagggacagaactaataggatagatagatatatataaaggggagtttattaagtattatctcacatgatctcaaggtcccacaataggccatctgcaagctgaggagcaaggagagccagtcctagtcccaaaactgaagaacttggagcctgatgttcaagggcagggagcatccagcacaggagaaagatgtaggctgggatgctaggccagtctagtcttttcactttttttttttgcctgctttatattctagccctgctggcagctgattagatggtgcccacccagattaagggtgtgtctgcctttcccagcccactgactgaaatgttaatcttctttggcaacaccctcacagacacacccagcatcagtactttgcacccttcaatccaatcaagttgacactcagtattaaccattacaagtcagtactttgcatccttgaattcaattgacactcagtataactatcagaagtctacccattgtcaacttgaacccgtatacatctcctgagatcatacataatctgcaaataaagacaataataaggtcatacaactaaccttacaactgaaaacgcaccagtccccaaccaaaatactaattacataaagttaacaatacttaaatgctgatgtgaagtcagtaaatcttatgtcacatgataaaggagaatggaaataaaatgaagatattttcttagtacaagtatatgcatgcatgaacatgtttttgacaaaacaaggaggaagtactcacaacaattacagccctcgtttctgcagctggacatgtggtcatagctggtattgatgactgccttctgctacccattgtgtattccctttgccttcagcaagcaactcagcaggtcgtggtttttttcctggtggagtgacccaatgatctccataagcgcctactttaactgggggaccacaatgttgttttgggtcccctggaatcaatgtcagctcagagccagtgtccagtagtccccaaaatgtcttatcatttccctttcttttccagccatttgctctgatgcttcctctagcgtggtctgggctttaatccattcctttcacatgttgacttgcctttcttatcagattttttttgctttgttttttccaattggaaagatctataatataagcttgggttcatggtaatggttaatttcactctctctccaaactatgttatctaaatatgatgattaccttgttttgtagttacaaatatggctacactccagatcataatatcctcagaaagaagtagaacattcacataaagtgtagctatttgttaagatgcagttaaatgatttcatatatgaaattatttgatgaatgtctattaataaaaaattatatttctttttgttttagattttggttctttaaatttgctgcagcaattgcaattattattggggcattcttcattccagaaggaacttttacaactggtaagaaatcctttttaagttgtttgacattgatattttataaaggaatctgaaataattgtcacctggaactataattgtttgtctttttgtttgggggtgtgtgtgtgtgtgtttccccagttggcaaaatcaagatgttcatataaaattttattttcctttttgtgtactgtgattttgaaaggaaatgataaaaatcaaactaaccaatcacttatgtatgctttctttccctttcagtgtggttttatgtaggcatggcaggtgccttttgtttcatcctcatacaactagtcttacttattgattttgcacattcatggaatgaatcgtgggttgaaaaaatggaagaagggaactcgagatgttggtatgcaggtaagctttcgtcgcagaacaacttcagtatagttgaactttgaagtcgagaatagatatgtagactaggtaaatcacttaggatttttatggtctactttcctatgatgaggtttttaatttaaactttgtgagtgtcaaaatatcacattgtatcagcaacttggtgagcagatcttttagcagattaactgggaacataacccaagaaccaggaaagaatccaaaagaacctgaatagctaaaataaatgttccaaagcatattactgaaagcatgtgcactttatagcctaattttctagcctacaatgggttaaaagcaaaatattaaagggaagaggattgctaggaatagataaacacacagtgatacaattcataaacagcagcaaataaaaaatataaaaagcaactcggatgttttattcaagtgcaaaggatgcttttatgtgcatcaataacaactaaaggaattcctatagtaatgtaattaatgattatttataatgatgatgttgagtcctttggggttatacttgaaaacagatatcccaattcaaatgcttacagggccaaaccaggtaacaaaaatgagggaacaggaggacagagtttaagtgcataagctttgtgcaaatagactacaatgaattggagagtatgaatgccccatctaaagtgcattactactgctcagctccatttattagttgccttgtgggaatgtgaacttagtattgcttgatttttctaatgtttttcaaaagaagtcataaatctggattttcatgctaaatgactgagtttcagctaaaaaaattttaaattggagtgcaagccaaatccagtgtgtctgctggcctaatattcctctcacacaactaatttgtggtgttttatctcagtggttcaagttaaaataatttggtgctcaaagaaataagctttagtcatttggaaatt

SEQ ID NO: 11157 - DNA, 6000 bp, Homo sapiens
aaatttctataagaacaatatgaaataatgcaaatttctccaaatgaaaaaagttttaaaaatccattaagaatttcaagaatttggccaggcacggtggctcatgcctgtaatcccagcactctgggaggccaaggcgggcggatcacaaggtcaggagatcgagaccatcctggctaacatggtgaaatcccgtctctactaaaaatacaaaaaaaattagccggggttggtggcgggcgcctgtagtcccagctactcggaaggctgaggcaggagaatggcgtgaacccaggaggcggagcttgcagtgagccgagatttcgccactgcacttcagcctgggcgagagtgcgagactccatctctgaaaaaaaaaaaaaaattttttcaagaattcagaaccatcttccaggtgaactgtctgtcaactgtgtttgggccatgtccacatgctggcctcacttggattgatgggtagaaaccctctgtgggccagccttcatgagtcttcaggaagtcatccttcgtataaaattttaaaatcctctactagttatccgtgggcagaacattttaaaacattcttttcttattataaaattcaatcttactgcggaaactctgggaaaaacaaaagcataaacaagaaagtaaaatctacgcattatacaaaactgagaagtaatttctgttagcattttagcattatttacctctttctctgtgtattgcttcatgtagttaggttatactgatgatgtaatttttttatcctgctactttcatttaacactatatcataatagtttccctatgtgattaaaaatatgacatattgtattttatcatagtatggatgtaccatagtttgcttaccaattcctcaatagttcgttttttcctttttttttttttttttttttttttgagacaggttcttgctctatcacccaggctggagtgcagtggcacaatttcggctcactgcaacctctgcctcccgggttcaagcgattttcctgcctcagcctcctgagtagctgggattacaggcttgagccactgcgccccacctaatttttaaatgttttgtagaagtggggtctcgctatgttgcccaggatggtctcacactcctgggctcaaactatcctactggctccgcctccttttttttttctgaggcggagtctcactctgtcgcccaggctggactgcagtgacgtgatctctgctcactgcaagctccgcctcctgggttcacgccattctcctgcctcagccttccgagtagctgggactacaggcgcccgccaccacccctggctaatttttttgtatttttagtagagacggggtttcactgtgttagccaggatggtctcgatttcctgaccttgtgatccgcccgcctcagccttccaaagtgctgggattacaggcatgagccgctggcccggctggctccgcctcctgaagtgaggggattacagcctcgttcctagttttttactgtgtaaaatgttattttagtcaatactgaataacatcaaaagtaagtaacatcttttcacataagcttcgccacattttagtattattgtctttggaattaaaattcactggattgaaagatagccacatttaaaattcttgatacatattgcaaaattgctttccaaaatatattctaattttccatcagtccaccagtgtgtgatcacacgtctgctaacagtggtattctaatgtatttattttatttttgagacagtctctctgtccccctggctggagtgcagtggtgctatctcagctcactgcaacctctgcctctcaggttcaagagatccttctgcctcagcctcccaagtagctgggactacaggcatgtgccatcacaccgggctaattttttttgtatttttagtagagagggggtttcaccatgttggccaggctagtctcgaactcctggcctcaagtgatctgcccgcctcggcctcccaaagcgctgggattagaggcgtgagccaccgcacctggcctaatgtatttcttttaaaaaattacttgaattaaacagaaaaagaactgcgctactcttgttatttataatttgttaaagatgaatatattttaaaggtatgttagccatttttcttgttctttgtgggttgccagttttctgggtggcaggcacagaatttcaatgctctattgtttgtgatggagaagaacaggttgggtggccaggaggtgaaaggataagggtatttccagcaaagaatggaggctgtaaggagctggcaaggactgagatcatttgaataggcataatgaaatagtgaaataattaggtaatttgccaaggaaaaaatcacccgttgctgcgatgatttgacttaactggctctttcccaataagtagaccccgtcttgaatctccaggacagtcatccttttttccctaccttcatcactaaagtctgggtttgtaaaatactgatgtatacttggatatttgatgattttattctttggttggtaaaaggtatagaattgtatggagcattttatttacctctccagcaaaattcccatgggctggtctctatttttcatacttttgcaaacagtacagaatgacaggccatgaagaaatgctgactcatgcgctcatgaggaagttgaattgtagatctgggcccaacacacacaatgcagcgtaagatgagggagaagataaccagtcacgaccattaaaattgttcctttccaattagaaaaaaataattcatgaccattttataaaatgtggaaaataggaaaaaaatacatagaagaaagtaaaatttaccataatcctaaaactctaaaataaatgctgttaaaacagttgggcttcttttagtcttttcaaaataggtcattttaagaattgttgatttggccaggcggggtggctcacatctgtaatcccagcactttaggaggccaaggtgggcagattacttgaggtcaggagttcgagatcagcctgaccaacatggagaaaccccgtctctactaaaaatacaaaagattagtcgggcgtggtggcaggcgtctgtaatccagctacttgggaggctgagacagaattgcttcaacccaggaggcggaggtagcagtgagccgagattgcaccactgcattccagcctgggtgacagagcaaggctccatctcaaaaaaaaaagaaaagaaaaagaaaacagacgacaggtgcagtggctcacacctgtaatcccagcactttgggaggccaaggtgggtggatcacctgaggtcgggagttcgagaccatcctgaccaacatggagaaaccccgtctttaataaaaatacaaaaaattagcagggcatggtggcgcatgcctgtaatcccagctactcggaggctgagacaggagaattgcttgaacccaggaggcagagactgcggttagccaagatcgtgccattgccctccagcctgggcaacaagagcaaaactcggtctcaaaaaaaaaaaaaacgaaaaagaaaagaaaaataatcattgatttgggccgggtgtggtggctcacgcctgtaatcctagcactttgggaggccaagaggggtggatcacttgagtccaggagttcaagatcatcctggtcaacatggtgaaaccctttctgtactaaaaatacaaaaattacccgggcatagtggtggatgcctgtagtcccagctactcaggaggctgaggcaggagaattgcttgaacctgggaggcagagggtgcagtgagctgagattgtgacactgcactgggtgacagagcaaggctctgtcacaaaaaaaaaaaaaaaaaaaaaaagttgatttgctatttcttcagtttatcctggctttatgactggaaaaaaattttttttaactcagttggattttttctttttttttttttttttttaagttgatgtctcactatgttgcccaggctggtctcagaattcctgggctcaaacaaccctcccgcctcagcctccctagtagctgaaactgcaggtgcacaccaccataccctgctttatccccactgaattttataagctgcttctgactgcaaagtgtttggcagaagagagggatatggctaaatgcacggtatgactagcttgtttcctgggacaggaatcagttcattcctgaaagggtatgtaaagagcccgtttgcctggcctaggaaaagccagaggttcagagagaggaagtgacttgctcaagatatacagcttgcattagagaggagagaacttgccttctgaaaatgcccagggcattttctactaaattctgctgccaccttaggattccccttccccagtgtgggtagcatttgagcagaacacatatctaaatctgttagaggttaccctggggcagagactataagatttcctaccaataactaaacataagagtggaaccttaaacacgaggggtctgtgagggaatccaaaacttcccctcttgaaaaagcagcctctaagggggcaaaatggagggtagtcttaggaaaacacccaaataattatcctgaggtctatcttggagtgtcctcatgaaaaacccagttacacccagggcagttacctttctgagcggtttcttataacattcctggagtggaaagtgatcaactcaaagccctccaggactctagaggcaggggatgagctggtgtcaggtagcacctggtatccagcagcttaaaaaatccagactctaggcaggctctctgtagacgtgtgttctcctgtctcagactcttagggcaggccttgggggtgggactgaaagcaaacagaccttcccactttcacattccagcctctgttattccacttaaaacgctagggttaaactgcgtttaccttaaacaggcttactgtgttcactgctggacgcctctgggcaatcttaccctcctgggaactgagagaggtaggtggaggtcagcgtgctgggaaactggtggagggaggaaactgcggggagctggtcttctcgtgttacctctgttaaatcgctgacagcagtttaaggtccaataggctggtactcaaatgggctgcgtggatgttttatatttccagaacctagcacagtgccgggcataaagtaagtacaccaaaaaatgttgaatgagtcatttggtcatgagatttctgttttcaaaggttttttttttttcaaagaatagcatgtttgtatgttgtttcattacatgatgggcctactgggcacgagggttttccatctgtctctaaatcattagtatccttctgtatctcagttacaacttttaactttgtaggaaagaacaacgttcacttcagacttaatggtttatgtttctcagttccttcaggcaagggaaaatgtttccagaatttgataaggtacttggtactgtctggcatttaaatttttttttttttttccagacatagtctcactctgtcacccaggcgagagtacggtggtgcgatctcagcttactgcaacccccacctcctgggtcctgcctcagcctcctgagtagctgggactacaggcatgcacaaccaagcccggctaatttttgtatctttagtagagatggggtttcatcatgttggccaggctggtctcaaactcctgactccatgtgatccacctgcctcagcctcctgaagtgctgggattacaggcgtgagccaccgtccacagcctgaaatgtattttatttaattagttgctgtgaggtatgaacattcctgtgaggtatgaacctcatttgataataggtaaaattgaaaatgaagctctgggccatgtagaaaagtagtagatccatattgccattctatgaaaacccatcttctgatattaaagacaggtctactaagtaaattcaggttttgccaaactcaaagctactt

SEQ ID NO: 11158 - DNA, 6000 bp, Homo sapiens
gatggggtctccctatgttgcccaggctggtctcaaactcctgggctcaaatgatcctcctgccttagcttcccaaagtgctgagattacaagcatgagccaccacacctggcccattttttatcatcattgcttctccctactccgattactgtcgtctcttgcttggattatagcagaagccttctagtggtaactcagtctcctgttttatctcaatccagtctctgatataaaaccaaagtgatcataaatcctggttctgttcctttcctaccttaaaacccttcaatggtttctctttttaaaatgtttattgtttttttagagatggggtctgtgttgcccaggttgctttcaaaatcctaggctcaggcgatcctcccacctcagcctcccaaagtgctgggattacatgcgtgagccaccatgctcagccccttcaatggtttctctttaccagcaggataaagtctgaatttcatcatgtggtttatactcaggaggctgtctcaacctcccaagtaggtgggactgcaggtgcataccaccacaccctgcctttatttcttaatcactgccacctctcacatttagtatatgagccacaccaaactgcttacagcttctatcatattctctctttctccaagacattctctcctgctgttccctctttctggaacgttatttcctcttcttagtctggctaacttctcttcatccttcagagcctcatctaactgtcttttctgggaaaccttcacaaggttaagtgtatctggtgtatgtttccatagtatcctaggttccccatcacagcactcatcccactttattattgctatttatttattgttctgttttctttgctaggttagaccctccacgaaagcagggaccgtgtaaattcattcacccttatttcccccgtgctagtacagtgtctgctcatgataatgctgcttatttgttgaataaactaatgaatgctttatgatactagatggttgggaatctaaagattagtttagaatttcaattaaaatgtatgacttgcactaatgaaaaaaaagtcagtgctactgttctggtaactaattatttataaccccaaactattattttgtgtagggatatctctaagtttgctatgcattatataatagaagaaatagatgaagacacatcaatggaagacttgcagaaaatgatggttgtggcacttatatacagattattagtttgtttctatgaggtaagctactgacttcagcaagaattaatatttaacaatctaattttatgtttttacatttatttttttgagacagagtctcgctctgtcacccaggctggagtgcagtggtgtgatcttggctcactgcaacctctgcctcctgagttcaagtgattctcctgtctcagcctcctgagtaggtgggactacaggtgcataccaccacacctggctaatttttgtatttttagtagagacagggttttgccatgtaggccaggctggtctcaaactcctggcctcagtgatctgcccaccttggcctcccaaagtgctgggattacaggcatgagccactgcacctagccaacaatctaattttagattatcagcccaagacgaaaaagtaatcgaaatttataattattcatgtcttttccacatgtctacttttctgttttttttcccaaattttaactaatcattaagtaaaaacttttggaagagagacattttacaatttctttgtaatatttttcagtcttagaaactcaaataaaatttcacttatagattgtggtccaaaaatatacttgtaaattgcaatgtagttttctgcagaagcagcttactagaaagtatagtagtcatagagaaatattacaggagacagacatcttgtggtattggacatgttagagacctacagaaatgcataaagttaaatggttaacttttgagtattctatgcaattctttcaacttgaaaaatttaaaacatgaaataatatggtgggaaaagtttatctttaaaattggtatagttgagccagtaatttttaaatcatccttctttccttagataatttgcatttggggagcaggtggagctaccccagggaagttcctgctggggcttcgagttgtgacatgtgatacatcagtgcttattgcaccaagtcgggttttagtgattccttcctcaaatgttagcattacaacgtaagtccttttcttagcttaatctactacatacttaatgaaaataatgtgttttagaatattggggtttttttcttcatagtagataggcttatatttattaagttaaaacaaagtttgaatatttatttcagttgtgttacatgattgtagacctcttttacagtacacattttcaagatgatttttttttttttttttttgtgagacggagtctcactctgttgcccaggctggagtgcagtggcacagtctcggctcactgcaggctccgcctcccaggttcacgccattctcctgcctcagcctcccgagtaggtgggactacaggtgcccgccaccacgcccggctaattttttgtatttttagtagggacggggtttcaccgtgttaaccaggatggtcttgatctcctgacctcatgatccacccgcctccgcctctcaaagtgttgggattacagacgtgagccaccatgccctgcctcaagatgatcattttatgaattataagtcacaatacgagaggatgatttgggtgttgatggtgtattagtgctccacaatcagctttattattctttggacctgtggatgttaggtcaggtactagtctgccttgagtctccatttggccatgcctgtcattattccatcttgaataggcagcagagttttgacagctatgcattcgtgcatccttctcctgctgttaggtgagagcttgtaatactgccagtattcaaggttagctgttggcatctagcgctgggggaaggtacaaccagtgataatggaaactgtggaggtcagtggctggtagtcagttgagccaaacaaggtattggctgcaatttttgccagaatgattcagagctggattgttacatcaagaaatataaacaagtgattctagaaaccttggttttgccatcttcaaatttttcttaaaatttggtagttatagccgggcacagtggctcacgcctgtaatcccagcactttgtgaggctgaggtgggcagatcacgaggtcaggagatcgagaccatcctggctaacatggtgaaaccccgtctctactaaaaatacaaaaaattagccgggcgtggtggcgggccctgtagtcccagctactcaggaggctgaggcaggagaatggcatgaacccgggaggcagagcttgcagtgagctgagattgcaccactgcactccaacctgggcgacagagcaagactccatctcaaaaaaaaaaaaaaacaaaacaaaactggtagttataaacctacctacttcttttaataagagtcagtaatggctaatgtttattgagtactttttatatacctgcactgttaataacactgcatatgtattaatttaatgctaacaacctcataagatagagactattgatctatatctatagtatcataagatactataggtagtctctatctatatactataggtagtatctatatactataggtagtatctatatactatctatagtatcataagatagatactattgttccctttttgcagatgtggaatacaactagtaattggtagacgatggatctgaatttaactagtctggattcagaacccacactcctagccactgtacttttctgcagcccttcagtgcactaaaaggcagaaatctaacataagtaggataattctccatcctgagtgattgttgaaagcttttaaaagctttgcttaatcactggatcccacaaaggaaaatgctgattaaagaacacacagtactttaaaatgcatgttttttctataaggtagacaaatgggactacagtaagcatactcagaaagtactcagaattaatgttcatttcttctgagaaaatactagaaagctctgtaaaccattaattcaatattctgagacatgtttattactgctttttatgttgttgaagtcttattagaaatagcccaggtggtttgatcatgatacagtgctacttgaaaatatatcaaaggtaaaaattctctcaactataccttgaatgtctttttccctgtagacttctgtagagaagtacaattgtgttttaaatgtctattttgaacttgatgggataccattaatctatatgtggtttgatgtgtaacttacctgatatttttgttttaactttttaggtccactatccgagctttgatcaagaatttttcaattgcttcttttttccctgctttcatcacactgctgttttttcagcataatcgaacagcttatgacattgtagcaggaaccattgtggtaaaaagaaatggggtcagatgatgccccccaaaaccctgatttccacacactaagactaaattatgtatcaaggccatcagtatccctgggttacactaattgatgatttagaaattaaagcagtcactccagtgtgatgcaggtgactactctgaaagtattgattatacttgaatgccaaagaacttgtccagaagaaaaacctgttaaattcaagtattaaaatttttagatcaaaaaggcaaatgattttataaacaatggacaatatatactttcttaagatctaaggtactttcttaagatctaagaatttgctgaaagcattttcagctttgaaatctccaaatgaaactttaaaatttattttggtttatcccaaaataatggaaaatgtccagttgtgttttgtaaacacctatgtaactcatcttttagtttacacttcctggggaaattgtctttggtgtttagaggagggaatgagaacacaaattggataatccactgtctcccatcccaggaggtggtgagttggctacaagagaaagggacaagtgaggcaggcctagcagttcccttacctgaagttttcaaatccatactgcagttccctctcgtaatgatgtaactttacaactattcttaatgcttgaacatgtatttaggggcaagtttctcatgatgatgaaaaagtatcaagtcatattgctatgttaattggtttttttttttaaaaggtaagttagtgattactgttaatggtgggggagtaagttttcactgtaaattgaacttataatttatgtgcaagtgttttcagtgccctgaatcaaactataaatgtggggagaaatcacctccatcaaacagttgcatatttactgtaaaagtattcccagtatgtgtgcagcatgaagaaagtattagtgcttctcagtgttctcagtgtaaattctatttatatacagcatattcacatactactttccttatattttatatagttctatgactgttgaaacatcaaggagttaaaaaaatcttaatatttcatgattaactctaagtactattaattaatagcttgcgaaatattagcaattttcccattatggactattctctctaaagcaagagagactagcattcccagacatcattctagggtctttaagctcattttgggtctgctaaagtttggggggaaatgttacgcaaagtgatactgtgtatgttgccattttgctttattcttctgttgaagcaaaattgtggggttttattatgtgtgtgtgcttttcctagatgtcccagttagctgtgctgagatatacctgtactatttatggtttaagttttgattcttaggtattttctccagctctgacattgttttccaaagacacactaaactgcattgcacagttcaaaatttgattacttaagggat

SEQ ID NO: 11159 - DNA, 6000 bp, Homo sapiens
aaactattttaaaattcatatggatccaaaaaagagctcctatagccagaagaatcctaagcaaaaagaacaaagctggaggcatgaggctacctgacttaaaactatactacaaggctacagtaactgaaacagcaaggtactggtacaaaaacaggcacatagaccaatggaacagaatagagaactcagaaataagaccacacatctaaaaccctgtgatcttcaatgagcccgacaaaaataagcaatgggcaaaggattccctatttaacaaatggtgctgggagaactggctagcaatctgcagaaaattgaaactggactccttccttacaccttgcccaaaaattaacttaagatggattaaagacttaaatgtaaatcccaaaactataaaaaccctggaagaaaatctaggcaataccaatcaggacatagggatgggcaaagattttatgatgaaaatgccaaaagcaactgccacaaaagcaaaaattgacaaatgggatctaattaaacaaaagagcttctgtagagtgaaagaaactattatcagagtgaacagacatcctacagaatgggagaaaatttttgcagtctgtccacctgacaaaggtctcatattcagaagctacaaagaacttaagcaaatttacaccaaaaaaaaagcttcattaaaaagtggacaaaggacctaaacagacacttctcaaaagaagacatacatgtggccaataaacataagaaaaaaagctaaacatcactgatcattagaaaaatgcaaatcaatactacaatgagataccatctcatgccagtcagaatggcaattattaaaagtcaagaaacaacagatgctggcaaggttgcagagaaataggaaggcttttacactgttggtggaaatgtaaattggttcaaccattgtggaagacagtgtggcaattcctcaaagatttagaaccagaaataccatttgacccagcaatcccattaaaggttatatacccaaaggaatataaatcattctattataaaggtatatgcatgtgtatgttcattgcagcactattcacaatagcaaagacatggaatcaacccaaatgcccacaaatgaggaactggataaagaaaatatggtacatatacaccacggaatattatgcaaccataaaaaggaatgagatcaagtcctttgcagagatacgaatgaagctggaagccattatcctcagcaaactcacacaggaacagaaaaccaaacaccgcatgttctcacttataattgggaactgagcaatgagaatacatggaaccagggagaggaaaaacacacaatggggcctgttcggggagggcagtgatggggggatcattaggaaaaatagctaatgaatgccagggttaacacctaggtgatgggttgataggtacagccaaccaccatggcacacgattacctatgtaacaaacctgcacatcctgcacacgtaccctggaacttaaaattaaattaaattaaattaaattaaaagataagcttaaagcattaaagaaaaataattagataaaagaagtctttgatttacaaaatcctgaaacaatagttttaattttgcttttaacatatacgtaagtcctttagtacagctctctttcagaggtgcagcttaattccctctcttaagtgtggcttggacttaatgatgcacttctgatatggcctgtctctgtgttcccacccaaatctcattttgaattgtcatgcgaattctaatccccacatattggcggagggacttcatgggaggtgatcgaatcatggggatgattcccccaagctgtggaagtcagcggttgaacctatttttcctaatgctcccctcagcactgccctcccataataggctccagtgtgtgatgttcctctccctgtgtccatgtgttctcattgctcagctcccagttacaagtgagaacatgtggtgtttggtttcctgttcctgtgttagcttgctgaggataatggcttccagcttcatccatatccctgcaaaggacttgatctcattcctttttatggctgcataatattccatggtgtatatgtaccatataaggggattttccccacttcactctgcatttttctctcctgccaccatgtgaagaatgacatgtttgcttccccttctgccatgattgtaagtttcctggggcagcctcctcagccatgcacaactgtgagtcaactaaacctcttgcctttataaattacccagtctcaggtatttctttatagcagtgtgagaacagactaatacaacttctaactgatagagtaatgttgacataacagtttgtgactctgggtgtagaatgtgaaactcactatggcttccaccttctctctctctgtctctgggatcatgagctcttggggacccagctgctgtgccataagcagccctgcaggaaggtccatgtggctaagaactgaggccccctgggaccagacagcaaggaactaggcttttccaacagccatgtgactaagccatgtttcacatgaatccctagccccagtgaagccctcagacgatgcagccctaggctgacaactggactgcaaccttgtgagaggccctgagccagaagcactcaggaaaaccgctcctggattcctgaccattagaaactgtgggagatgatgaatatttgttgttttgagctgctaagttttacataatttgttacacaatagtaaataactaatacattttcacaagagaggatgtattattacacattaatttgcatttgctctaaatttatcatcatcatattactatttttgagacagggtcttgctctgtcacccaggctggagtgcagtggcatgatcaccatgcactgcagtgtcgacctcctgggctcaagggatcctctgatctcagcctcttgagtagctgggactataggcatgaattaacatgcctggctaattttctaatttttttgtagagatgggggtttcaccatgttgcccaggctgatcttgaacttctggagtcaaatctgccttcctctgccttcaacagtgctaggattgcaggcgtgagccaccacacctggtctaaattaactataagatattaaacatgtaacttagttttaaaaggaaaggagaatttccacggctgaagaggatgtattttattactattcacaatgatcactttacttgaacttcaatttccaactgtgtccaaattaaacacaaaaggaagatccagcccttcctgggctgattctatcatggctcccaacaaccagctcctggtcattcaccttcccccagttattcaaccaactctaatgtaggtgctgctgtgaagggatttagcagatataattaagggcctcaattagttgactttaggctgagtttatcctgcttggactgtcctaataaggagagtccttgaaaggactgggttcttcctgagcatagagattcacagtgtgagagggattcagcataaggggtttcctccactgtgggctttgaaaatgaaggggctgtgtaggaaaggacgctggtgggcaccatgcattgagtgcagccctccctgttctctacagtgacagccagtgaggaacagggacctcagtcttacaactgccagaaactgcattctgccacctctgtataagcctgaaggaggattcaaaatgaaaacacaggtttaggaagaccggaacagagattccatccacatcatgcccagatttctgattaagaaactataaacaacaaatgagtgttatttggccaggcgtggtagtgcacacctgtatcctaacatttgaggagctgacacaggaggaacacttgcagccaggactttgagaccagctaggataatatagtgagacactcgtctctacatttctttttaattagctgggcatggtggcacttgcctgcagtcctagctactctgaagactgaggtaggagggtcccttgagcccaggaatttgaggctgcagtgagccatgatcatgtgactgcacttcatcctggatgacagagggagactctgtctctaaaaataaatcaatgaatacaataaatgggtgctgtttaaagccaatgtttgtgacaatttgttacccagtcttataaaattcatacacagactcaaaagactcctggaatgaactgatgaattgatacgcacactagttacataaaataaaatcttttttaacttttttagtgttttacattttataattttctgtgatgcaatttaatacactcataattcattcattcagccaagaaaaaataatttagtccctacaatgaaccaggtatgccctcatatgctcaagtgcctgacattctagaagcttcacaagaatgaggtggagccactggagtgttttaggtggagaaatgacacactctgactcatagtagcaggaccactatagagagaacactcatgtagcaggtcatggaacagtgctagagccacagttcaggagtgagagggtggtggggattaaggggagaagagggcctgagggatgagagggacggagggaagggctggaggagcaggaggtgaggaaaaggagcagaggaaagaattccaaagcagcagaactcttaggtttaaacacattgttttatagattttaatacatccatctacagagcttcgctgggtgttctttgcagttggcctttaatatcttatgtgggtctgcctagaaactaattgttttttatgttaatcaggtttaaaaaatactaagtattcctaaaaaatatacactccactcacatgtggatacttcctaaaaacaggcagtgcgtgagcactagtgaggggcattgtgactgcactgaacacttacaactgtgaggtgaataaagtttgtgctggctcctggttgcaacatatagtaacatagtgtggtactttgtcttgaggagatgtcctggactcacacggaaacttagggctacggaatgaaggtaaatttaaaataaaacaagcgggagtcacagatacactgtctgggaaagtgaaacttaagagctttgtgagtcgtgttgtaatgcttttagatgcatttatataccaacaggccaaagtcacattttttaccgattagattcctgatcattcaggggttaccaaggttatgctacccactatagttaataaacaaaaagcaaactggtctctattctatctcatgcactcaggcacaacttttccagatttaagggggaaaaaaaaccctgtctttacacctacaatcccagggcgagctcactctctggcaacaagctccctggggtgatttttcttctagaagagtacaggaggacaggcaaggagtgggaggcagggagtccagttcagggacagggattccgggatgaaaagtgaagggagagggccagggaccttgccgagggtttctccctggtttctcagacagctcctgggccaagactcagggagacactgagacagaacgcttggcacaagagtagcggggtcagggcgaagtcccagggcctcaagcgtggctctcagggtctcaggccccacaggcggtgtatgggttggggaggccccgcgttggggattctctcctccttctcctaacctgtgtcgggtccttcttcctggatactcaccgggcggccccagttctcactcccattaggtgacaggtttttagagaagccaatcagcgtcgccgcggtcctggttctaaagtcctcgctcacccacccggactcattctccccagacgccaaggatggtggtcatggcgccccgaaccctcttcctgctgctctcgggggccctgaccctgaccgagacctgggcgggtgagtgcggggtcaggagggaaacagcccctgcgcggaggagggaggggccggcccggcgggggcgca

SEQ ID NO: 11160 - DNA, 6000 bp, Homo sapiens
cagggacctcagtcttacaactgcaagaaactgcattctgccacctctgtataaacccgaaggaggattcaaaatgaaaacacagcttttggaagcccagaatggagattctatccacatcttgcccagatttctgaccaaggaactataagcagataaatgtgtgttgttttgccaggcatggtagtgtgcgaatgaattgatgaattgatatacacactagttgcataaaataaaatctttctgaactttttcagtgttttacagtttataattatctgtgatgcaatttaatacactcatatttcattcattaagtcaacaaaaattaacttagtccctacaatgaacgaggtatcccctcatatgctcaagtgcctgacactccagaagcttcacaagaccgaggtggagacactggagtgttttaagtggagaaatgacacactccgactcacaggagcagggccactgtgaaaagaacagttacgtagcaggtcatgggacagtgctagtgtcacaattcatgagtgacagtgtggtgggaactaaggggagaggagggcctgaaggatgagaaggatggagggaagggctggagaagcaggaggtgaggaaaaggagcagaggaaagaatttgaaagcagcagaattcttaggtttaaagacattgttttatggattttaatacatcaatctacagagcctaggagggtgtccttggcagttgtcttttaatacctcatgtgggtctgcctaaaaactattttttatgttaatcaggtttaaaaattactaagtgttcctataaaatatacacaacacttagaagtggatacttcctaaaaacaggcagtgcatgagcactagtgaggggcattgtgactgccttgaacagttgcaactttgaggtgaataaagcctgtaatggcttctggttgcaacatataggaacacagtggctactttgtattgaggagatgtcgtggactcacacagaaactcagagctaaggaatgatggcaaatttaaagtaagacaagcaggagtcacagatacattgtctgggaaagtgcaacttagtagctttgtgagtcctgttgtaatgcttttggacacatttatacattaaggggccaaagtcacattttttacctattagattcctgatcattcaggggttaccaagattctgctacccactgtagttaataaacaaagagcaaattggtctctattctgtctcatgcactcaggcacaacttttccggattaaaaacaaaaacaacaacaacaaaaatctacacctccattcccagatcaagcttactctctggcaccaaactccatggggtgatttttcttctagaagagtccaggtggacaggtaaggagtgggagtcagggagtccagttcagggacagagataatgggatgaaaagtgaaaggagagggacggggcccatgccgagggtttctcccttgtttctcagacagctcctgggccaagactcagggagacattgagacagagcgcttcgcacaggagcagaggggtcagggcgaagtcccagggccccaggcgtggctctcagagtctcaggccccgaaggcggtgtatggattggggagtcccagccttggggattccccaactccgcagtttcttttctccctctcccaacctacgtagggtccttcatcctggatactcacgacgcggacccagttctcactcccattgggtgtcgggtttccagagaagccaatcagtgtcgtcgcggtcgctgttctaaagcccgcacgcacccaccgggactcagattctccccagacgccgaggatggccgtcatggcgccccgaaccctcctcctgctactctcgggggccctggccctgacccagacctgggcgggtgagtgcggggtcgggagggaaaccgcctctgcggggagaagcaaggggccctcctggcgggggcgcaggaccgggggagccgcgccgggacgagggtcgggcaggtctcagccactgctcgcccccaggctcccactccatgaggtatttcttcacatccgtgtcccggcccggccgcggggagccccgcttcatcgccgtgggctacgtggacgacacgcagttcgtgcggttcgacagcgacgccgcgagccagaggatggagccgcgggcgccgtggatagagcaggaggggccggagtattgggaccaggagacacggaatgtgaaggcccagtcacagactgaccgagtggacctggggaccctgcgcggctactacaaccagagcgaggccggtgagtgaccccggccgggggcgcaggtcaggacccctcatcccccacggacgggccaggtcgcccacagtctccgggtccgagatccaccccgaagccgcgggaccccgagacccttgccccgggagaggcccaggcgcctttacccggtttcattttcagtttaggccaaaaatccccccgggttggtcggggctgggcggggctcgggggactgggctgaccgcggggtcggggccaggttctcacaccatccagataatgtatggctgcgacgtggggtcggacgggcgcttcctccgcgggtaccggcaggacgcctacgacggcaaggattacatcgccctgaacgaggacctgcgctcttggaccgcggcggacatggcggctcagatcaccaagcgcaagtgggaggcggcccatgaggcggagcagttgagagcctacctggatggcacgtgcgtggagtggctccgcagatacctggagaacgggaaggagacgctgcagcgcacgggtaccaggggccacggggcgcctccctgatcgcctgtagatctcccgggctggcctcccacaaggaggggagacaattgggaccaacactagaatatcaccctccctctggtcctgagggagaggaatcctcctgggttccagatcctgtaccagagagtgactctgaggttccgccctgctctctgacacaattaagggataaaatctctgaaggagtgacgggaagacgatccctcgaatactgatgagtggttccctttgacaccggcagcagccttgggcccgtgacttttcctctcaggccttgttctctgcttcacactcaatgtgtgtgggggtctgagtccagcacttctgagtccctcagcctccactcaggtcaggaccagaagtcgctgttcccttctcagggaatagaagattatcccaggtgcctgtgtccaggctggtgtctgggttctgtgctctcttccccatcccgggtgtcctgtccattctcaagatggccacatgcgtgctggtggagtgtcccatgacagatgcaaaatgcctgaattttctgactcttcccgtcagacccccccaagacacatatgacccaccaccccatctctgaccatgaggccaccctgaggtgctgggccctgggcttctaccctgcggagatcacactgacctggcagcgggatggggaggaccagacccaggacacggagctcgtggagaccaggcctgcaggggatggaaccttccagaagtgggcggctgtggtggtgccttctggagaggagcagagatacacctgccatgtgcagcatgagggtctgcccaagcccctcaccctgagatggggtaaggagggagatgggggtgtcatgtctcttagggaaagcaggagcctctctggagacctttagcagggtcagggcccctcaccttcccctcttttcccagagctgtcttcccagcccaccatccccatcgtgggcatcattgctggcctggttctccttggagctgtgatcactggagctgtggtcgctgccgtgatgtggaggaggaagagctcaggtggagaaggggtgaagggtggggtctgagatttcttgtctcactgagggttccaagccccagctagaaatgtgccctgtctcattactgggaagcaccgtccacaatcatgggcctacccagtctgggccctgtgtgccagcacttactcttttgtaaagcacctgttaaaatgaaggacagatttatcaccttgattacggcggtgatgggacctgatcccagcagtcacaagtcacaggggaaggtccctgaggacagacctcaggagggctattggtccaggacccacacctgctttcttcatgtttcctgatcccgccctgggtctgcagtcacacatttctggaaacttctctggggtccaagactaggaggttcctctaggaccttaaggccctggctcctttctggtatctcacaggacattttcttctcacagatagaaaaggagggagttacactcaggctgcaagtaagtatgaaggaggctgatgcctgaggtccttgggatattgtgtttgggagcccatgggggagcccacccacctcacaattcctcctctagccacatcttctgtgggatctgaccaggttctgtttttgttctaccccaggcagtgacagtgcccagggctctgatgtgtccctcacagcttgtaaaggtgagagcttggaggacctaatgtgtgttgggtgttgggcggaacagtggacacagctgtgctatggggtttctttgcattggatgtattgagcatgcgatgggctgtttaaggtgtgacccctcactgtgatggatatgaatttgttcatgaatatttttttctatagtgtgagacagctgccttgtgtgggactgagaggcaagagttgttcctgcccttccctttgtgacttgaagaaccctgactttgtttctgcaaaggcacctgcatgtgtctgtgttcgtgtaggcataatgtgaggaggtggggagaccaccccacccccatgtccaccatgaccctcttcccacgctgacctgtgctccctccccaatcatctttcctgttccagagaggtggggctgaggtgtctccatctctgtctcaacttcatggtgcactgagctgtaacttcttccttccctattaaaattagaaccttagtataaatttactttctcaaattcttgccatgagaggttgatgagttaattaaaggagaagattcctaaaatttgagagacaaaataaatggaagacatgagaaccttccagagtccacgtgtttcttgtgctgatttgttgcaggggaggagagtagatggggctgtgcccagtttctgttctggccaccatgggctttatgtggtcacagctcacctgggtcatctttgctgctccattgtccttggcccttcagtagaaccttgtcccaccaagacctgtgatcacagggagttggatgtcacctagggtggtccctgcatacaaatctccttgtggtatcaagagacaaattttcagacctgtccaggtcttgccttcctcccagggctttttccttaatggtattttcgatttttctccaatctttttaaaggaaccagattgtgacatttgcagagaggaggggtcccatagtttctcatcatggttaactttctgttggaactcctcttctgccctcctactcttcttcctgctctgagttgtagtaatcctagtgctggctccaatccaaactcatagatttataaagcagagtctaatttagattcatatgtggttggaaaattgtacccataaggctagggttattgttcctgaagagaaatatatggttttgtgctgaagtgtgcaggagggttggtgtgggaggagggaggacatacaagcagccctggtgagaaaagcactggcggcatggatgtccacgtgaacttatgttctttagctgccacaaaacagcatttgccctgtggctacattaataaagatatgggctttagaatagggaggtgctctacagtgatcattcattcaactgacatttgttgtctgctagggatatgactgcttttgcatttagaaagcatccttaaagta

SEQ ID NO: 11161 - DNA, 6000 bp, Homo sapiens
aatagtgtttttctgaaatgaagttgctgctggcaacagaccatgtactgcctgatgaaggttcttccgcacttggcacaatattccactgtgtgcctggcgatgactcaattcttccccttctcatgtctgttcaaattactaagaaatctttgttagaacttgtctcctggccttcacttggtacaaatgcgaccaagacaattaaagctataaataggtaaatgcaaatgcaggtactcacaagcagggccaggatcagttacaaatgacccaaaacatgcttataacacttttcaaatgctactaaggaaagttagacatggaacttaatagttttcacaggtattcacgagtcctcaggagtccagagacctcagtttgagaacactatcctagcactgaccttgacttccagggtgaccttgaggtaagcatttaccatttttggatctctgtacattttttgtacacaagaataatttgggccaccagtgttcttgggagataaaagaagttagaggagttaatgacaatgttccaagatgttcaaggactagagagaaaggataagaatgtattatagacctctagagttggaaaaagaatggtggctgagatcctccagcctagctttggctctgtaatcaaaaagactcagatttgggccaagcattgtggcacacgcctgtaatctcattacactgggaggctgtggcagaaggatcgcttgaggccaggagtttgagactagcctacgtaacatggtgagaccctatctctaccaatctctacatacaaacaaaaaatggctgggcgtggtggctcatgcctgtaatcccagcactttgggaggcggaggcgggcggatcacgaggtcaggagttcaagatcagcctggccaacatggtgaaatcctgtctctactaaaaatacaaaaattagctgggtgtggtggcgggcacgtataatcccagctactctcaaggctgaggcaggagaatcgtttgaacccgggaggcagaggttgcagtgagccgagagcgtgccattgcactccagcctaggcaacagggcgagactctgtctcaaaaaaataaaaataaaaaataacaggacatgatggtgcctgagccccagctatttgggaggctgaggtgggaggatggcttgagaggttgcattgagttataattgtacccctgcactccagcctgggtgacagagagcttgtctctataaaacaaataaacaaacaactgagatctgaattccagatctgccatttactgtgtgtgtatgggggatggggatggagagcaacttttctaactctcagtttctaccctaagtgggcatgtttcaaaatgccacatcacagaactgctgtgtgggccaaatgagatggctctggaaagcgctgagagcagagcctggctcacagcaaggctcagggatcctaagacgctgctgagaattccacaggctttttagcaaaggacaatagaaaagagaaagtgaagattctaacattctgcctataaatgacaacatctcctatatgtgcaaattaggtcattgtaccctaaatagccccgcagctgccctgggcttccagtcagcctttctgacctctctcttgggtctgctgctttggggtgcttcctgccattccctgcccaagcctgaatctctttcctggccgctttcactttccttccattttccagtaattggagttggtcacctgtgcagcaagcgcccccaagtggccttcctgttcactgtccggaccataaggcctaaagaatactccgataagtttatcaaggccgggcttccgcagaggcaggactcaccaggcttagcggtcggtccagggtcggtccagtctggaggcccagggagccattctacatccccctttccattttggaagactgagatggaggaatccaggggaagttctgggtaggaagcagccacttgccattaagtggcaattaaattgctattgcaatttaaggtaaatcgcagcccctctgggcctagttttcttttttctcactctttttttggcgatagagtcttgctccgtcacccaggctggagtgtagtggtgtgatcatagttactgttacctcgaactctggggctcaagccatcctcctgcctcagcttttgggtagctgggattacaaggttttctttttatgagagccctgccccactcatgtcagagggccctgaggaggcaaacacaggatggttgaaaatgctagtaaaacacctaggatgtgcactgctgtcctggctggaggcttagggggagcaccatgggacgtacacaggataaagtgggattaactcctccctcccctcagccattactctgaactctgcatcccacatgctgctgccaaaaaccacttttaaaagaacacaaatctaaacatgtcatttcccagctcaaaaccccaaggttctttctcctcaccttcagaataagccaaactactcaatgataggttccaaatctgcctttctggtttcactcatgggatggacccttcttccaggtgaggctgcatttggacatagccatattcacgcctccctgccttggctcctccgcttctctggccaggaatggccttgcctcatctctgcaaatcttagcatgacttaaggcccagttcaagctccagctcctccctgaggtcttcctgagtcttgtctcctgtcccactcaggaggacctggcctcctccttccctgggttcccatgaccctttccagctctgcctgtagcacggtgttctgtcttctgtgactacatatatacgcctaacactctctagattgtaaaggcctggaaggtggggagtgggttccattactgaatgcatctttcatagctctcgctgtcagagccctgccctatgcaaactcttttatttttatttatttatttatttatttatttattttgagagggactttcactcttgtatcccaggctggagtgcaatggcgcattctcagctcactgcaacctccacctctcgggttcaagcgattctcctgcctcagcctcccaagtagctgggattacaggtaaccgccaccatgcctggctgatttttttgcatttttagtagagacagggtttcaccacgttggtcgggctggtctcgaactcctgacttcaggtgatctgcctgactcgggcctcccaaagtgctgggatgataggcatgagccactgcacctggtgccctatgcaaactcttattttattattattattttttgagacagagtctccctctgtcacccaggctggagtgcagtggtgtgatcttggctcactgcaacctccacctctcaggtgcaaacaattctcctgcttcagcctcccaagtagctggggttacagacgcgcaccaccacacccagctaatttttttctatttttagtagagatggggtttcaccatgttggctaggctgatctcaaactcctgacctcaggtgatccacccacctcggcctctcaaagcaaactcttaataacaactgttgtggaatgacttgggaggtggcactcagagatcccaagtgacacatgagaagtccacagagagagatcatgtttagtggagtttggatggttgcttttatcagtgggcctgtaccttacagatgctatctcattatcttctaaacagactctgggccagtgaccattatctccctcttactgatgtagactcagccaagagaagccagatgttgagtcggaaccttaactctccctctcagacgcagagccctgctttctcccctcccatttgatactctgcttcctcttgcatgctgtgagaggcggcctcattactcctcttccctcctccagtccctccaagcctaattcatcacctttggctttgggatcatagtttccaaaccaaggattgtctgaacattgtctgacaatgccctttttttttttttttaggcagggtcttgctctgttgcccaggctggagtgcagtggtgcaatcatggcacactgcagccttgacctcccgggctcaggtgatcctcccacccagcctcctggtgcgcatcaccacatccagctaattttggtattttttgtagagatggggttgtgccatgttgcccaagctggtctcgaacttctgggctcaagcgatcagccctccttggcctcccaaagtgctgggattataggcatgagccaccgcaactggcaccattgccattggtatttaagaggtgatggtttaggctttgaaattggggttgtttgtgaaaactgagagcaccttttgttttcagatatttcctatggccattggtgtaattggagggaagctctcgccatatataatatttttgagacagccaactaagaaactgggattctggttctctccagggtgcaaaatcctgggagaaggaagtgaattctcaggggcccagaaggagtctctaaaggacctctgccagtcaattctaatctctcttctcccctgcaaatcagcccctgcttctgcctctttctccgcctctcctagattctccccctctggagggcctgagctcccggccaccacccccaatgccgctttctgtttcctctgcctcccttcatctccttttgtctggggtttctttgtctggggtctccctttggttctgtttcacagttctcagcctcccctccctttctccacagccaggctgctcagtccctctctgcgggggcctagaggctcggtgaggggagcgggacttggttgccatggtcacattgaagccagccgcagctggcccgggcagctgctcctcctgggcccggggccccggacgctcggacaaagccaggcagcgttggcagccccagacccgaccccaaaggcctgagactggggtgactgggacctaagagaatcctgagctggaggtgagaggggggaagccagagatgaactgggagggcaggagtgggcactggagctgggccctccccttgtgggcagggaccaggcggtccccggctggaggctggaggtgtgttgggaggaggggagcggcccagagcctggcagggaggaggggaaagagagggaatagagttgggtgccatggtgtggtgaatgggctgagggactagggtgtccccaaagggggaccgttgtccagaaacaggttagattctctctttggtcctcatgtccccatctgtcccgcaggtgcctcttcctttctcagccttttatacttctcatctccccgtgtcccttagcttcacactctgcgccccagtctccctcctctttccctccactctctgtttcactccagccccttcttcccttgtccttgcttcttgtccccttgatctgtctgcccagctctcaagcctcctcagttccctgccttcctctcttaggagtttgtttccaacactgtttccttcccgagtccacttcagttccttcatccagttcagcccttttcttcccaaacttcagtctcctcctctgagcccctggggcttcccaccttttgctgtgtgtgccctgtcttcatcctccttttcctctctcagacctgtctccttggccttgacctcagtccatctccgtctctctgggaattctctcaccattgtccccatctgaccatcagcctcctctccctcttctggtcccttgcccttttcttccccaaccacagctgagctgtttcatctctctcccagagctacgtcatctcaatctcctccttcgctccctggcctcagtttccagtttattcagtggcatcaggtctgactcacacccaaagccttgtacactccttcaccctgccccccacccgtcgcttcttactctccccagctgctgacccagcctgctcctccagaggcagctgcagctcccggaaggggactgcagctagtgt

SEQ ID NO: 11162 - DNA, 6000 bp, Homo sapiens
ggagccaagcatccgcaagatacaactctccaccagggcctgttgcagccactcaccagtcctccctgatcctggggcactaaggccagcacagccaggacagtgataggcaccgccagcaacaaggtcaccagagaagtggctcctgccacagctagcaggagggaacccctcccctggagcctcccacccctgccctccagccccagtgcccccattgagactgaaccagagccagagcagggggctttcatacctcagggacgggcccaccccctccctgtagacctgcacacctggctgggactttccgcacacccctgctcccctcacccagcttcctgtttacccagagctggggtggggcagctggatgcctgggttctctgaactggggaagaagttgaggttagggagacaggctctcagggtggaaccaaaggggtctttagacatcttctggctcagcagagagagaaactgaggcccagggagggaaggtagcttgcaggaagccagtcagcagagctgaaatgagaacacagatctccaggtttccaatgtggtttgcattcttctataccctcaaggtaggtgctggaggaagagctgatcccgtctctgaggtcaagggccggactaggacaaggactggaatcttgagggatggatgtctgggttccctgagaagaactgattcccatactgggctgacctcctcccgttcccttgctcatctccagccccctgtgctgagtgagaaagggagaggtaagccttagcctcaccactgactactgactcactaaggagggatggaaatggagctttacctcccttgctacaaaaagtaaagacagatggacgaggcatactcccaccctcagagagcttccaagtctacaatgagccctatccattagtaggtgcttactaaatgtttatacataaatgaataaaaggacaaataaatgcaggaataaccaaaacaaagcagcaaggaccacatgaatggtagatgtaggcagcatgagtggttaagagtcaagggagtagccggggtagtggcttacacctgtaatcccaacactttgggaggctgaggcaggtggatcacttgaggtcaggagttcgagaccagcctggccaacatggtgaaaccctgtctctactaaagatacaaaaagttagccgggcgtggtggcacgcgcctgtaattccagctacacaggaggctgaggcaggagaatcacttaaacctgggaggcagaggttgcagtgagccaagattgcaccattgcactccagcctgggcaacaggctgagactctctctctcaaaaaaaaaaaaaaaaaaaaaaaaagagtcaagggaagaaagaccaggtccaaggaagctggaagtggctccaatcatctccccttcttggtaacatctctatgtgtttccgtaatactaataataatatagctgacccacaaaatgcacttaacatgtttatgccactgatttacacactttaataatttttttttttgagacagggtctcgctatgtcacccagactggaatgcaatggcaggatcatggctcactgcagccttgacctcccaggatctatggattcacctacctcagcctcctgaatagctgggactataggcacatgccaccatgcccagctaatttttgcattttttgtagagatggatttttgccacattgcccaggctgggctcaaactcctggactcacgtgatctgcccgtgttggcctcctaaagtgctgggattacaagcatgagccatcatgcccagccaataattataatcctgacaaaaaccctaagaggaaactgaggtacagagaggttaagaaacttatggagctcacagagtcagtggcagaaccagaatttgaacccaggcatctggctccagagccttgataacaagacagtttaaaaactgaatactggggctgggcgcagtggctcttgcctataataccagcactttgggaggccaaggaaggtggatcatctgaggtaaggagctcgagagcagcctgatcaacatggtgaaaccccatctctactaaaaatataaaaattagcggggcgtggtggtaggcacctttaattccagctacttgggaggctgaggcaggagaatcacttgaacccaggaggcggaagttgcagtgagccgaaatcatgccattgcactccagcctgggtgacaagaacaagactctgtcttaaaaacaaaaacaaacaaacaaaacagtattaggccaggcgagatggctcacacctataatcccagcactttaggagaccaaggcaggtggatcacttgaggtcaagagtttgagaccagcctggccaacatggtgaaaccccttctccattaaaaatacaaaaattagctggatatggtggcacaaacctgtagtcccagctacttgggaggctgagacaggagaatcgcttgtacccagaaggcagaggttgcagtgagccaagatcacaccactggactccagcctgggcaacagagcaagactccgtctcaaaaaaaaaaaagagtactgacttgagatttgtatgtaaaatttgccttcctcaggccagaaaagaaatggggaaataaatactgaactccagtcaatgttaagcttctgaagggtttagatgtaaaatgtactgatatttgtaattttaaaagatatttaaaagtgagatggattgataaatatgtgataaagcaaataaaaaatgttaatagagccaggtgcagtggcccactcctgtaattccagcactttggaaggctaaggtggaaagattgcttgagaccaggagttcaaaatcagcctgggcaacatagtaagaccccatttctacaaagcctcatgtggtagctggtgtctgtagtcctagctactcagaaggctaaggtgggaggacctctgagcccaggaattcaaggctgcagtgagctatgatttcaccactgcacttcaggctgagtgacagagtgagaccccatctcaaaaacaaaacaaaacaaaaaatgttaatagtagcatctaggtggtaagaatatgttcactgtacaattattctcatttcaccctatgtttgcactttttaataataaaatgtaaaaaaaacaaaacaaacaaacaaaaaaccctgaatattattcagcatggggaacatggaggatggggagaagggtgggggaggaagtagaaggttcttgaatttggaaggggaaacgcaaattaatatggacccacccaggcaccacatctcctcctcaccccttgccttacaggcgctccccagtcttcaccctcctcaaggagtgggtgtgcaatcctccagcacccatctccttctccatcacagtgccactaagaagccttcacccaggtctctccagagagcctcaggccgctgcctttacttagttctgtgttcaatgccagaatgctgcctcctacaggaagtccacctgtattgcccacacctcctttcctgtcaccaacttgtcaccaactttctgtccttgatctatccacagggctcatgtagatctagtatggctgcctttaactctcatgtttgttaatcagacagccaagcagcctgctgcatagagctgcagaacaccaagtgggtcaccagaacaccaaatatgccagagctcccagtctgaactggagcagggtacatgtgtccacagacatatgccaagatcaagaggtctcaacagatgcagtgtaagaggtaatagagaagagttaatcaaggaagacacctgaaggtggtgggtgtttgctgactagtggcaggatcagtgaaatgactggagctgaggcagattatggccctagctacaggcccagaagtttgaaaagaaagatgttgtaaccctaaccctggagccgaacttcctctcctaacaatgctggggaggaacccaggctgggggagaagttaaagccagaggaggggcaggaatgtctgaggtggcaacacttctcttcagccagacagcactggccagtttggagtctgtccatcctgcaggccacaagctctgggtaagctgggaatgggcagggaccttggtggaaggatggtcacaccccagagtggggtgaagctaagatgaggggagggagagtatgggtttgagtttccctgggccgtcgaggaatcctctgagtctctgctccccaaagaaattaaagacaattcatttctgtgcccacggcccttatggcctccacctgcacttctgctccccaccccccagaattcctcttaaacccagaagggtcccagtttccagaccctagtcagtatatctggctctggggtgaagagaacggccccctcttcaccctcaaacaggaaccagtggttggaggggaggaagtgcctgaggggaagttatggggccccagatactcctccatgccccacttcagccctagcagcatctgcctgtgggaagcagctctccacaccagccaagggggcccccacactcccgcgctgctctgcggctcagggagcagcccacctgctgggtgtgctgatatcaccctcccttcttccccccagtgcccacacccacccaggcccaggctccttcccctccatcatccccttaccagcacctagaaccatccagggctgaaaagtcccctccaaaccacgtggtcagcccagggcagaggaaagggctgggctctggagttgggcagagctggccttaaaccccagctccacctttctgggatgggtgacctagtaaagtccaggcttgaatctcgggtctttacttgggcaacgggcaccatgataccctatgttctggggattagcagtgaggaatggaaagtgcccagctcagggttggcacataagggaggctccccagcctgggaacgattataacagagggcccctcacttcacagatgaggaacttgaggcaagtcaccagcccctgatcatttcgcctaaaagagcaaggactagagttcctgacctccaggccagtccctgatccctgacctaatgttatcgcggaatgatggtaagtaaagtgtctcttgcatctgcatagagagagtcctgggagcttaggaagtgatggggaacagtgatgtatgcagctcatgactaggtggacaggcctctggggacagctggtacaggagggaaagggacctcacgggaggcccagaaacctggtaagaggtgaggtattaaggtctgggatggagaagctctgagggtatatttttctgcctctaaaactgttggagagggaatctgagaaagctgcaaccaaccaggaggctggggtacgctggagaaggaatgggcttcctaaccttgagccctcttccctgaagatatatgtatctacgggggcctggggctgggcgggctcctgcttctggcagtggtccttctgtccgcctgcctgtgttggctgcatcgaagaggtgagcgctgcactccctccctccccctgcagcagtgccccctgtgcccccacccccacacgctttcccactgctttcccagaacactgcctggccctggagccactgggaagccaacaggggagtccacgcctgctggtggggggagcccgggagggcccgggagaagcacaaagggtgggctgtgttgagcttcttcttttcttccagtaaagaggctggagaggagctgggtgagtctggggacagggaagggggagggcaagagagatcctgagtgggtgagtggggagaagcatggctgagcgctgagaggagggttggggacgggagacaaggagagagaaagtaggagcatgagagaggcagagaaaatcgaggcaaaagagaaagagaaaatgagacagaaaccaagagaaaaagtgagacagaggataggagagacagggagaaaatgagagtgaga

SEQ ID NO: 11163 - DNA, 6000 bp, Homo sapiens
gtctcactctgttgcccaggctggagtgcagtggcacgatctcggctcactgcaagctccgcctcctgggttcacaccattctcctgcctcagcctcccaagtagctgggactacaggcacctgccaccatgcccagctaattttttgtattttaagtagagatggggtttcaccatgttagccaggatggtcttgatctcctgacctcaggtgatccacctgcctcggcctcccaaagtgccgggattacaggcgtgagccaccccgctagccaatttttgtatttttaatagagatggggtttcaccacgtttgccaggctggtcttgagctcttgacctcaagtgatccgtccaccttggcctcccaaagtgctgagattacaggtgtgagccactgcaccctgccaagcaagcacttactattttcctgacttggtctggagacacaaagtgaagtgaagtgaagtgttccttcatctagctaacagttggctcagggagcccagaaagaactgagtgtttcaatccaagatggctcatgatatgttctctgatagtgggggaataaagaaatctcatgttacaaagtctgtgttggtgaggatatggttcactgggcacattcccatgtagctggcaagagggtaaattagaacatccaagttggacaataatttggcaactcctcggaggttgacagtgcaccttctctataatccagcaattgtactttctaagtttttactctagagcagggcttttccggctttttgacaagtatcctcaataagaaatatattgtgacccacagcacacataccacacaacagacaactttcaccctactagttacactgatgatgtgttacaaacattgatatttcctagtcgattttgagttttaaaaatgctgatcttggccgggcacggtggctcatgcctgtaatcctagcactttgggaggccaaggcaggcggatcacgagggcaggagatcgagactatcctggctaacatggtgaaaccccgtctctactaaaaatataaaaaattagccgggcatggtggcgggcgcgtgtagtcccagctactcgggaggctgaggcaggagaatggtgtgaaccagggaggtggagcttgcagtgagctgagatcgtgccactgcactccagcctgggcgacagagcgagactccatctaaaaaaaaataaaaaaaaaaagctgatcttcacccactaagttgatttcctaacacattaatgggcctcaatccatagtttgaacaacattgccctagagacacgcaggtctgtgcataaggagacaagaatgtttattgcaaaactgttgcaatagcaaaactttgataagtctttatctgagacctgtcaccagcaaaatggataaagcaattgtgatgtggtcaggaagtagactatcacacagtagctatgtgtcaaaggatgcacacagggtgataacatttatacaaaatataagaccctgcaatgtgatatcatacattgttttatggatacattgaaatgcgatacaaacataaaaagctgcatgaaatgaaacccacccaaatcaggatagtggctgtctctggagggagagaatgtagttggagaagggtgcataaggaacttcaactgatcttttttctttttaagacaggatctcactctgtcacccagactggagtgcggtggcataatcatggctcactgcagcctccttgatctccctgggctcaggtgattctcccacctcagcttcccaagtagctgggactacaggtgcacacgaccatgcctggctaatttttttttttttttttttttagagacagtgttttgccatgttgcccaggctggtcttgaactcccgggcaaaagtggtcctccagactcggcctcccaaagtgctgggattagatgtgagccaccttgcctggacacaactgaaattttttaagttttaattctttttttttttttgagattgaactgcactctgtcgcccaggctgcagtgcagtggcatgatctcggctcactgcaacctccacttcctgggttcaagtgattctcttgcctcagcctcccgagtagctgggactacaggcatatgccaccatgcctggctaatttttgtatttttggtagagatggggtttcactatgttggccaggctggccgtgaactactgacctcaggtgatctgcctgccttggcttcccaaagtgctgggattataggcatgagccaccgtgcccggcctaagttttaattcttaaaaaaaaaaaaaaaaagaaccaaatttggcaaaatacaaagatttgacaaagctagaggaaagatacaggcactcactgtatttttatctattacttcttaaaatatttcataatagtacttaaaagattagtgctccagtactttagggaagaagactttattctgaccatgggaacttgaaaaggtgaagtgctagagagagccacaggagcgcaggcacaggggtatgagtggatgaggtcctggggaaatgagaagggacacactgagtccttcctgcctgggatgctgtgctgatggctcacacttccttcacatgttggtatggtactctctccatttaacagatgagcaaacaggctgagagaatgcctgctagaaagtggcagagctgggactctaatccaggcctgtaagagtcagagtccgggccaggcgtggtggctcacacctgtaatcccagcactttgggaggccgcagtaggcggatcatgaggtcaagagattgagaccatcctggccaacatggtgaaaacttgtctctactaaaaatacaaaaattagccgggtgtggtggcgggcacctgtaatcccagctactcgggaggccgaagcaggagaattgcttgaacctgggaggtggaggttgcagtgggctgagattgcgccactgcactccagcctgggcgacagagtgagactccgtctaaaaaaaaaaaaaaaaaaaaaaagggagccagagtctgcactcttggccagtctacagcatggatcctccttgaggagcaattgtgttttctgcagagggtgggaggacagcaagacttgagggtccagtgtgctgggctcaggtctgtagacttctgtgggcagtgaggaggcataggaaggcttcaagcaggaagcaggggagggaactcattggagctgtaccatctgtttcttaaactttggtctttgttgttgttgtttaaccaacagaaactttcttgaaacaaattctaactcagaacgcaggtatataaaatagcttacagtggagctgatttggaagaagcaggtgacaggggcccagagccctcacctctgagacctcctggttggtggagagacagaggctctaagtattcctaggatggggaggggtggggagaaacaaggccatgtgctttagtccagagagacccaaagtggagtgacctccattcctggctgctacacctcggctgagttatggaaccatctatatggatgtcaggggaggaaggaggtggattcctgggtgtggctgtggcacaagttctgagtgtggccactggaggcaagttttcaacttgtccctcttcatcctcacggtctggggaagggaaaaaggcaattgggcccaggctgacagcttgatcagagcctggtgcccagcagaggcctgacatcacaggccttcaataaatgcttatggaatgaaggcatatttttcccttctaacttttggggatgatacaggaggcctgactcctgggagcaagtgaaactgtcccaggggctgccccttctcagtgaggttccagtgacccatcgctgtggctcagttggtgtggggtaataggagaatacccggctaaaaatcagaggcttggttggcttctgcctccagttgccaggaacctgccgtgtgcccttgatgggtggtgttccttctctgggctttggtcatctctttttggcacagtggactggatgaggttttttaaactgcagtttgcaacccatttgggacattaaaaaaaaccagttcagtgggttacaatcagcattaaagcaacaacaagaacacaactgaaatagaatagaaaatatcagcatgcatcaaaggtcataaaagtaagtattgtttggtgatctattgttttgcttatatatagacgaaggtgtggactggtctgctgtaaaacttgttactgtttgccatggtgaaaaaacaaaacaaaactgtaaaacacggtacttagcgatcctggaggtgtccttccctcccacatcgttcctgggggtcttcgtaaaacaaacaaacaaacaaacaaacaaaacaacaacaacaacaaaaaaaccactgcctggggctcttctcctcccagggtcagcagctgtctctttgcttttagctgtctccacccctcccctagcctctcttcttcctgcttcagtcaccgagtcccctcctccctctctcccagggacaaacgcccccccacaactcaggaagtggggttggggggtccgaagggagcaaaagtgatcggatggcggtggcaatgggcaccctatcttaggcgttcaaataaaggactaggaagcaaacacccaagcaccggggaacagaacagaaagtaagcgagcccgggacgcgaatttgagggcaggacttcgggagccagagcctggcggcgctgccgcagcgggtcactcccagggggccggcacccagacttggcatcgttagcgcttgggtgctctgtcaactagcgaaggtaattttcatccctgctttttttttttttttgaaaggaaagacggaaggagccaagagttttggagccaactcctggagagggagcggctgaactgattcggaagttggatctctttgtacacaggaatgcggagagaaaaaaaacaaaacccaccccattgcttcatttcccctccaagcctgagcactttctattgtgcaatgaaaaggcttttcacgttgagaaaaatgaatcccgaatttgctctgcaaagggatgagcgcgcctctgggcgccagcctgctctcagctgggcgcggagaccgcgcggtggccgcagggcggccgcggccagggcgctccagggcgcgccctccgcgagcggctccggggtgacgcccgccggagagctggactcccccttccgcgggcgcctgcactggctcttagccagccgagggcccgggtgcagatagtccgggaaccccgagggcggagagctccccactacgcctgggcctcccagggatggcagctccgagagccccctagacccggtgccttgcaggacgcctctggagatcaggagggctggcggcgcattcggcgtccgggaggccgggccccggacgcgcgaggagcgcggggcgcgggaaggcaggcgggtgcacatgggtgccggcgggcgagctgcggggggagggggggcggggtgtggcctccccgcctcccgggcgggatttgcatgtgtgtggtggccccagacttcctgctccttctacgctgcaggtacgcgcgggccgggcggggcgggcgggcggcgggcgcgccaagacgtgggcacctcctcacccggaccccgggccccgccgagccgcctcctggctcccgtggccgccagcccgccccggccgcaccgagcgtcgggatccgaggtgggagcgtacccctccccgctccccggacgcctcagtcctccgcactgagcttggccacgcgcccctaggcgccccccacgccctgggccccggagggccgcagccatgagtgaaatgtccagctttcttcacatcggggacatcgtctccctgtacgccgagggctccgtcaatggcttcatcagcactttggggtgagtgagccgagctcgagaggggcgcgggtaaagagggggcgccgtgggcc

SEQ ID NO: 11164 - DNA, 6000 bp, Homo sapiens
acccatcttcctgccctctggttagggctggcggggatgtgggggatgggggtggggtgggggagggttgggaaggaatatgtgtgtcatctctgtggggcatggaaacagaaggctggggacacccattctggagtagcttggggagagccactgaccctaattagaaaagccacctctctccttagggccctgtctgtttctctggggacagggtaggactaccttatccctatgatgtgaggtactgccagttgttaatcagtgtctgtggcttctctaggggacaagcccttcgggtcagtgggcatggggtgggcagcgtgggttggattttctcctcaggacctttccagccttaggatcatcctctagcactgagtactgctggaagggcagggagtgccccccaccccaccccatttattgcccgaccaaagagagggcctccctccccctcccttggagggacttgctggaccacccctcagcacgcccacaccttcctccttagctagtgaaagacatactcagcaaggcttccgcctgtcaggatggctgggacaataggattcactgaggatataaggctgttcctagctttttctcttcccattcccacctgtgcctcagttttccaaagtgctggatttagaaagggtgaattatgagggagctggagggctttgccccacccccctccgcgcgcacacgcaagcacaggcagaggcacataccccctccaagtcaaagttgtgagtggggtggtgtttgcgcgtctgtggctgggactggatgtgtcagggatgggaaaacccatcatgctggtcacagaaaatgcgcggtggggacagaagcagttttgaaggaaaagaagaggagggggactgaaagaaagaagggggcgctgaaagggagggcgctgggaggaaaaaggtgcagtgtggaggaagcgcggcgtgggcagggcttgggaagggataacggaatatctgaggtggagtgggccgtggagcgtcggggccggtctgagcagcgggtgtgtaaatggaacagtcccgagatgaattttatgggagtctgcgcaggtccttaatgtgtggctgtaccctccagccccatgtaccccacacgatggacagacagccttggtgtggcagggcccaaagaggtcctatctaccgcaataacacgaccaggcggccctgggggcgcaggggctcggggtgggagcggcggagcgcgcggagtcgccgcggggtggcaggggtgggccgggggcggggccgcgggcgtcggggaggtggcagtgggcgcagggcggggcgagctcagcggagggcgggtttgaatgtgccccggcgggagagggaagctgcagcgagagcgcgcggatctcagcgcgggagcagtgcttctgcggcaggtgctgcccggggccggggactggggactggggactgccggggcggaagacgccgctgcccgcctgccacggagggcagggagggcgggcctgacggctccgcagcccggagaagggacgccgggtggggccccagtgcggagcgtgcggagccgcgcagcacgtggcgcgcacgggccagggagcctgaggaccctgcggggaccgggacccaagctgggcggggcggcctggctcccgggcctaaaacaggctgcggtcacgttgacctccgcaaggggcaggcgagtggacgggtgatccccatcgatctggtcggtatcagggaggggccgtgccgctgactgcgctggcggaggggtatggggatggggatggggatggaggctcgcgagcggaggtgcaggctcgcgagcggaggtgcggggctgtctctttaaccccggtcttttactggctaaactcgtatccctggcgtctccttcctgcgcacgtcttcatttactgatttactgtgagggtatatgagagggtgaagacaaacagtcctcggctttgcttaccaggagagagcagtcgtaggtcaaggctggctccaaccctgccctcacacctctaggggtctctctgcagccctgtggtagtccctttgcctactcctctcggtggcctccagaccctccaactttcctcctgcttgtgtaagctccccatgccaggatgtgtgtgatggggcggggctgagctgcctgacactcaagtcaggctgggaatgatcttggtctccacctcatttttccctttagttgaatcagagttccccccacctcccagtctacagggctaactgagaagcagcttttatacctctctccattccaaaaggagcttgaacatttaatatggattctagctcctccactcaccagctctgtgacttcaggcaagtgactcaacccctctgaacctcagctggccccatctattcagtgctagtactagcttatgggtggttgtgaagaaaagacaagagatctgcaggtagtggctagccccatatgaaatcctgggagtggagaattgcaggagaggtgttgggagtctggaggcagggaggtactcaatttggtggctactttcaggggcccacctcagcaggccaaggcatagttggagggacaccagatgctctgagctggtatcagatccctgtttgccgctgggcaaaggcagacaaaagcaaaacacgaaggctggccagctgaatgttaggatatgggcaggaggagagggctggagttgaattgtgcccaagactggtatgggaactcctgagaacagagagagcaggggtgtagcagggggccagggaagaaataaatacttcttctctaagcctaagccagttttacccaggagaacaggagctattctccccaccctaggcccccatctgctttgaagctacacctgctcttaactgccaggaatcttgcctgtggggtggagtacggggtatgcgggtatgaagtaagaacctagaggaagagtccctactacctaatagaaaacctgagacctaggcagggctcagtggctcatgcctgtaatcccagcactttgggaagccaaggtgggtgggtcacctgaggtcgggagttcgaaaccagcctggtcaacatggtgaaaccctgtctctactaaaaatacagaaatcagccgggggtggtggcaggagcctgtattcccagcttcttgggaggctgaggcaggagaatcacttgaacctgggaggcagaatttgcagtgagccgagatcatgccattgcactccagcctgggcaacaggagcaaaaactccgtctcaaaaaaaaaaaaaaaaagaaaaaatctgagacctgaggctttcccccacccccactccagtaatgccctcttgccttcatctctctagaaaatgtaaatatgattattcacccctcgtgcctaggacagtgcctggctagcatgcacaggtcctcagtaaatatttgtcgaaggcctgaatggaggaatccttctgcctctatctggaggtgtggggctgaggggctgaggaggacctctgagagcttggagtttccctggggagggttgagaggaactacagggaggtgggagagcccgtggaaggtctcatggtgcccagctgcttctgtttgtctgagtggggccagaagcaatgctgcacctgcgagagctcccctgctgagactccctgttctcttatctcccgagcgacaggggtggctttttatctcctgggtgtgcttctgcttctttgcttgcaaggcttctcagaatggggccccatgaagcctgagggactctctcctgataacaccctgtgccacctttttcattctggatccgcacccaggagcccgtggacaaggcccactgcctgagcctgaactaggagcacctcctagggactgcccaggcttgctctgctctgacccttctgctggccagtctgggcacctggtgagtgcccagaaagggagggaagggaagctgtcctttcaccccaaacagcaaggcctgggcccagctaggcctgagtgtggggaatgtgtcagtgcacatctgcctggcttcccatgccacccaatgggaaagctgtttaatctgctggtgccagggggtctccccctacacaaatggggagcaggagagggacgctgaggcagaaggataggtgctttgggatccacccctccaatcttcttttcaaggtcactcttagaaaggggaagcggacaggagcctgtgacagagaggaactaagggaggactaggtgaccctggggtcgggaggggggagggggaagggctgtgcccccacatccattatgaaatattttcttggaaaaccggccagcaactaggaagcccctgggcagtggctggaaagaaaggttaaggtgccaacagcagagagactggaatctgggttgccttcaggagaggacagccccactctagccatgaatccaggggctccccagggagggtggagagaccagacttgcagagaggggcctggggagcctctggtttgacctcagtcatcatcgatgttgtcgcagctgctgcagatctgcctgttccgtgtccttcctcctcctcccccgacctctttgctgtgtctcctccatttgtctccctccttcccttgtcatcactgtccctgacccctctcgtcctcttgcctgccttctttgactgtctttccctccctcccatcatctttcctcctccttccctcctgctctccaccctcctgtttcccagcttataaactgcttcggctgctggataaaaatagcggtggcagcggccaggccgggagccaggtagagtctgagcaggcaggggggccgcgcaggactggcctgctgggccagggggctgggtgggggtcaagttgagtcgtcctgaggggcagggtgcagagggggtcttactggactcctccactggcctgttctgtcagccctgccccctctccccctaagagcctgaggaggcctatggcagggccaagacagggcctcacactgttcctgcccccagcaggcccctgagggagggagctgtcagccagggaaaaccgagaacaccatcaccatgacaaccagtcaccagcctcaggacaggtaaggggtaaggggctgggctgtggatccagggaatgggttttcagggagctgggtgtggtgtcctttggaattgggggttgccattgctggctggccttccagccaggtagctatgagtcaggtctgcatcaggggtggggaccccgtgtgccttggctgggtgctggctggggtgtctgcgggaagggcagggtgcgtgggcagcagtccttccctggcctgtctgtgtttccactgttgctctccagccagttagcggctttcggctcctcccgccaccactgtggggagatacttggctgcacccctccttccaatgcacatctggcagaactgccctggggcctctgccttagatgacctggcccaccctggttcttgatctgatcttcctctcaattccctgcctctggagcctgtgaactcccagtcaagttagacttgcagttatgactgtgaatatgtattttggaagaagaggctgtagcttaattcaatttctcaaagggatctgggacccaagaaggctgaggaagtgatccctgagatccaaagctccttcaaagcgtcaggctctgtcctgccctccaactcaggccccagaaacccatcacgtctgccctacccaccccatctccctcctgtgccaaaggctatgaaactaggccacttttgcctgtgggggctttgagcatgtagcttaatctctctgggactgtttttccacctgtaaaataagctaaaagtatctacttcccaggaagtggatctagaagtaagggaatttaaggaggcatggcaataagtccaggccccaggttgcttccctgcctcctgtgctccattcccaggctgcctgcccattctgtc

SEQ ID NO: 11165 - DNA, 6000 bp, Homo sapiens; identical to SEQ ID NO: 2448

SEQ ID NO: 11166 - DNA, 6000 bp, Homo sapiens
gtttaattaagtttctaactcaaatgagaaattttgggccatttttgtcaaatttttgcttagatggctacaaatacttagcaattcattttcatagattttgtagcatccacaaagccctccttactgcagagaatgcagaggtatttatccaataaactttcatgtaattgctgctatacagcaaaactatcattaccggtaattaaagttgtgatacctgatatcatttgtctctagacattttatttcatattttcttggtattctttttaaagccacacattggtgtaagaaaagaatgttaagtagcactgacagaatacacaataattaattcttccaaaagtctatcttaagcttattagatctcggaaggcacagttaataataaatgtaatgaacaaggatgctgcatagacaagttttccactgaaaacagtattttaagtgatactatatggtgcttcaattaccaccaaaaactgcactggttatgtagaaaaaataatgctcatgagtatgcagttgcagttgggctcccatttaccatttttcaggtgaaaaatcttggaaggtttggtggctgttgccttttttttttttttaaactttcaggatgatagttactggtatcatttgataactttaatgatttcccaaccttaaattaacctagacaacacagaattttttaaattatttttattttttgatgaaaacaagaaatacggtagtgacactttatttttccttcaagcacatgggagaagacaaaagtactaaatgatcattgagtttgacagagaaattctactggtacttacactgcttaggaacataaatgtcaagtacattactagggcaagaaatatcaagtaagacaacagagtcgtatttttctttttgaggttattttcacaagacatagctataatttgtaaaatattcagactattgaaagatcacattcaaattatatttctaagaatagagccatatatgaacagagagcaaaacaagctaatacattaatgaatattcactgaattcttcatactgcacaggacacaaatttggtatttttgcacatgttgtcaattataagcaaaaagcaggcctgtaaacatcaattttgtcataggctgaaacagagaaaggaaatggattttactcaaaaacagtgacataaggagcatataccattaatcttccacacatataaaggtcactcctaggataattgagagaaaacatcgacttacattttgtttacaaaaatctactggtgaattcaaggacttaggaaaaattgaaggaaaatcttcctccaagcatgctatttaaaccccagcccctcttccctggagagcacctcaggggcctcccctcccacccctgatcctgcaggttctttcctgtgagcctttccaaacccacgccacagcaggctcattcctgctctggacttttactcagtttcccaacctagattaacctctccactgtgtgtgttcagacctcctaaaccctcaggtagcttagggcaaggccttcaaaaccaaaggggaaaagggtgatggtggatggtctttatcaccacacatgatcataactaagccttgacggcatcactgtcccacctactggaacttgtccgtgaaaatccacacagatgctgcacatccccttatcccctacaaggaggctggagatcttccacaatgcaggctgcagcctgcttcttcatttgttaggagcagggaaggaaatgcagaagctgagaaatgagggccaagaaagccaggcagtaggatggagacccaagggacatcagggcagaaacaaaatagtacaaaggagaagagtgacctacaaaatgctaccctagaagcagtccaaggcccaaaaaagaatttccatctttagaaaagtggagtgaggctaagttttggttgcctttgctcacatcacaaaggcctttgcctttgacccgtcctgaacccatcactgtgaggcccttctctctctttccagcttctcaaactaaaaactcaagaaatacacaggttttggtagaatggatggggtaaaaagataaatatgtcaaaatctgcctaatttaacactgcctataactaaacaattaacctataggtctccctttgaaactttcagaccttgctaaaagaagtggggtggaggaataagggcaataagagatctggagcccatttaatcataacctttctctctgaacacaatcagggaaagagcaaattaaacaaaaagcctgctttgccagttttgttttctgttaataagctaaaactgcttcagagtgaaagggaagaaaagggatgggagggagagggggagggagaggggaggaggagggagagaaagagacagaggcataacaagtctcacattccagaaatatctcttcctcaatgccccaactctggcaacttttgtcatgttcagagtgggtgcaggcggggaaaagaggaaatgcctaaagaagttgctcacattaaggatggtttgttggctaggagtcagaaagactaagctggaagggactgcgttccagccttgctttgggctctgtcacatattactgcccatcctggtggtagggggtgttgctgtgagctccctgggagctacgtctacagatagttcctgatgaggcagacaatggtggcctaagcaaagttcaaccagaaggtgagagtgagtaggggtgggctatagcacaggcttcatactcaccagcagctggtcatgacgtagagtaaccaaaggtacaggaaaaccaatgtgataacatagaacacttttcatctattacctcagtcacgcctagcagtcacccatcagccaccagcttgttctatcagataaccagtagggtggatggcacaagcccaggaaggcagctgggatccagttggtggtagtctggaatgtccaatttgggttgatggccgggttaagatatcagttttgtcttgcagtggtaatacccaaatagcttaccataagtacatgggtatcaggacacagccagcataaagtatgaagcccaatcagttatttgtgaaaatgtatcaagattctttgtggtacagaaccacttaaattgggagaagagcatggtcacagatagggtccaagccatgcaaagaaaggcagtatggtacactatatctatagtatcatacgcttggcatagaagccgtagaaggccatgcacttgaaacatgttaacacaatgcagaaaagcatgaaggcccagaggaagaatggcacaggcaggtaagccaacaatcttgcaaccgattactgaagatttagaaccaaaggaaaagataatccacagtatgaagagaaagcagatggaagactgcatgctgttggccaagcataggtccaagaggaggtggtaaggaaacttgtgcagaagcttctcacaggacagagattagccagactggaacctgaaggatctggcgctctccactggctgccttggtgggcctcgaattcctctacggggcccttcacccatcaggtagtattgtaggggattgggccacagttctcctttgataatctctgcaattctgtcgaattctagaaggctgtggtctgaaaaccagttgaagaaactagggatagtgttcccttcccggtttctgtggatatgagcctgggggtcttggcctcggtgccagcggattggagtggaaagagacaccacccggccagaggatctgcgttcatattccttgacaagcccctcatttcggaagtaggggttgccctgaaagatgaacttgaatttgcagcctgctctggggtgtttaagctcctccacctccaaattgatcatgtacctcagcatgtcttcatcttggccactgatcataggtgacagctgggggtggtttcgaaaggcagtaacccagaaacctgggatattctggataatgaaacttctgcgctgcatgtggagccttcgcatgcggccaaacttgcgctcaagctgaaggaaggccctgtcagcctgggcatttacgtttgacaactcttgatcgatggcctccagtgagtccatgcagttattgatcttcggggccctgggccgtgtctcctctttcacccctcctgccacctttttttccttctgcactaccttcttttcctccatcgccgcccctgcttctccctccttttccactgctgccgagatggcgcgttttttagtcgtcacttccttggccttcttccccggtatcatctgagaccccaagccccctgcgccacaggcttctagagccttctgcccagcagggccacggggctctccaagctgacagccatttttctggctgctgtcagcagcctcggcggcagaggctgcttccagacctttcgtagaaggtggagcatcctcctgcccggctttggtcgctgcaccgccgcgactcccggcaactgggacgcggagcgcggggccacagtcgacaggatcctgggatgcacccccctccgcaacggtctccaggctgcccccacctgtgttcgccatcacctgtgtcgcctcggtttcttcacggagcccttggcactggtctcggtccggatctcctgaggcatggtcgggagcagccaggccgccggtttgggcgagagggagcttgttgcccccatccaggccgctcattttggaagaagtcagactagtgggagagggagagttccttgtcctccgcagcggccgagctctgcccgaaacgtctagcaccacccctcctttactctcggcggtgctaccatggcaactggtgatgtcagggcggtagcgtcgtaacatcgcgcgagaactctctgcgcggttgactacgcttatcaatccatcgtattcctttgtcttcttgtcacaaaaagaatttcgtcagtctggaaggggagttttacttacgtaaatggatgtagaccagactcaagcatgtaagaactgtgttaatgtggatttctaagcctctgaatgaatttctaaggcacctaacctattgtttctgaaaatatttactttaaggtgagttactgtctattcaagtcagttcatagggcttctcctgagtaggaaagtggattcacgaactcacaggccttccttcttttaaggtgtggattcatggctattaccaaagaatttaaatgagcagagtttgattttaaagagaagtgttgctgtgttgttatttttaaaattaaggagcagctgaaaggcaaacttctctcatcctaacaagacataataaaggaatatttcaatttgtcttacagattttaaagtttatataatttggccaacatctacaaaacaagtggacaatatttcctcttcacttttaacaaagagtagcaaaatgtttttccttacgtagaggtgactggcacacgagcacaaatttaggcttttaagcattactgaaagaaatatctcaggggattttaatttctaaactgatgcatatgttcttttcctcaggttacaatcttaatctaaaagtggttcctgcttcataatgcctgtggacatgaagctaacaaatcttttcaaaatgtgttcatgtggtaattcactgcagcacaggagcaataatcagctatgtgcaggcatctatgctactgtctcttaaaatactttaaaagtaaggttagttattgtctattcgagtcagttagctcttacaattcatttgatagtgattatcagtacaatatattagtttgttggagtgtgagaataatggtgttaatccttagaaaaatgcaagaccaaagggaaatttaaattttgcatatttatgtttaatgtcaaatttatattcaaataaacggttatgattataactctttgtaaaagaaactccattttaagccccccagattatgatcactttcaaatacaggctcagaagt

SEQ ID NO: 11167 - DNA, 6000 bp, Homo sapiens
aacaatttttgttacctgtttttgggcagctgtcacattaaacattatttgatggtatctatgatagtggagatcgacaggtagctacatgttacaggatactcggtgtccaattcgataattcgtatcttattaagatgaaagagtataactcattaatgcaaatgacaactgcatgggtgcttaaagaaaagacaactttgcaattaagttactagagtattaaaaaagaactaatgaagagctgtctgatgacttagttcacatactatggaactgtggagtgtttttgtagaatctcaaaattatatgaaagtcatgtatcatgaatttttttatagaatgtaaataaagactatactttcagggatcatttctatagtttgttactagaatgtaaataaacttagtgatgaattactataagcatctacacaatcatattttactttgagtaatgatgaaatcctagctaaaataacttctgttctgcctggtcatatttctagatatgataggtttgtcttcagctctatcgttgcatgaatgtgatgagatgtatgcaaagtttatctttttatacttgattgtttttgttatttttcccctagcaattgaaatatgtgagcaaaagcagatgacactggcaaaatactgtaattttttacaaacagaattagggccaattttacacatcatcacatagaaactgtctattgatatagctccaaagattctgtttgtctgaccctcatggactatacttcttcatttccagtctagtattttctgctaaattgtagggtttttttttctttcacattctctcaccatcaaactgtccatcacggctaaattactccctcacttcaagcctttccttggctattcaactgtctttgtcagcctttcaagcctttgttcttatttgactgctgttttaaattgatgctgttttcatacatcaatttcacttcctaacttgtcacttcagaatctaaaatgacccttcctaagtaaaagggaagctccctttcttatgaccactgggggagtgttatttctgtggccttcacacccacctcccactcttactcagcattctttggcactagtccctgggctgtcatcaaatgtacccatgataccgtggtaccatctagctggtgcatagtttagctttatggctcagccatctcttctttgttcggtccaggaaatcccaggtcaggtgcccatttcattttttcttgttctctatggccagaagatgcagtcattagacagaaatgtaatgttgcttactgaggaagaagactcccctggatttcatttacttcctacaaggagatacagctcaatagttcaacaccagaagagaaactcctttatattcagatagtgaacatatttctaagaagcctaaataatcctacctttagatactctatttagaattcattactaagctcctgcaaagtcttagctttgcttgtttttaattattaaacaatctttgactaatttgtccttttctaaatcctccaattactactatgtgctgaaaattagcctatattccctatgcctgccacatcatgttactcacttcttcccagctttcagccctggctaaggttgtgtatatcaaagcctggaaacatttctagctttagcgcagccttactgtacttttaaaaccagtgtgaggcattgaaaagacttgcccggggattgtgaatcttcttctggctctgtctatagctaaatatttcctataccctgagaacctctgagaacctcaatttttatcagctaaatggataatcggcaattagaagcataaattgaactagacaactttggggattcttgttggtttctactgacttacatctttttagtgagacggagtctctctttgtcacccaggctggagtgcagtggcgtgatctctgcaagctccgcctcccgggttcaagcgattctcttgccttagcctcccgagtagctgggactacaggctcccaccaccacacctggctaatttcttgtattttttgtagagacggggtttcaccatgttagccaggatggtctgaatctcctgacctcatgatccacccgcctcccaaagtgcttataggcgtgagtgcattataggcgtgagccaccacgcctggccagatctttttcttatcctcagtaatggagaaggcgtggactttagatagctagatattgataagaagttaaatgggatgtatagcctgagggtccaaagcccagtaagggaactttaaagtatataacaatgaaagatgaaaaccaatcttttctggctggagaaaacaccctgaagtaggttttgtttgtttgttttttaataaggctgtgagtagtattgagacaaaatgaactttttacatgaagtgtgatgtgtatttagtctttgtttttcaaagtaggttactacatataatgacacattgtagcaaaagagtatatttccatacagcctactttttctctggacagaaggctgacttctgagctacataagtcactgcttaagaaaaaaatagtcaccattgcttgggaggctaaggcaggaggatttcttgagcccaggggcctgggcaacatagtgaaatcctatctctaaaaaaagaaacagaaaagtgtaaatgacaataatatagggtatgcacaaattacacttgatataccattgaaaaatcttccagaggccaggcgtggtggctcacacctgtaatcccagcactttgggaggctgaggtagatggatcacctgaggtcaggagttcgagaccagcctgagcaacatggagaaacctcatctctactaaaaatacaaaattagccaggcgtgatggcacatgcctgtaatcccagctacttaggaggctgaggcaggagaatcgctggaacctaagaggcggaagttgtggtgagctgagattgtgccattgcactccagcctgggcaacaagagggaaacaccatcttaaaaaaaaaatctttcagagtgaaattagtaataaaatgatatataatagcattaaggttttggaaagaaggttatggatgtgtgtttataggtattcttacctggattcttgatacctatgctttgaataacacacatcaggattttgcttagcaaacacagatctaccaggcaaaaactgtcctcatttatcagacaaataaaaggagcagaggcttagcacaggtggcttctcaagtcacacagcaaggcagtggttgagcaagcaatacaccttcccaggttaaagactgcaactcatcatctgttgcttctaagacttactttgtctcaacaaacaaaacaaaacacttgttagatcttttcttcgttggcaaaaatgggacaggaagagtttgcacttggttttttgtgaaagaatgttagaaatacgtgaaaccgttggtagtattttgactatcacctgaaaggtactaaatgttaaactagtaatttgcaatctgtgatccttgaattgtctctttgtttctttcaggtggtgcccaggcaacatgggtgactggagcgccttaggcaaactccttgacaaggttcaagcctactcaactgctggagggaaggtgtggctgtcagtacttttcattttccgaatcctgctgctggggacagcggttgagtcagcctggggagatgagcagtctgcctttcgttgtaacactcagcaacctggttgtgaaaatgtctgctatgacaagtctttcccaatctctcatgtgcgcttctgggtcctgcagatcatatttgtgtctgtacccacactcttgtacctggctcatgtgttctatgtgatgcgaaaggaagagaaactgaacaagaaagaggaagaactcaaggttgcccaaactgatggtgtcaatgtggacatgcacttgaagcagattgagataaagaagttcaagtacggtattgaagagcatggtaaggtgaaaatgcgaggggggttgctgcgaacctacatcatcagtatcctcttcaagtctatctttgaggtggccttcttgctgatccagtggtacatctatggattcagcttgagtgctgtttacacttgcaaaagagatccctgcccacatcaggtggactgtttcctctctcgccccacggagaaaaccatcttcatcatcttcatgctggtggtgtccttggtgtccctggccttgaatatcattgaactcttctatgttttcttcaagggcgttaaggatcgggttaagggaaagagcgacccttaccatgcgaccagtggtgcgctgagccctgccaaagactgtgggtctcaaaaatatgcttatttcaatggctgctcctcaccaaccgctcccctctcgcctatgtctcctcctgggtacaagctggttactggcgacagaaacaattcttcttgccgcaattacaacaagcaagcaagtgagcaaaactgggctaattacagtgcagaacaaaatcgaatggggcaggcgggaagcaccatctctaactcccatgcacagccttttgatttccccgatgataaccagaattctaaaaaactagctgctggacatgaattacagccactagccattgtggaccagcgaccttcaagcagagccagcagtcgtgccagcagcagacctcggcctgatgacctggagatctagatacaggcttgaaagcatcaagattccactcaattgtggagaagaaaaaaggtgctgtagaaagtgcaccaggtgttaattttgatccggtggaggtggtactcaacagccttattcatgaggcttagaaaacacaaagacattagaatacctaggttcactgggggtgtatggggtagatgggtggagagggaggggataagagaggtgcatgttggtatttaaagtagtggattcaaagaacttagattataaataagagttccattaggtgatacatagataagggctttttctccccgcaaacacccctaagaatggttctgtgtatgtgaatgagcgggtggtaattgtggctaaatatttttgttttaccaagaaactgaaataattctggccaggaataaatacttcctgaacatcttaggtcttttcaacaagaaaaagacagaggattgtccttaagtccctgctaaaacattccattgttaaaatttgcactttgaaggtaagctttctaggcctgaccctccaggtgtcaatggacttgtgctactatatttttttattcttggtatcagtttaaaattcagacaaggcccacagaataagattttccatgcatttgcaaatacgtatattctttttccatccacttgcacaatatcattaccatcactttttcatcattcctcagctactactcacattcatttaatggtttctgtaaacatttttaagacagttgggatgtcacttaacattttttttttgagctaaagtcagggaatcaagccatgcttaatatttaacaatcacttatatgtgtgtcgaagagtttgttttgtttgtcatgtattggtacaagcagatacagtataaactcacaaacacagatttgaaaataatgcacatatggtgttcaaatttgaacctttctcatggatttttgtggtgtgggccaatatggtgtttacattatataattcctgctgtggcaagtaaagcacactttttttttctcctaaaatgtttttccctgtgtatcctattatggatactggttttgttaattatgattctttattttctctcctttttttaggatatagcagtaatgctattactgaaatgaatttcctttttctgaaatgtaatcattgatgcttgaatgatagaattttagtactgtaaacaggctttagtcattaatgtgagagacttagaaaaaatgcttagagtggactattaaatgtgcctaaatgaatt

SEQ ID NO: 11168 - DNA, 6000 bp, Homo sapiens
ggacagacatcccatgctcatggataaggagaacaaacatcgttaaaatgaccatattacctaaagcaatctacaaattcaatgcaatctctatcaaaatactaacgttatttttcatggaaatagagaaaaaaacataaaattcaaatggaacagaaaaagagcccaagtatccaaagcaatgccgagcaaaaagaacaaagctgaaagcgtcacactacctgacttcaaattatattacaatgccatagcaaccaaaccagcatggtagtgttataaacacagactctagaccaatgaagcagaatagagatccagaaataagtctgcatatttacagccaactgatttttcaacaaaggcactaagaataaacactgtggaaaggacaccctcttcaataaatggtgctgagaaaactggaaatccatatacagaataataaaactagatccctatcactcaccatatacagaataataatactagatccctatgactcaccatatacaaaaatcaactcaaaaaggattaaatacaaatgtaaatcctgaaattataaaactactacaagaagccataagggaaatgctgtaggagattggtctaggcaataattttatgactaagactgcaaaaacaaagacaacaaagggaaaaatagacaaatgggattagagcaaactaaaacacttatgcacagcaaaggaaacaatcaagagagcaaagacacaaactgcagaatgggaggaaatatttgcaaactattcatcccacaagggactaatacccagaatatacaaggaactcaaaaaactcaacagtataatatatataataattgcactaaaaattgggcaaaggacattaacagacatttcttgtctgtataaaagaaagtctgtataaaaacagacagactcatagaccaatgaaacaaaatagagaatccagaaatattattaagtccacatatttatggccaactaatttccaacaaaggtgccaagaataaacattggggaaaagacattctcttcaataaatgatgccgagaaaactggaaatccctatgcataagaatgaaactagacacctatcactcacacagttgatcacaaaaatcaactcaaaagactttcttttatatagactttctttctcaaaagaagtcatacaaatggctaacaagtttatttaaaaaatgcccagcatcatcaatcaccagagaaatgcagatcaaaaccacaatgagacatcatcttaccacagttagaatgactattatcaaaaagacaaaaaataacaaaaggtggccaggatgcatagaagagggaaattttatacactcttgatgggaacataaatatgtatagtcattatagaaaatagtctggaagtttctcaaaaaactaaaaatataactaccatatgatccagcaatctcattactgggtatttatccagtagcaggaaaggaaatcagtaaatcaaagtgacatctgcacccctatatttattatagcactatttacaagaggttgatatggaatcaacctaagtgtctatcaacagatgaatggataaagaaaatatggtatgtatattcaataaaatactatttagccataaaaaatgaaattttgtcatttacagcaacatggatggcactagagatcattatgttaagtgaaataaggcaggcacagaaagacaaatatcacatgttcttgatatatgggagtttaaaaagttgatctcatggaagtagaaaggagaatgatagttcccagaggctggaaacacagaggcagatgaagagaagttggttatatgtatacaaacatatacttagatagaaggactaagttctagtgttcaatagcacagtaggctgactatagctatatattgtatattttaaaacagctagaagagaatatttgaaatgtttccaacacaaagaaatgataactgttcaaggtgatgaatatcctgtgtacctttatttgatcatcacacatggtatgcatatatcaaaatatcacatatatcccacaaatatgttcaaatattatgcattaataaaaatgatttaaaaaaattgaagggagccaaaaagaagtcatgttttaatgccaggataagaaaggcaataatagaaaaaacagcattctaaaactgacatagttttctgatattgaagtctggattttagggaaggtacacagttcactgcagattaggacattttgaggctttatgttggtaggagcaggatattagtgatagtacttacgttgtatcaacagttgtgtacaacctgagatggagcagatggtttgagttttgagaatattaagcttgtggcagataaatggaatttttgctaaaatattaaatattggttaataaaatattttcaaccaatccttctttaaataattaatcccatcgaaacaatcattactggtgcttcatgcacttcagagaaaattcattgtggaaccacgatgttaacttttcaatttaattcacttccatgctgctggagtcccatgagcactagattgaatgccaggggtggtgggtcaaggattcaggcaagtttgggccaatttggagggtggaaatagggaaccacatattattctattttcacaaaggcccaatgaattctgtagggaagaagtcatggcaaaataaagggctgcagttttaagcagcagagatatgggcggccatcatgagtcccagcagggacttctaatgggtttggtgtagaggacagccacttccagtaagctggaacctaagggataaggaataaaatggtaaacactggaagaacaagttctcagaatacgagtgaaaaatgtgtgtgaggaggggttcccaaaactataagaggactttgaggggttttattccaatagacgctgtgggaatatactttttggcatccattattgttactctggtcttagcctgttgtcacctggaaaatgcagattacttttatatctctggaaagaatagtggcttggtcatcagatggcacactcaaaaggcacacataagtaggtttcttgtctctgtctttaaaacaataagcacttaaagtatcatttggagaaaacagcagttaccaggaaatcacttagctgagataaaaaagaaaagaatcctcgaatagcatttaatcttcaaaataagaattttccattcttgggtcagaccgatagatgacatggcatttagacatccaattcatacctttgcttgcaactgagcctcagacacacatatatgatggaaatgttctttggcattacactgctttcttagtttgcatcgctagtcacctttgtatcatttgcatctgatttggaaaatattttagaacaacccaataacaacttcgagattaaaaaataaaattctacacactttacagttccttgctattacatgaatgtgtaaattgaattccctctcaggagaaaaaaaacaaaacaagggctggcttcccaaaaatgttttcactggctttagggaactaaaacaccagtgtctgggtgagtaatacttcctgtaaaataaagatagatcaacacataattaagtcctggctcacatataattgttgttttggaaacagttttgaggataaatatggttatgctaatgaaactgcccatgatttccactaatgatccagtttattaattaggtcaggacatttttccaccttgtgctatccattttggaatgctgaaaagggttaaaaaaaaaaacttctaagagaacactgtaggcgaagaaaaagagagaaattttaaattagttatcaactcttctaaggattccagttggaggagtagatcgaaagtgctttttcgattatttatgggtttcgaagattcttcctactccactaggcagaaaaacagagttgtaatatacagcatttagaattcataatccttagcattatttctctgaactcgacatcctaaatagccagcgtttactaattccagagctgagtgtagttttgtaggaagttctactgaatgcggagaccaaaggggagcctgcctgctctgagggttttgttgaggctgagtgtgaactccgggcgagaaagcgcatctcagctcttagatcacacccactcagggtgtgcgtgtgtgtgtgcgcgggtgcctgcgcgcgtgtgtacgtgtggggaggtgtgcgccaaaggggtggggtgaggggcggcgaggagggctgtaggtgaagcgcggggagagggaggtcgcccgctccggcctctcccccaggggccctgcggctggccagcgctccggctgcacctcctggtgcgcgccgcggcggcgccacaggcccctcgaccctttgaccaccgccctcgggccgcgcgtccggcagccgggaccggtgatggcgcgggactgacggccgtctcctcccagacccctctgtcccgcctggggctcgctggggctgcggcgccgccccgagctgcatgtggggcgggcgcgcccgagcccagagcgagcggccctcggcgcccccgaggcggtgccccgccgcgccagagtacgaggaggagcggcgggccgggccaggctccccacgcgccgcagcctcggagcacgggctccccggaggggacttggggcgtcccagcccaggaggaaggacccggaagcagaagcggagccgcgagtcgagccgagccactgcccccgctgcccgcgggcgccgggtgggggtcccggcggctggatgggcagcggcggcgcgggccgcgggcggcgatgggcgaggagcagagcacggtgagcggcggcggcgggccccaggagtcgcagaccctggccagtggcactgcgggccaccctgagcccccgaggcctcagggggacagcgcccgggcgcccccgctgcgcgccgcctccgcggagccgagcggcggtggctgcggaagcgactggggctgcgcggacaccagcgccccagagcccgcgaggagcctggggcccccgggctggagtaagagccgagcaccggcgcagcctgcgggactggcactcaccgggcctctcaatccccagaccttgccactgcagttggagctggaggaggaagaggaggaagctggggatcgaaaagagggaggggatgaacagcaggaggcgccccccggcgaagagctggagcccaggacccgcgtgggggccgccgacggactggtcctggacgtgctgggtcagcggcgcccgtccctcgccaagagacaagtcttctgctccgtgtactgcgtggagagcgacctgcccgaggcccccgcctcggagcagctctcgccgcccgcgtcgccacctggggctccgccagtgttgaaccctcccagcacccgctcttccttccccagcccccgactgtccctcccaacggattccctctcccccgacggcggcagcatcgagctggagttctacctggcgcccgagccgttctccatgcccagcctgttgggagctccaccctactctggcctgggcggtgtaggggatccctatgtgcccctcatggtgctgatgtgccgggtgtgcctggaagacaagcccatcaagcccctgccttgctgcaagaaggccgtgtgcgaggagtgcctcaaagtctacctgagcgcccaggtaacttcacccccttctcttccccatttatcattccaaatcactggcgaggaggtcctgctctcgatctgatctccctgctcgcgcgaagaggtgaccgacacacttactgaggatctctgttagtttctcacgtctcagttgttatttaagtgtattatgacctcactggtttacttaactggaatttaactttgctgtgaacttcaggctatggttggcatgtgtagaaggcacaagatacaagttgttgccctcctcttatttcttatacaggattgcaagcaca

SEQ ID NO: 11169 - DNA, 6000 bp, Homo sapiens
gtggcatcggttaaccatggcacagcagaccacggcaccgcactgggtaatgtgctcagccctctggtctaaagatgaattatctccagcctggagaagatcatcactgacatgttccagcatgatgtatatggcattcatcctcggaaacattaggagagcaggcgcgtttctttctccatcctgtaatgtatcgatagcggatgccagatgtatgtgtaaactcccagacccaggatgaatggatttttccccctgagaaatatctgtatcctgtaaatagaatgttataaacatttgtgggacagaaaaagtctctggccttttcacattgccacactctcgggtgatggatctgatctgctgaagagcaccaagctttttccctttgtgttggacacgtcttgtggaactcttgacttcctctctctctatgtcctgcgagaactcgtggttcccagctgcctatcaagcagctgaggatggccttataggtcaggggttggctgaagggctgagaaaactcccccaggtaaaaatacccctcaccctgacgtcactccgagaaatcccaccgccggttcaggggcttatttttccttcttccccttctctgtaagcagagaagaggccgtccactaaagcagagggctttctgggcctcagaagccattctcctcaggggagacgcctgttggcactgcagtcctcagcattcagaagccaaaattagagtctgtgattgatgtgcgagtcaatatgtcgtcctttcacccagagcctgagctgcagccaactcaaaccagtgtgcttcctgatcaggatgccacagtcgctggctccacagtgaggcacagaaaaaggtgaagttcaagtagaagtcagaggaaagaagtgagtaggtgatgcccaggaaaccctccaggcatcacggagccacagaggctgctccacgccggggcaggtgacaccccctgccctgacggaggcctccatctggttagacgaaattcccggaagagcaggaagcaaggcaaggccgggtgagagagaggccagcaactagagagaggcctgtgcccgggggtgtttcggttccaggcctccatcacatccacttcttgcgcggtccctcacttccgcttgcctccttgactcgcatcaccgtcctggaggctgtggtgtgcttcttctctgtctggtccatcgttggcctctcaggattccacacctacttgatcagctccaaccagacaacaaatgaggacgtaagttcctgaccacacgggacacgggcgtgttcttgggttttgggcaatggaggagaaaaaggaaagaaaaggttgagcccagcttttcccatacatcccgttccagatgtgagcccttgggaacagagacggtgccgtggaaacttctccacctgccgttctgcacgtttctcttctgggaatctccacgttctctgtttttccgaccacatccattagttactaagattggccaagcaacacccatttctggccctgaagagagtgttctttgtattcctttgaaatggtttcgtaagcttcttatcacacttcccctggtagagaccatggcgggccaacatcttggagtgaacgtttgagtctgcctttcatatttaatgtctctgtgggaggaaattgccctgacccaaaatttaacttttttattcaggattatctgcctgcacttaatacagatggagaggaagtatgaaaataggaaacaaggccgggcgcggtggctcatgcctgtaatcccagcacttcgggaggccgaggcaggcggatcacgaggtcaggagatcgaggccatcccggctaacacagtgaaatcccgtctccactaaaaatacaaaaaaatgagccgggtgtggtggcaggcgcttgtaatcccagctattcaggaggctgagaccagagaatcgcttgaacccaggaggcagaggttgcagtgagctgagatagcgccactgcactccagcctgggtgacagagcgacactccatctcaaaaaaaaaaaaaaaaaagaggaaacaaaatgttagagaatgtttccagagcagcgtggtcctctttgctctttatacttagattttgatagaagtctctatccacacttgaattaaatgtctcaggataggtccagttaccttaaacaaaagcttgagaaaataggttgtgataagacacatgagataagagaatattaatacagttatttgtacttggtagctacaaatattagaatatgcaaaacagaccattttggtcacaagaagaggctgaattatttcagtctgtaaattagcaattaggggaaccatttcacctaccattcatttaattattatttagggcactaaatgtgagtatgaaaaaaatctctgctggcttatatgagatggccttttagtaccatgtggtacaaataaaagatgactgtccctgagaatgttattctttccctattctaacctgctgttttaggacatttccaagtttggagtaaatgcccgttttctttaagaaaaatacctccatttctttggattaaagatgatttgcattctttatgagcctctcatggtccagctcacctcaactgtgcgttggtgtggaagatattgcttgttactgactttccttttctttcagattaaaggatcctggtcaaataaaagaggtaaagaaaattacaatccctacagctacggaaatatctttaccaactgctgtgttgccctgtgtgggcccatctcaccaaggtaagactcaggacgcatcgtgctcttcaacagaccttggaaaaccgaatgcctcggccgttagcacaggccgcccgccctggtggaatgggtcgccgccaccacgtgaccactttgtgccgcgtggatgtggccttcgtgaaatcgagatctggctgtttgtcgtgtcacacttcacaccttttttgatcttcaattgaatctgtgtctgattggggggaaatttcctaaagcccaaaatagagagacagatgcctgtggccctgctaatgactgaggccctgctaatgactgaaggtgcgtgcagggagctgtggttagcatcgtcaaggagacaggacacatgtgcaggaaggaagcagccagaagtctgaggaaaccagtttcgaaagttgatttgcacacaatagaaatgttcatagggagaaagccacatgggccgcagtcgttgatactgtggtcatggtaataatgacgatgacacgaaccatggcagtagctgacctttattgaatctgtgttaagctctgctctaagttctttatctgcattagcctttcacaagctcactctgtacctataggtaggcaccgttatatcccattctatggatgaggaaagtgaggcacagagtttaaataatgtgcccaagatcacacagcaagtaaatgccggctagtcaggacacacacccaggccacccaatgtcagagccagtatgtgcccactgaggcacgctgcctccaagtcagagtgtacaagttcaaaatacagattctttgtgagttacacctatggagaatattttcaactgataaatcaaaccatgatcaacaaatagatattgagcaaatctacctggtctctagaatgagtttccaagttattactgcttcctaccttttggtctccaaatgtgtaaaacagggagaaatgacaaaagccaccatgactgtgtccagggcagacccactgtgcacccagaccttaccgatatgcgcttgtggaatgcaaacttcatttgattatcagcctcagtgaatcctcattagagaggtaaaaagaattcaagaaaaaaaaaatccaagcatatattccaaggccatctgtgcactggcattgagttattactttgagtcaccgtggtgctactgcaaaactagaacttgatcattttctagctttagcctagaaacttgggagcccagcatgccactgtcctcctgaactaggggtcctcaaggcacccctgacctcctcagaggcttagaaagggcaggcgaggatcctgggttagaggagctgctcagaccacaggggtcagacatgcctgggcaggtgccagctcctcttgaagaaacctcctgactcacctagggatccttctgggagctctttaagcagaaagtctctcaggcaatggcttgatttgtcacagcgtccatggtgcttcccgctggcttgtttgtgactagcagggcaggtcaggaaacagtaagagccagggagagctggcctctttcccccacctgcagtgcgtgtgtgggtctaagagaggatgccgaggcctcagttctgtccaaatctcccttcttgttcctgagtccttcatctgcatatggcacggctttatgttgtttagagaccacaaactgtcacaaccaaaattatttccaccactgggttaaatgtgctgttttggctggattggggctgtatcttttccaaaatccatgttcctttgggtggggcatttcttgaggatggtcctaccctgagaagtgtttgaatcgtttgttaaaaggtaaactgaaggacattaaaatagtgaagagtgtatttgaacagacggcgattcatgaatctggcagctccagacttgaagcggtgtggggcagcactgaaggggctccgggggaggcttttattgggtgaaggcagagcaagacaaataagacatttgctttgttaaagtggggccgtagctttccttgggtcattctggagcttgggcagggacataggccactcataggcttccgggctggccccaggcagatgtgagggggtgatgcctacctttgcccctccctctcgtcccctcttgccttgcccttccgctgtgccacctcgacccagcccctgtgcccttaagtgggccagggccttcccgggcatcccggccaggcctacccactgagagtgtccccttcctcggacccctgggcccagacccctgtgcttgagttgcccctcctgggttcttaaatggtgctgtgccatgcaaataaggcagagagagttcttgtgttcccctctgggagtctgcttaccaagagttcagagacccacattcggttcctgcagtgttcccagaggcagggatggcagctggctgggtatggccaggtttggaggaaggagtcctcatataagcctggcgggaggaatggaaaattgggaacacagaaaggcccaaggaatggtcagtgtcacaccagacttgggctggttctgtgggtcatgtggccaccattgactgcccatgtgcggtggagccagttccgtgccaggcgctgggggtgcacgggagaggggctggctctgtgccaggcgctgggggtgcacgggagaggggctggctctgtgccaggcgctgggggtgcacgggagaggggctggctctgtgccaggcgctgtgggtgcacgggagaggggctggctctgtgccaggcactgggggtgcacgggagaggggccagcttctgggcagcagggactgtccatgggcaggcagtgcacagtgaggtgcgtgggccgcccaagagtaggtctaagctgtgaactctcccaagggtgagaaggagttcggaggaggaagcggtggggaggagcagggttttgaaagacaaagggggcagctgtgcagggacccgagggtgagggtcctggctcatcccaggaaacactgatggggttaatgtcaggagtggggggcgaagggagctgggccgagaaccaagaggtgagacaagacaaggggcgagtccaggtgaggaggagaaggacgggcagagcctcattgggccgtgtccagagcttcgcagcactgggagcccagctgctacattaaacaggctggacgcgatgggatgctggccgagaacgcttgatttttttctccctgctgtcccttcagactc

SEQ ID NO: 11170 - DNA, 6000 bp, Homo sapiens
ataaagtcagggaagcagaagatagcccccaacacatgtgactggggggatggtcaacaagaaaggaatggtgagtggtggtggctgtgctctcaattttccctgtctccgtacaggctctgtgggaggatcagggctgggaactctagccctggccctggggatcctgggaggcctggggacagccgccctgctcattggggtcatcttgtggcaaaggcggcaacgccgaggagaggagaggtgagtggagaaagccagacccctcagacctagggcttccaggcagcaagcgaagaggggtcggggggtggaacgacaacgtgccgcattccccccaatctttctcctcaggaaggccccagaaaaccaggaggaagaggaggagcgtgcagaactgaatcagtcggaggaacctgaggcaggcgagagtagtactggagggccttgaggggcccacagacagatcccatccatcagctcccttttctttttcccttgaactgttctggcctcagaccaactctctcctgtataatctctctcctgtataaccccaccttgccaagctttcttctacaaccagagccccccacaatgatgattaaacacctgacacatcttgctcttgtgtgtctgtgtgtgtgtatgagacacaacctcacccctatacccttgagggccctgaaggaaagggactcacccccatacttcaccatactataccaaacatctactcaagttggggagaagatgcttctgtcgggggtgggggcgaacttgggaagagatcccatcaatatatttcaccttttttattgaatttgtattaaaggaggtagtgagggggcggaagcacttaagagtcagaatccatattagactctggggagtgaaaaattaaattaaatcagtaagatggggagtgggggaagagtcagagggaactttgcccacctttgaagatcaaatcaagaaatcagggaaagcaaagacttaggagaggagaaagacattctctcaatccatcctccttccccagggcagagaattaaacaacgttactgagtgagcctctgagcagaaggctctcccatctatgcacagacttcactcctcctccccaggccttcctggacaatgtccagggctggccttagccaacagaaatagaggggtcaagggggtccaggagtacggaagggtcagcagggaccctcaatactgattcttctctggctggaggtgggcaggaagcagacatagctcaaatactgagcagccaaaaaaagaagaagatggcgagaaacaggaagagggaatcctgccagctggaggctgggtgaccctgtcccagatccacacctgtgggagagaggaaagctgtggaagcatatgctcctaggctgggagggggcctgaggggattcacagggctccctgatgggagctgagtgtgactcttacctgtaccccggcggaaaggctcatgggcattgaagacggtggtgaaaaagccaaagggaaaagcaccaacaccaaatgagaagtggaagcccccggtatcaccaaatggctggaatccctagggaggcagaaaaagtcagacaggaagccggcaaatctgtcaaggaagggacacaactggacaagaagactcacccctctgctctccggagctggtctctggccctgggggcggggtggagtttttaatctgaggaagtggagagagaaagttaacagggatttttctcctcccatcttccacaccgttttccaagggcagaagccttcaatcttccctaagcaacacctccagtctctcacctgggatcctggggcttctggctccctcgcccataaagcgggacaaccttctctctgctgatcccagctttacatactggacactcttgccgttctggccgtgtctccagccactggggagaaaaaaggtggtttccagtatacaagagggtcttacagctcctcagacctccccatttccctcttcatctcctgagtacgcacctgatgaagacatggccaactggatgggggagaaaaaaaaaaaaaggtcaaactagctacagaaaagagagacacagaccctagacttcgcagaatcccatctaacccctcttcccaagcaacctgctgttgcttttcagattttctgcaacctctaccatgccagccaacttagttagccttcctgcttgtctgatcttccaacacctaaagctctgtccatcctcaacacactcaaccctctcctttctcctctccccaacaaacacatacaaattttcgtgccctctcttttctgcctttcaagttaatttctaatttccttcagccacctctttctgggtctcctcttttcaaccccaaccccatcactccaaaccaaacccctttactagcacattcccccattactcactttcaagctcaataatgtccctatctttatgaccctttaacctttcaagtctgcctctccacagtgcccttataccagccccctcccagatctcatctgaatgtgatccatatttcctggttctccccgactcaactgatgcgtgcctcccttaacctttgtgtctcacttgtttccacctgcacagctaagacccctcacttctctggggtaaggtggctcgggtctcacattgtcctgccactccccgccccaccttctcttctcagcacatcacgtgcctcagctcctggttcctaagacctttctttccacagatctcgaccgttatactcccacccacacataccagcaaagtcttatgtctcctgtcgggcttcacctatgggaacgtgccctccgattatctgtatgactgtatgattattcgctcctagcctctccagtatataagcgagacccaccacctcccgcccccctcctcgattctcaccagtacaggtggccacacacactgaccacagcttcccgagcagtctccaaacatatattacattcgaaggtcgcgcccgccccgccccgctcgcgatttggcccttcggggcccccgtcctcctcctccgctgctgccatggccggttttgtttcgccccacgtacccttcagtccccccaaatacacatacacacgccccaacaaaccagaaaccacctcctgcccacgatcgttgggcaggcttcaaggtttcctaatcactattggtctgaatgcctgccagtcacaaagaattcaaaagaaaggattggcccaaagggtaggggcgggaaaaggttagtgcagtcctgccttcgcacaatggctattggctgatacggtctaagtcaatgtgcaatgccaagggattggtaataactcgctacacgctgtcgcctggccaaggagggctttattcgtctgagtagttgtcagtcataaccaaagccataagcaatttgctcgggactacctatagacctcgcccactataagcccctttctttccttcgcttcctcttttagagaatgtccggattgctattggactttggagcgtatggctccaaatcaactcattggctaaaacttgacggaaaatggtggttaggtaaaacgcgcctgcgcagcacgcggcgggacgggggtgggccaatcctgtgagggtttaaccttctctttttccacctcttcacccctatcttgtcgccatggtgactgctctacaattggcgaggcttgcacttcaaagtcctaggctcgcttcatccgggtccttcagctgtggactttctgctgattgggccttttccttttcccctgattggccgacatcgggaaagacggcgaagagctaggaaaagagggaaaacactagggtcgcagggttcaaaatggctccaacctcctttggtgacgtagagagcagaacttgggtctgcccctcccttttagttaagggagcagaactgggattagcccgacgtttggatagtgggaacatcgatctgcggcgctggtgttaacccaactcattcggctggacgactcagccctccccatattaggtgatttacagagcaaaactgaactaaaggcccacccctttcttaatgttgtacacagagtagaacaggattgacttcaactccgttttaaaccttcagagcaggaaagctctgggctcaacccctttgtgagtggtgcaaaagggacaaagcccgccccttttaaggagacccgcggaggctagacccgccctttcctctttataatttgcccatcagaaatagggtcttcttcccaggttggaccccggggagtttgggcttttcctacaatcactgaccctcactgtgactaaaggagcagaattaggtaacagtcctcccactaccaatcctcttcccgagggcatgtaaactaatgcagggtaaaggtgtggctagaggggggaccttgataaaagatcccatgtgactcaagagtaaggaaagatgagaagttagcagttgcgtaaagaaggactggggcagatgaggattcaggaagcttgaggtttaggaaggaagatattgagagggaaaggtggaaatgaaggagagtgaagtgatggaatgatcctagtaaagggataatgggagtggaggaagagaagagggggtggaaaactagatacatggctaccaaattaaggaggcacgcgcattccagaggaatcggcattcttcctcactttttatttttctagaaagcacccctgaagccaaatttccattggaagaaaagatgtacccatattgtatgttgtgagaaggggttgtctcagcttgggcaagtaaggagactgatacgaaggaagtaggaaagaaaaggtacagaggtaaaagagcatggaaaaggaaagggtcagggataaggccaaagagatctcttctctttaaaggccagagaaggcaggtggaggggggagctggactgctgggagatagtgagggacaaagggcaaaggaaaccagaccagaggactggagagtgagatggagtgagatggagtcctggagagaaaaagaagagaggtgaacttaatgcttgtcatatggtaggtagatgcttgataaatgtttagaattgaatgggtacgggaaaaggggtccttaagaatagttggggggaataagcagcagataaccggagttgagaaaaaaagagaccaagtaaaagtggcagttaaaagagagctgatggagaataaaggaaggaatgtgcggaaggaggaatacagcaccaggggatccagagctgaaagggagttagagaaaaaaaagatgcagctggagccagagatgggggcaaagaccgagggagagccctggggcggggctcgcaagaggacactggtagatgtggggaggagatgccagagtttctgggagacgattggcaaaacaggctgcccatcaccgccctccacttcctggccggccccggaaaccagcaggcgttggggaggggtggcgggggaatagcggcggcagcagccccagccctcagagagacagcagaaagggagggagggagggtgctggggggacagccccccaccattcctaccgctatgggcccaacctcccactcccacctcccctccatcggccggggctaggacacccccaaatcccgtcgcccccttggcaccgacaccccgacagagacagagacacagccatccgccaccaccgctgccgcagcctggctggggagggggccagccccccaggccccctacccctctgaggtgtgggcgggaaagggatgggaggaggagggaagagggtgctgaaagcgactaggatgaggggaaggggagagattgggtctgggagggccgactgggggagagggttgctggggaaaggagaggggccgactgggaagagggttgctggggataggagaggggacctgagagggaggaaggatggaagagacctgggagggaggagaaatggaaaccc

SEQ ID NO: 11171 - DNA, 6000 bp, Homo sapiens
caaggggcatggttgggatgtcctgagccctgggaacctctgctggatggaggggcctgtccccaggctcacaccgtgggcactggggagacccccctgcacctggctgcccgattctcccggccaaccgctgcccgccgcctccttgaggctggagccaaccccaaccagccagaccgggcagggcgcacaccccttcatgctgctgtggctgctgatgctcgggaggtctgccaggttagcacacactgaggtccctacagggaatggggcgagcttacaagtaaagctggacagaagcatcccctagagtttgacaaggaggaaattggtgtgattgggaacctgacagggaaactgcggaggatggctgaatatggattgcgagtggggttaatagtgtaaggaactcgagttggcagtccaaggtaccccaggggtcactggccctctgtctccccagcttctgctccgtagcagacaaactgcagtggacgctcgcacagaggacgggaccacacccttgatgctggctgccaggctggcggtggaagacctggttgaagaactgattgcagcccaagcagacgtgggggccagagataaatggggtatgtagaggaaggggtgatgtatgctatagagaagttgagcagatggggtgggagatagcgtgcaaaatataggtgcagcagaggggcattccctctcatcctgctgttacggcggtcaatctgagatgcggtggaagtacgggccgcgtgagtttccccccccaactcccaccctcaacaccacactggccctccgctccagcttactggggaactggcatggaacacagtgtctgtggaaaggggggggaatctcgtggggggagactgtctcccggtctcaccgaccccagaacaatgccccattgtccctcccgcgcactggtgacgtcaccagggcaacacttcctgcaggccggtggtctcctgggcaacgcttcccgcctttgagggaccagccggcccgaatagcccttcccccaaggccagaacccgtgggaaaccggaacccaggcgtctggcccccaactggggtaacaacctcccacgtcgtcccctagggaaaactgcgctgcactgggctgctgccgtgaacaacgcccgagccgcccgctcgcttctccaggccggagccgataaagatgcccaggacaacagggttagatgggacagagggcttcccacaaaacagtcaggcgcacgagagatggaaagtgcggtaacccgcaaagcctgaagggataggggccagtggtcgcgcaagtgaaggcagaaaggcccagtcctgtgggcgtggccttccctgatatcggccctggctcttctgtacaggagcagacgccgctattcctggcggcgcgggaaggagcggtggaagtagcccagctactgctggggctgggggcagcccgagagctgcgggaccaggctgggctagcgccggcggacgtcgctcaccaacgtaaccactgggatctgctgacgctgctggaaggggctgggccaccagaggcccgtcacaaagccacgccgggccgcgaggctgggcccttcccgcgcgcacggacggtgtcagtaagcgtgcccccgcatgggggcggggctctgccgcgctgccggacgctgtcagccggagcaggccctcgtgggggcggagcttgtctgcaggctcggacttggtccgtagacttggctgcgcgggggggcggggcctattctcattgccggagcctctcgggagtaggagcaggaggaggcccgacccctcgcggccgtaggttttctgcaggcatgcgcgggcctcggcccaaccctgcgataatgcgaggaagatacggagtggctgccgggcgcggaggcagggtctcaacggatgactggccctgtgattgggtggccctgggagcttgcggttctgcctccaacattccgatcccgcctccttgccttactccgtccccggagcggggatcacctcaacttgactgtggtcccccagccctccaagaaatgcccataaaccaaggaggagagggtaaaaaatagaagaatacatggtagggaggaattccaaaaatgattacccattaaaaggcaggctggaaggccttcctggttttaagatggatcccccaaaatgaagggttgtgagtttagtttctctcctaaaatgaatgtatgcccaccagagcagacatcttccacgtggagaagctgcagctctggaaagagggtttaagatgctaggatgaggcaggcccagtcctcctccagaaaataagacaggccacaggagggcagagtggagtggaaatacccctaagttggaaccaagaattgcaggcatatgggatgtaagatgttctttcctatatatggtttccaaagggtgcccctatgatccattgtccccactgcccacaaatggctgacaaatatttattgggcacctactatgtgccaggcactgtgtaggtgctgaaaagtggccaagggccacccccgctgatgactccttgcattccctcccctcacaacaaagaactccactgtggggatgaagcgcttcttctagccactgctatcgctatttaagaaccctaaatctgtcacccataataaagctgatttgaagtgttacctttttttggaggaattggggagaagaatgggaaaaaagatgggagtgactgcataatgtcagcattttgtgcttttggctcagcatttggattggatggaggatgtaagtatagtttaaaagcaagaataagtatatttaggggccctatgataatttagggtattatctgaaagcaagaatctagtagccaagggagaaaccgcacacactaggtcaggggtccccaacccttgggccacagactggtactggtccatggcctcttaggaactgggccacacagcaggaggtgagcaagcattactgcccaagctccacctcctgtcagatcagcataagcattaaattctcataggaactcgaaccctattgtgaactgtgcatgcaagggatctaagtttctcgcttcttacgggaatctaatgcctaatgatctggggtggaacagtttcatcctgaaaccagccctccgtcgccaccgaccatggaataattgtcttccacgaaactcttccctggtgccaaaaaggtaggagaccactgcactagatgatgcacacactttgtccctcatcctagggcttttacttatggccacttaggagattcctaaggccacaagtcaagtagatggagagagtatcttgaaactttgtccaccttgcagcaatatgttgctaggtttgaaacatggagtcatgaggcattttgaaagccaataatatctacagtttattaagtattcactatgcatcaagtgcttcattacattattaatacatcaaccctatgaagtaggtgctattaaaaccctatttcactcagaaattgaggcacagagatctgcccaagattgcaaggaataagcggcaggaccagatctcttcatcacatttcacattccaaatcactcagctataaactccctaacatgacaggttgccatttagaggtaccaaatggttgtctgccctgctccttccttgatgccaaccagcctgattagcattgatcaaagaccaagccagagaggtagtcctctcccttttcaatttcatttcatttctttctttttctgaaacagggtattgctctgttgcccagcctggagtgcagtggcacaaatggctcactgcagccacaacctcctgggctcaagcaatcttcctacctcagcctctcattgttccatatctatatctcttatgcccaaaataaaatttcccctgccccttgtctgcactaaactataagtttccaaaatgaacccttcccgtactctatttggtacacatcttgtctcctgaatagagtgtattttttattttattttattttggagacggagtctcgctctgtcacctaggctggagcgcagtggcacaatctcagttcaccgcaacctccgcctcccgggttcaagcaattctcctgcctcaacctcctgagtagctgggattacaggcgcatgtggccacgcccagctaattttttgtattttagtaaagatggggtttcaccatgttccccaggctggtctccaactcctgagctcaggcaatccacccgcctcagcctcccgaagtgctaggattacaggtgtgagccaccgcagccggccatctcctgaatagattttaaatacctagaggtcagggatgattattcaatacatatatattgaatacttactatgtgttggacccggtgctagggttttatgtatatatttgagagctccacatccctggatctgaatcctccacttcccactggaaccatgcccctcccagtcccggtaagtaagagggaagatcgggagggccaaatcctacaccagggtctatcttagggagggaagggacctggctggggggagggggattctgaggagtgaaaccacttcctgtgtagctagttcctgtgttgacagaaagagcagaagaggaggtggggtggagggagcagagccagggattaggggactactgaggctctggagatgagaccgccaggagtccttccccaccatgagccccctccactcctgcagctggaggagtttttcccagtctcagtgctgccctggggcgagagagactgaacaagctgtttgggtgggaagagaatggaggaagttgacagggatgggcggggcccgtgggggggctgaccaggaacccagcttcctgctcagtacccaggcatccagcccccagctcacccccaccccttccagcccccactcccctcaggaacccaaggttccagccctcctcccaaatcccagccacccctcccccaccagtttctcccctctaggggatggaggctgagagaccccaggaagaagaggatggtgagcaggtgagctgggcacggggttggggaggctgacactgggaaagaagggaggtgagaggacctggggcagaaatgtagggacacaggggccttgaaaggcttgggcaaactgaggcaggaacagagacacacagagaggaaacgggccactggcctagccccctgtccactcctcccgcttcaaccaccactgcttgactagaatggacatattttggcatcagggcccccctcaggatgaggaaggctggccccctccaaactccaccactcggccttggcgatctgctcctccatcccctcctcctccagggacccgccacacaggtacccctacccacccagggagagccccgaccctagtgcccacatcctgaccccattaccaaggcccactccattgtgggccctctccccacctcctccagactccccttgggattccccattgcaccccctctcctctgatccaaagtccctaatcacgtcaccctgtccacactcccccacggctcctgtctgccaacctctctgggtctctgagccctccacacccctctccccagccctgggaccccgctcggcctccctgctctccctgcagactgaactccttctggacctggtggctgaagcccagtcccgccgcctggaggagcagagggccaccttctacaccccccaaaacccctcaagcctagcccctgccccactccgtcctctcgaggacagagaacagctttacagcactatcctcagtcaccaggtaagacatccccccaggaggcaaacccaggcctcctggtctcttggcccctgttctctttggggctctactcctgtttctccctaggcaccccatcgccttcacaggtttcctatatgcctccccataccaacccttgatcctctcaagaacctcctcctctcagaccctca

SEQ ID NO: 11172 - DNA, 6000 bp, Homo sapiens
agaatggccaggaaagttggaaaatctagtcagtatgcatatgaaaagttgattagctaccctctaaatgtaaatcttaaattggggaaggtagggagctatagaatcttagaagatggaggtaaatctttaactggtatctcaagatgttttattaagtgaaaataagcaagtaatatatacacacttctatatataatagtgtttttttagttttttttaactgtgatccccacagtaagaatatattttacatcacagctaagtacattatacttataaatatgatataataaaactaaagttttataaaactatattcattctcactgagagcaaagcattctgattctctactatgatcaattattatttttaatgctaagttgacatgatcatctactaatggtagatttcacccacaattgtgaaaacatccatttagcatgacctctttgtgctcaaaagaggagaaatctctggaagtatattgaagaaatgttaccattaggttccttgtgatgcgtggcttggggattgaggttgagggaagtaatgagatttttgccccttttttttaatttttaatacttgaatttttttttactgtagatatgaagtactgtaaaataataattgataaaagtaacaagcggaaaaaactgtcttgtcactgtggcattctgttccctgatatggctcttccttgtcttacctcaagtcctcagttgttgcccagacaggatctcttcctgtctgccacctctcattccagttagttccacttttttccccactgagatttcagcttcacggaaagagtttttatggaactaagaaaagaagttcagaaaactggcacttcatttataaagtgaactcacagaattgtgtctttccttttgatcttcaagttagatctagcacagaagtcacttctgtgaattaaattcttttaacctaaggaactgaacttaaccttgtctgtagcatattctttgaaaagaatttattcttttatgaaaaaatactgtataaaaaacattttgagtagagattaatcagtatctttttttttcttaataggttttcaaatggaacattttgatgcatcacttagtacctatttcaaggcattgctaggccctcgaggtaaggtggtttttggttttgcttaccttctgcagcatcactccctgcctatagtcccttgtaaatattgcatgaggagatagtagaaaatgttagcattttctatgataagtctaaaactttatcctggataacaaggaatttggagaagtctctgacagagacacctgctgtgggtggtcctccgttgactttaactggagtttaaaaatatgctgtaaagcttgtagcctgagaatactatagatttcaccattatcagtggcatttttttctcaattcttggcagtctttaagaaaaactagtttccaaaatgcagtgttgcaataggagtttaaaacctttccccttttacaattttaagggctttttaaggtcttctcattttgtatcatgttaactcactggtaaatatgcacctgaaccttacttgctgtatcttttagaaagtaaatcagcttcatattgccttcttttgatgtcatctgtaaaagtcttttaaagtcttttgtataaagaacttcttaggctcacagaaaaactagaaatggcttttaaacagacaaaaagaatctcagtttctcatgatttttaaaacacaaaagaaataacaaaaggacttagtctattaacatggcagagatgaaataataggtttcatgtcacctatgataatagtgataatagtgaaggcgtggagaaagagtacaacctctctgaaaggctgttttgccttctgttggaattaaaatgcacatgcccttttgcctagccattctactcctaatactttatcctgtggctagccttgattagttatgcaatgatacatatcaggatgctcattacagcattgtttttcaaggaatcatctggatgcctgtcagtaggggagaggttctgtaaattagtgtatggcccattgaaaagaacaaaaaagaataagttagatccatctgtatgtgcttgggttgggatagtgccttactttagctgtaagggacaaaaaatccaactctaaatggctaaaataataataataattattagcttgcattaccaggtggagcaattccgtagttatttcagggactgtatgatgtaaccaaggatccttgttcttgtcattttctactttgccacttccaggtatcagcagctctgtcctcagaatgggtcccccacttcacacagttgtaggatggctacagcagctccaagcagcacattcagaggaagaagaaaaaatgtttcatttgtgtggttttaagcataaagaagttgtttcccagagctctttgccagctgtcatccctcaaaactcactggccacaattgcttcacatgcccctgcctgaaccagccaccagagggggttaggaccaccacagattgactagatcctaaggattctctacctggggctggagttcgggtcaggtgcccgggaagcactgtgcggtgtgggaggatgaatatgtgccaatttggaaagatgagtatttgtgggaaaatgaataaagcaaagtgtaaatcagaggtttaagttaaaatagggagatttgtgtgtatttattgtttgtgatatatatgttcatacaaaataacagtctgatgttagttgctaagtgggaactggttttcttaaaattgacagccaaggcccaaagctgagaacaaaaggtgttaagcatccccttaaagtccctggggccagccatttccctgaatgacttctaagcacaaccagttctgccggactgacagtaacaccctccgtgaccatagcataactagtggggagggtgtggagggcatgtccctctgaagccaaagcaagccagccatgagagaaatgctgggaaagtttagtgtgtacagtgcaagaaaggaagactgactgacagttccccacgtggacatatgctttattgagcctgttcttgttctgtgaaatcaaggtgaaaacgactggagagagtagcaagatggtccagtctgggaggggtcaaagaaagggcagagccgggtgtggtggttcactcctgtaatcccagtactttgggaggccaaggcaggtgggtcccctgaggtcaggagttccagaccagcctgaccaatatggtgaaacctggtctctactaaaattacaaaaattagcggggtgtggtggtgtgtgtctatagtcccagctactctggaggctaaggcaggagaatcgcttggaccctagaggcagaggttgcagtgagctgagatcacgccactgcacttcagcctgggcgacagagtgagactccgtctcagaataaataaataaatgaataataaaaaaattaaagaaatggcaaaggctgtcctcccaactgctgcttctctgaagacgcagtaggtgaatgctgcatgtgcctcatgttctggagttgtgagccttggcgggtagttaagattgaggagccacaggttttcggggaacatcatagcagggttcaaaggggagcatgcttttcagaggtagcttcctggggtcagccagagtatgaagctgaatctttcaggggacacataacacttaggggctctggctgccaaggagtttcccgccatccaagaagaggttgtcagtttgctgctggcggctgacctgtttccctctccctcctccctgcctaagaaaaggaataggggcaggagaggcccttcctataccagtatctcctctggatccgcctaggtcttcgctctcatgctactactcctcagtttgttaaatactgccctttaaataggcatttatctgatcattgctgcttcaccttcatgttttgttttgtttttattttcatttttgagacggagtctcactctgttgcccacgctggggtgcagtggtacgatctcagctcactgcagcctcttcctcccaatttcaagcgattctcccacctcagcctcccaagtagctgggattacaggtgtgcagcaccatgcctggccaatttttatatttttagtagagatagtgttttgccatgttggccaggctggtcttgaactcctgacttcaggtgatccacccgccttggcatcccaaagtgctgggattacaggcatgagccaccacacccagcccttgttttgtttttaaatcattgtcctctctgctgttgaccattacactcatagcaaaggctgcctttctaattagtgccagtttcactaacgtggctaagcagcacgttttctgagtctgcatgtgctggccacacttgccgactgacacacagctgagatggaggacttcagagttcaatgactgccatttcttgggttttatcaccctatgtgtaatctggtatacctggttaataaatccaattaatgggaagtgtagccttctccttgttttcttcttaagttctttggaaagaatatttgtattattattttactgagcaaaaatcatgaataatacattgttattcagagcatgtaacaaggagcttcaccttgtttgatatgtattgaaaatccatgcctcctctcctgattgctttattggaattaagaacatgaataccaggtgacttttatatcatcatggttagagaaattttttcaacgtttgaaaagttgtgaatgtttttatatatcattaattttttttaatttttcagatactagagtaaaaggatggtttcttctggacaattatatacccacatttatctgctctgtcatatatttactaattgtatggctgggaccaaaatacatgaggaataaacagccattctcttgccgggggattttagtggtgtataaccttggactcacactgctgtctctgtatatgttctgtgaggtaagtcaaaggttaacacagtcttcctttcacataaatgcactcatattgctgtcctaaattgtattcctaaatgaggaaaggtggccgcttggggtgtagagacaactgggcaagcaagtatcttaatgcgttatgagtgtgttttaaaatcgatttttcaaaatgtcagagttgtttgtacaagtatgccttctagaatatctaaaatagaagcctttgttattgattcttctattatgtttcgtatgatattcaaaattaaagtattttcagaaatactctcatgcaagcaaaatacagagtggaaaatgaacaaaatgtgaaaaacacatgtgaaagcattttattattaagcatctaataagtgcctgcttcttgtttgaaggtaggggaggaaggaagtgggtggcacttgtgtttggtatgttttgtggcacatcaccctctctgattggataacttgtcaaatctcagttgttttttaaaagctaagaggagtgtgactggtgagatctgcatttaggttttgaattgtctgtctgagttcaggcccagttattttatatcactgcaatgttgaaaatcacatttgatgatctcaaaggcaaatgttatagcttaaaaatgaaagaaaaatcagaatcaacccttctcttctccctattttgaaggggtaacactatagcctttaaagctaaaagggggaggaaagcttccctctggtggtaagcagtttgtgtacatttttccaggaaagcctacccacttttcattcttacagcaccaacctatttctaactcttctggagaattaagccctggataaaacctatacaggcactcctgtataggttttcagggtttcattttggttttagttcttcaaggagtagtaaagaagaaggtagaggtgggaggaagaggagagatagaaacatgaatcttaaaattagtgttcaggggtcaaaatgaattctcc

SEQ ID NO: 11173 - DNA, 6000 bp, Homo sapiens
ttagcttgaacttggaggttattcctaaggaacaagtcaggaaaaggtttcatttcctgaaggaccaagagacgtaatgcaaagagctctagcagacccagggtttgaagcagaatacaaataaaaatcatgcatctcgggtgccagccttaagggaacctgggctgggctccctgactcctgcacatccaggaggtttgtgctgtttgtatgctaaccttacatatgtttgtaaagaaagaagcaaaaacagtatatcttgatgtaattttgtaaatgaatcactgttaagaattgcaggcctggcatggtggctcatgcttgtaatcccagcactttgggaggccaaggggggaagattgcttgagctcaggagttctagaccagcctgagcaacatggtgaaactccgtctcaagcaaaaatacaaaaaattagccaggtgtggtggcgcacccggctattcaggaaactgaggtgggaggatcacttgagcctggggaggcggaggttgcagtgagccgagattgcgccagtttgactgaaataagccagtttatttattcatttttttctcaaaaaagaaaaaaaattgcagcagttcaggatagaatagttctgtgcaagtcatagtgtaaagcagtgttctccaacttttttttttttttttttttttttttttttttatgagatggagtctcactctgtcgcccaggctggagtgcaatggcacgatcttggctcactgcaacccccacctcctgggttcaagcaattctcctgcctcagcctcccaagtagctgggattacaggcacccgccaccacacctggctaatttttgtatttttggcagagatggggtttcgccatgttggccaggctggtctcgaactcctgacctcaggtgatctgccgcctcagcctcccaaagtgctggaattacaggcgtgagccactgcatccggctgttctccaactttaatactttacacatgtacatatcttctgggaatcttgttaaaatgtaggttctgattcaggagatctgagggggaggcctgaggttctgcatttctaggtgatataaatgataatggtttgagaaccacactctggaaagcaagagtaaagcactggttttccacctaagctgcagattagaaacacctgggaagcttttaaaactgctgatgctcagacattactccagaccaattaaatcagtacccaggcactagtatcaatatttttcaacacacaccaccaccactgatgtcactaggtagttccaatgtgcagccagggttaagaacaactgctctaaagtgtaatgctcccctctggcgccctggcacacttttcaaagaaacatccacagtcaaagtggagagcctcctaatgacaatatctccagaattttacccttaatcttaatcacaatattaagactctgaatatacagttttagctaatatttgatttattccaatccttctctttgtcaaaacagattcaaatactactaaatgagctttaatatatgctgttaaaactgtcttacagatgccagcccttgtttcccacccatactcctctagatgaatctaccctgacccacagctgaagagttcagggagttatttgtagcagctgccctcctacgcttttattttatttattttatttatttattttttttttttttgaggcagagtctcactctgttgcccaggctggagggcagtgatgcaatctcggctcactgcaacctctgcctcctgggttcaatagattcttctgcctcaacctcccaagtagctgtgattacaggtgcttgccactacgccgggctcctcctgtgctttttaatgcagctaatttttggcaagggtggacaactgactgaaataagccagtttgttcatttattcatttttttttaattaagtgcagggaataaactggtgagcactatttctgagttaatctagtgagaaagacaactgctatataatgcagtatatgctttgttatgggcaagtccagggtgcacagagcaggaacaccttttgtagtctgggagtggggagaaaggggtagttgaatattttaaggatagcttaagatgggagtgacagcttagctgagagacctcaaacaagtaggagttggtcagatgccagaagggaataagaatgttctaggcagaagaaatagcatggatgaagatccacatgcaaaagaaaacatgaccagttaggagaactggaagttcagggagctctagtgtagactgcatggatggagtcagagcagagagtaggtaacagacaggttgggaaggcatggtactcagtcaagttatctcttccaagagctatataactggaatactgggcaatggagatgattggctgtgggtctatagatctggcaatgtcctgtagggttgaagcctgaaacgaagtcctagcaaaccagctccacgtgctagggattcctccttttaagttcaagtctcccttggccctcacacacttgatttcccacccctgaatgcctataagatttactgtcatattcttacagtgaatggattccctttaacataagctagtacaagggggtttgtacttcttgctatcaagtagtggaggcaaacctctgattattaaggggccactggatgttagttatagctagaaggcagggtcctgtttggagtgttgatctgtttatttggggaaaggtactgacacaaggctgaagcattgtttaaaaatctgctgtttaaaaaacttagagggagcttatactgctagaagattcacaagcgcagaagcactctgtcttgctgctttcaagaaaataaatggttaagaaggtcgctctaacaaccaatcgacaatctaattgcaagcaatgtgtctaagaggaaataacctgagtgatggctgaccttgcacacagaagaacgctctgagggtgcctttcaattgtgattttacccccaggagacatttaacaatatcgggagatatttttggttgtcacaactgagaggtggggtgcttctggtatctagtgtgtagaggctacgaatactgccgaatatccaacaatgcacaggacaagcaagaatgagtcagcctgaaatcttgatagcgccaagattgagaaaccctgctctatgacaacaataaacagaagcttactgtcaggaactgaaaaaaaaaaagctgtctctctgaaatggtgaaaatgactttggaactcccttgatctacctctacagttgccatgcaaaataaaataaaccaatggttttctagtcttaaaacaagagcgtgaaatgtccctttatcaggactgaggaatatctgaggactagagttaaacatccaggtgacaaattgttaaacaatggtctgcacagaggagtgtgtttatcctagggtggaaagaagataacacaccaagctctgagaacagagcttctatttacatttttttttttttttttttttttgagacgagtctggctctgttccccaagctggagtgcagtggtgtgatctcggctcactgcaacctccgcctcccggatacaagcgatcctcctgcctcagccctgctagtagctgggattacaggcacgtgccaccatgcccggctaatttttgtatttttaggagagacggggtttacaccatgttggccaagctggtctcaaactccggacctcaggtgatccacccgccttggcctcccaaagtgctggcattacaggcgtgagccaccgcgtccggcccctatttacattcttaaccttaaaaaaaaattaaagttgccttgcgctttcatttggtctgggtgccagatagtcaagtgttaaatatagagagaggcctcctgagagaagagcagacacttctctgaagggcttatggtgggagctcacttccctgacagcattctcatgcttctgggctggatcagtcaaaactatcagctttttgtttacatccaagcaacactactccaactagcgtagtcattggaacaaatgttcatagtcctgagggtacagaaggacgacactgaaaagatcccaaggggaaataaaatctttctatttgagcaaaaaggtaaaagcactatgtagtcatcttttttggcacatcaaaaaagtcatcgtggcacatcaagacagacctcacgaaagcaattaatattcctatattattaggataactttgcataattaaaattacataagtgtacaacagctgaaaacacagcattaaatacaacttttaaagtctaatttttaccatgtgataaccgtatcaaattttgcgaatattttgtgagacttggcagtagatggcgctcacctttactaaaagtctgagcagcgccttaacactaacaggaacttaagaatccagctctgatgtcaggcaatcccgtgtccaggtcaggtcacttttttaagtctcagtttcctcactggtaatgtgggggtgggggcctccccaatgacctcgcaactcagaccgcttttgattctctgactacagtggtggagttgagacaggtcggctgctgcaaccgccgtctgaaatagcaatccggaaaagtcaggttgggaaagtgacagagtagacgccctgcggctctgatccgggcggcgcctcagctgcccacactatgtgggcggcaacgcacaaactccttaaccacgtggtgcctccattcccctagggagtcccatcacaggataacttctagcaaaatcaatcttcaagaaaaaaagaaggggtcctgccgaagatataaggaagctccctggggatcccgcagcacagcacaaacttagttcttgagagccgcacaaaaccaacttccgccccagtggagttgcgtccggaaggcgcggccccggaggtcacgtgggcccgcggaattacagcctggcggggcgctcaggtggaagcagtaggccacattatgtcgactgttccatgcaagtcagggtgggggccgtccctatcgcaggcatgagacaagtccagctgcgtcgtgtctggtaatctgagggcaagaagaacgatttgcagaagctcccagttttcttggctgtggcacagtcgctttgagggccaggttccttcggcttcctcccgactcccctgcttccccccgtaggattcccgttggtatcgtccgagccccacctccctcctcttcgcccccgcacgccgaaaacaggggcctctcacgtgacccctgcgcgctcccgcgggggagcgtagtctcggaggcggcgccgcaggggattgaggggttgactgagcgttgcgagccttagctttctcccgaacgccagcgctgaggacacgatgtcgcggctctcccgctcactgctttgggccgccacctgcctgggcgtgctctgcgtgctgtccgcggacaagaacacgacccagcacccgaacgtgacgactttagcgcccatctccaacgtaacctcggcgccggtgacgtccctcccgctggtcaccactccggcaccaggtgggcgcgggccctgtgggcttcccgccctcccctgcccagccgagccgcactgcctcctcgccgtgcgggcggggcccgggttcgggccacggtcgggcgggcgggccgcgctcggggtgcggcggcgactccggcaacatggcggccagcctggagtccactcgtggccgggccgggtggggagcgcgctggggggaagcggacgcgcggttcccagtggctgcggggctggggcccccctcgaagtgttgcaagtcgaggtgccttttaaaagtgcatcgtaattcctagcctcacttggggtcggaaatggggacgtggcttccttccgcgggggcagcggtggggttgaggatggggccgggcgtcgcgcctctgaggttggcggtggggccgagctgcctctccctgccact

SEQ ID NO: 11174 - DNA, 6000 bp, Homo sapiens; identical to SEQ ID NO: 3445

SEQ ID NO: 11175 - DNA, 6000 bp, Homo sapiens
aatgaaaaaaaatgatggatcataaactcttttgtttttctagattcctggattttgtgagaatgagaaaggtgttgtcccttgtaacattttggttggctataaagctgtatatcgtttgtgctttggtttggctatgttctatcttcttctctctttactaatgatcaaagtgaagagtagcagtgatcctagagctgcagtgcacaatgggtaagtttttaaataagcttcaatataaaagcttgggtagcctcttcttgataattgccagtttatccaaggaaactttaaggtaaaataaacttatacaatttgcagaattactttattcatgaatgacaggataagaaaatcttgtttttactggagaatgtcagactttggatattaaataatagctgtgataacctctgatccacagtgttttatattttcatactaaaaaagaggctctattatatttgtgactactaagggaatagctatttctccttctactgttaactttaggtggaccagtccacttacatagaactctcagttccctagacccagagagcagatttttctaggttggttgtattggacaacccagaaagaaacttcagggtttcttttatcaatcttccttcatatagagcactacttctggtacccttatttgactgttttaatatctgctgttgcttatctagttatatgtgctaccaaagacaaaaagtataaacaagtagaatataaatattaatgagaaaatatgtgacgggttgcttttcctttattttgttcctttggtcattgattattttattaaattattagagttttagatggaggcatttatcatgtgtttataaaaactattcatttatacagttcaccttatactttgatacattatcccacttatgtgaaataagcctgtgaaatggaactaacattctcatttttccataatgaattagtgagaaatacatctttctcaaaatggtcttaaaagcagtttatgtaattgttgttttttctgataatcaagtgtattagggttctctagagggacagaactaataggatagatagatatatataaaggggagtttattaagtattatctcacatgatctcaaggtcccacaataggccatctgcaagctgaggagcaaggagagccagtcctagtcccaaaactgaagaacttggagcctgatgttcaagggcagggagcatccagcacaggagaaagatgtaggctgggatgctaggccagtctagtcttttcactttttttttttgcctgctttatattctagccctgctggcagctgattagatggtgcccacccagattaagggtgtgtctgcctttcccagcccactgactgaaatgttaatcttctttggcaacaccctcacagacacacccagcatcagtactttgcacccttcaatccaatcaagttgacactcagtattaaccattacaagtcagtactttgcatccttgaattcaattgacactcagtataactatcagaagtctacccattgtcaacttgaacccgtatacatctcctgagatcatacataatctgcaaataaagacaataataaggtcatacaactaaccttacaactgaaaacgcaccagtccccaaccaaaatactaattacataaagttaacaatacttaaatgctgatgtgaagtcagtaaatcttatgtcacatgataaaggagaatggaaataaaatgaagatattttcttagtacaagtatatgcatgcatgaacatgtttttgacaaaacaaggaggaagtactcacaacaattacagccctcgtttctgcagctggacatgtggtcatagctggtattgatgactgccttctgctacccattgtgtattccctttgccttcagcaagcaactcagcaggtcgtggtttttttcctggtggagtgacccaatgatctccataagcgcctactttaactgggggaccacaatgttgttttgggtcccctggaatcaatgtcagctcagagccagtgtccagtagtccccaaaatgtcttatcatttccctttcttttccagccatttgctctgatgcttcctctagcgtggtctgggctttaatccattcctttcacatgttgacttgcctttcttatcagattttttttgctttgttttttccaattggaaagatctataatataagcttgggttcatggtaatggttaatttcactctctctccaaactatgttatctaaatatgatgattaccttgttttgtagttacaaatatggctacactccagatcataatatcctcagaaagaagtagaacattcacataaagtgtagctatttgttaagatgcagttaaatgatttcatatatgaaattatttgatgaatgtctattaataaaaaattatatttctttttgttttagattttggttctttaaatttgctgcagcaattgcaattattattggggcattcttcattccagaaggaacttttacaactggtaagaaatcctttttaagttgtttgacattgatattttataaaggaatctgaaataattgtcacctggaactataattgtttgtctttttgtttgggggtgtgtgtgtgtgtgtttccccagttggcaaaatcaagatgttcatataaaattttattttcctttttgtgtactgtgattttgaaaggaaatgataaaaatcaaactaaccaatcacttatgtatgctttctttccctttcagtgtggttttatgtaggcatggcaggtgccttttgtttcatcctcatacaactagtcttacttattgattttgcacattcatggaatgaatcgtgggttgaaaaaatggaagaagggaactcgagatgttggtatgcaggtaagctttcgtcgcagaacaacttcagtatagttgaactttgaagtcgagaatagatatgtagactaggtaaatcacttaggatttttatggtctactttcctatgatgaggtttttaatttaaactttgtgagtgtcaaaatatcacattgtatcagcaacttggtgagcagatcttttagcagattaactgggaacataacccaagaaccaggaaagaatccaaaagaacctgaatagctaaaataaatgttccaaagcatattactgaaagcatgtgcactttatagcctaattttctagcctacaatgggttaaaagcaaaatattaaagggaagaggattgctaggaatagataaacacacagtgatacaattcataaacagcagcaaataaaaaatataaaaagcaactcggatgttttattcaagtgcaaaggatgcttttatgtgcatcaataacaactaaaggaattcctatagtaatgtaattaatgattatttataatgatgatgttgagtcctttggggttatacttgaaaacagatatcccaattcaaatgcttacagggccaaaccaggtaacaaaaatgagggaacaggaggacagagtttaagtgcataagctttgtgcaaatagactacaatgaattggagagtatgaatgccccatctaaagtgcattactactgctcagctccatttattagttgccttgtgggaatgtgaacttagtattgcttgatttttctaatgtttttcaaaagaagtcataaatctggattttcatgctaaatgactgagtttcagctaaaaaaattttaaattggagtgcaagccaaatccagtgtgtctgctggcctaatattcctctcacacaactaatttgtggtgttttatctcagtggttcaagttaaaataatttggtgctcaaagaaataagctttagtcatttggaaatttcacttacattgaataccttgttctctaaatgcaaagtctaatgcaagggtttctgtgtcttttgttccctgctgtatccccagggcctggaatgcaggcattcaataaatatttgttggatggatcccctgtcagcgaggcaaatctacataaatacttgtatattaggcacatattagcataaaggctaaacaacttgtgtatgttgaaatttacatagaaaaagcataggttgacttattaaataatgacttacccttgcataatatgtatcttttaagattttagttcatgaggaaaagcatcattgttgtgagggcttaacattaataatgaaaataattttcttaatgcccttgtttacaactgagtgataatggttctttaaaaaccttaagtaatattcctcttatagttatttttctttattttgaaaataatggctaacatgtaaacatagtttgtaaactctaatatagatattagtattaaatcctattagtttcttactaacttgccatccttgcaaatacataatagctatgtgtaaaaactagaattcttcagcaataaaggtcagaattaattttctttcctgcttttatagcctttataatgctgacaatgttagttgcttaaaatatattttttgacaaaatgacagattgtttataaaacaggtcccatttctaattgctaataatttctgataaaaagctaattatccaattatatttctttcacagccttgttatcagctacagctctgaattatctgctgtctttagttgctatcgtcctgttctttgtctactacactcatccagccagttgttcagaaaacaaggcgttcatcagtgtcaacatgctcctctgcgttggtgcttctgtaatgtctatactgccaaaaatccaagtatgccctttaaagcattagtttttatgaagcttatacctttttaagttttcaaaaatctagaatgatgtcagactatttacctgtgttgctatatatatatatatatatttttttttttttttttttgtaggaatcacaaccaagatctggtttgttacagtcttcagtaattacagtctacacaatgtatttgacatggtcagctatgaccaatgaaccaggtgtgttttatttatattacatgttcctaaaggttctgcagttgttgtttttccagaaattgtctttttgtgagattaaattacttaaaaattaggcttctagaggaataaagtacaaagttttgatctttgatgtattatttatttcacttagtttcttccatcactaacaaaattataagaaggttacatgtatacctaagagaaactgtgagttcagtttcagagcaccacaatgaaacaagcatcacagtaaagcatgattttttggtttcccagtgcatataaaacttttgtttatcttacactagtctgttgtgtgccatagcattatgtctagaaaaacaatgtacattccttaatttgaaagtactttatttccaaaaaatgctaacagtcatctgagccttcatcaagttgtaatctttttgctggtaggaggtcttgcctcaatgttgacggctgctgaccgaacagggtgttggttgctgcaggttggcatggctgttttagtatctttaaactaagaccacaatgaagtttgcccattgattgactcctcctttcacaaaatatttctctgtagcatatgatgctgtttgatagcatttgacccagagtagaatttccttccaaattggagtcaatcctcttaaacctgctcctggttcattaagtaagtttatgtaatattctaactcctttgctgtcatttcaataatattcatagcatcttcatcaggagtaaattccatctcaaaaaactactttgttcatccataagaagcaacacctcatcattcaggcttgataatgaaattgcagcaattcagtcacatcttcaggttccactttttagttctcttgctctttccaccgtatctgtagctacttcctccactaaagtcttgaaatcctcagtcatctatgagggttagaatcaacttctttcaaactcctgttaatgttg

SEQ ID NO: 11176 - DNA, 6000 bp, Homo sapiens
caagtaatcctctccctcggcctcccaaaagtgctgggattgtaggcgtgagccaccacacttgtcagaaatgtaaattattaaactcacctggaacctactgaactcttagggcaggggccctgtaacctgtatttctacagctcctccaggtgatgagatgtaaaagtaaagtttgcaaaccactaatcagtactacccttatcctcaagctacagacacacccaatttggctgatagttgtggaaaccaatgttttggtaatacaattaatgagtcagtcaccctcccagtgttaaacaatttccacaagtaaattcagtggtaagtctcatcttgagatgttcattggccgtgacctatttttggcaacttagttttcattttccaaggccccaaatgtcaggattttcatttttccaattgttagatgtatgctaatagaagactgcccctagccacatgcgccttaacatttgcctatttaaatactttgtatactgtcttttgcaagtatttgcttggcatcattcagcatccaggaagtgtttccatcataactttgctgcatcaaaatcaggtgcagattacaccagctcacacagagatggcaagaccacctctggacttgccgcctgggtctttaaaattctgcatgttaaacttctttccccgcctctgagataatttattttttattttttaatttttattatttattattattattaatttattttttttttttgagatggagtctcgctccgttgcccaggctggagtgcaacggcacgatttcggctcacagcaacgttcgcctccctgattcaagcaattctctgcctcagcctcctgagtagctggtactaccggcgcccaccaccatgcctgactaacttttgtatttttagtagagacagggtttcaccatcttggccaggctggtcttgaactcctgacctcgtgatccacctgccttggcctcccaaagtgctgggattacgggcatgagccactgcgcctggctatttttttttattttttatttattcatcttttgagacgcagtttcgctcttgtcacccaggctggagtgcagtggcgccacctcggctcactgcaacctctgtctcccaggttcaagcgattctcctgcctcagcctcccaagtagctgagattacaggtgcccgccaccatgcccagctaatttttgtatttttagtagagatgggggttccaccatgttggccaggctggtctcaaactcctgacctcaggtgatccacccatcttggcctcccaaagtgctgggattacaggtgtgagctactgcacctggcctgagatgagaatttaaaataatgctttgggttctgtgatctagacaacaatttcttttgttgctaattagatgaaaggtatagaaagtaaaatgattgggcccccggagaagcaggattttccccagggaatccaacaaatccagagaatgtctttgttacgggaggattgttgttttagttaaagatgtgctttggaaatgtcttcttccttcatgttagtatcatgatcattatcatgttaaaaaaaaaaaaaaaatttacaaaccacctggccacccagagcagaattacagtcagcactctgtttccccaggtcctgaatccttggattcaaccaacctcagcactctgtttccccagatcctgaatccttggattcgaccttgggcgggggaaaaagagtggttgcttctgtactgaatatgtacaggctttttttttttcttggcattattccctaaggaatacagcataacaactgtttacatagcatttacattgtattcggtattataagtaatttagagatgatttaaagtacaagaaaggctgtgcataggttatatgcaaatactacatcatgttatatcagggacttatgcatttgtggactttgtatcctcagaggtcctggaactcatccctggaacagggacgactgtacttaatacgctgtccaaaatgaattggactgccagcattctctactttttcatgtattactcttaggtcaggggaaaaaacaaatctctgtattttataattaagaatgaatccctgagtcatttgacttcttcaatgacagagcaagccacgtaaaaatacccttccaaggaaagccatcagggagcctcagaatgggtacagtttcaccccatttacctaaccttttctgccagtgcagctgagcctctcaacgcgactttaacaaactctctctgagccagtcttctcagtgccatctttgctttcattcaactttacatgtctagtgttgctgctcaaacctgtgtcccctcaagtcctttcccaactaaaggatggtggttaattgacaatagacaaacaagtctcagaacaattatgagggtgtaatgaagtgtgcattcgtacatgcaattaaatagaggaaagatgcaggagggaatgtgtacacaatcctcctccagctggcacgccctgcctggaggtgctcctccactggaagcctgttgtgtgctcctctggcaaggagatgaagtcccagatttttagtgcctcatgcaaggtcttttccacctccttcactagttgacttagcctggcatgtagcaaactctcagtgtcatctgcctccaacacagttttccccaggtctttcgtaccttggccttcacatgggaagccaagagatgctgagcacatggaggagggcaatcttttccccctttgattattatttttttaattcattgagattctaagtcctctgtcatttcaaagaaaggatactctctttcctttggagctatgttctacatatcatcctaagtggaaaaaaatcattaaataggccgggcgtggtggctcacgcctgtaatcccagtactttgggaggccaaggtgggcggatcgcttgagcccaagagttcaagaccagcttggccaacgtggcgaaatcccgtctcttctacaaatacaaaaattagctgggcgtggtggcacatgcctgtaatcccagctacttgtgaggctgaggcaggaggattgcttgaccccaggaggtcaaggccgcagtgagacatgatggtgccactgcactccagcctgggtgacagagtcagacactgcctcaaaggaaaaaaaccaaacatacctcaaataatgtctgcaaaataaaagactatgaacggaatatggagaaagcctctaagatggccccaggggagtgttaacatgtctagcctgattaattggctagtttgggaataattctatccaaagtgagtgacaaggcatggctggctagtgtcaactttgtcctcagctatagttaaaggcaggcctggagggctgacttgttcagtctcagtagcaaaaaagtgcatggtgtctggataagcaggttgtacagcctattagaaaagaaaggtaacagtcttcctctaatgcaataagggattttttttaaagttctcctgtcaagattttttaataccagaatctgagagtggagaaaattggcccaaggacagacaaaagagctgggaggaaaatcgactatatttttcaacacacaatgccatttgaagtactggattgagtacggaagtattacgaacattcctaatttggttagtgtctatatttcttaatatagtaatgctattaatgtctgtctcctaagtttgtataaatccaaacccccatgttattggccagttggaaacaataatgtaaacagactctgttgcccaaattaagttatgtgcaccgaatgctttgtcaaactgtaactattttaatgttcattctaagccacaaatctttgccaaagaagatactgaattactctcttttgtttaggagtagaatacacaataacctaatatttaaaagtattattcagaagaagaaaaacttaggattgaatttttctttatcataaattttagatcattctctttgctcgattccatagaagacactaagaattagactgaactgctttctcattgtattgttttctacttgacctaaaaatccaggggtgggttatatagagagtttatttaggagactttggtaagggagagagaaaaataatgtacaagctggaaacgcatgaaaaatgtaaacaatgaaagttagaagaatggaagcgacagtgtgctcaggaaatgatgtgtcatttggtcggagttcagggtgcccctgaatcccaggagggtagcacttgctttcctgcccattgtgaaggcaaggaatccgcgtgttgtcctatcaattccattcatggcagggtagagacttttcaaatggaagaaaatgtgcattaaaggacattctttctgcatggggtggggtagtgaacgtgttggggttgaggcacggagttgtttaggtcaggtgaatagtgaggggaaatgggcaggcagtcaatggttaagttggtgttttgcaagccattttaagaggataccaaataaaatgcattaatctacatttcattaaaaattagttggtgggaaagtggaaagttgaagatgagaactttccaagtaaaacagcttcatactccttggccagaacaccactatatttacaaataggggataaaaacacccacttcctaggtggtccataagcttaactgggcaggcatatgacacttctgagcatttgatgccgttctctgggggggttaaagcctgaatgcccaccaaatcccctgtctgagcatcatttgtgaccaagattcaaattatttcccatgaagctctaaggtctcatataactcagtggatgtagctcacgacttcttcttttgaccccagtattctaagacaaacaccacagccgaagctggaagtgagaggagaggggttcgtttcagagtcaggagcccaaggcgccccagcaatttcagaccccctgggacaggaactcctcctccagtaagctcttgttttgaaaaacagtggggtggggccaaaaaagcattacaatggagctgggatggatgaggctttcttttatttgagatgtcacttgtgtcacgtttcctgaaacagcacgttggaaaacagaagctattttctatcccgtgggttgcgctggaagagctgagaggccaggctgtggatccttgccacgaacaacaagagagggcaagtccagccgcctgctaggggactagcaggaagcggcacgcctgccagagctcatcacttcaactctggctttcactgcgctcattccctgaatggcagtaaccagggggcgggggtggcatgggaaatgaaagaaagagatatgggaaactaaatctgccgggggaaagagagttaccggagttttagcaaaacagctagcagatgcaaacggggaggcagagggaggagggaaggctgggcttcagcaacctgccacggggatttaaacaaaggaggtttgagagaggcgggatctggctgtaatatcggcacagggacagagacagcagctggactctcgggatgaaacggaatcgattcccagcgtctccaacagggcaggagtgagtggagtatgttgcaaaataagaactcagagaaacgagtgagtttggaaaaaagacttacagattttgacggtctcttgacatttcacccttctttgaggcatgcctttatcaatgcgttacctcttcataatttctgtctctagtgtaattatttttatcgtcttctctgtgttcaattttgggggagatccaagcttccaaaggctaaatatctcagaccctttgaggctgactcaagtttgcacatcttttatcaatggaaaaacacgtttcctgtggaaaaacaaactaatgatccatgagaagtcttcttgcaaggaatacttgacccagagccactacatcacagcccctttatctaaggaagaagctgactttcccttggcatata

SEQ ID NO: 11177 - DNA, 6000 bp, Homo sapiens
tggagctgaaccaagcaccagtgggagagtcacagtggagggcctgggattctggagtaagatcatgtcatccacagcagagacacatgccccctgttagaagcaacttttagtgttccttgtcctgattcaatagaatgtttgaccacgggataccaagcaactacggggttccaagtgcctgtgtgacccacaaagtcatagatggtacaggcccaacagcattcatcatcaggtgaaaacagtccacctgggttgagcttgaatcccttgctgacacccacagaaaacacccaagtctgaagtggcactgaactaccaaacagacaaatggcagttagccagctttcaccatgggtcagcccaggcctggtaggatgagtgcatgaatggagcaaccacagtggcaggcatgaggctccgtaaggggccagcagcactgacttccccacaccaaggcagatccagctgctgccacctctgaatgtccaactcatcagcaattgaggcccatgatgtgccctagtggggcactatttctttacatgactacccactaagtaacaagttgactacatttagctacttccaacctggaagggccagagtttcatcttcacagggttaggtaccgattctatgggtgggttttcctgtcctgctctcagacacagccagcaccactctctgggtgctgttgacattcctggtctgcaggctaggcagtgctcctagcccattatctgcctgaaggacccactttgcagggaaagtttcagtgtttccacggctgtgggttccactaatcctatcaccatctgcactacccaggagctgccagccacaaggaaggctggacaggtcttctacaggcacaactcagtgccagcctggaggaagcactctgaggggtgggtgccatctttcaggacacagtgcattgtttgaatcagagacgtctctagagttctgtgttctcaataggaagaacatgtgtgtccagaaatcaaaaggcggaagcaggtttggctccatgtccaatctcttagattcactcaatggggtatttcgcatattttatctcccaacactgggctgtgcaggatacgaggttctggtttccaaaggagtgtacccctaaaaggagacaaaagacagcccactgaactacacattactttagtcaccagagaagtttggacagtgtgtgcccagataccacttggtgagaagaagattctcctcctctccaggcccaggtaataaatagatcctcatccccaggagaaggcatggctgtttcacacaagggtagaagtgtgtgtggaaaccagagatccacctgggagccttctggtttcccttgccccattgtaagtgtgagcagaatcatccagcaattcagcctgagaggatttgatttccaagggcccagacccgtcagggcagaaggtttgagtcacacttgtgggcaatctcccaaggccctgctcttgtgttctgacatcctcagtacattggtgctgaggccctcttcccatgggctgttcccaacgactgatgggtcataccagtgacactaaggcaggacattcctaggagacaggggactcctctgatggccaattgtagctcgaggactcctctatggccttgctcagtgaagtcctcagatgatgcaggcctaggctgacaactggactgcaaccttgtgagaggccctgagccagaagcactcagggaaacctctcctggatttctgatcattggaaactgtgggagatgaggaatatttgttgttctgagctgctaagttttacataatttgttatgcatagtaaataactaatacattttcacaagacaggatgcattattacatgttaatttgcatttgctctaaatttatcatcatcattattattatttttgagacagggtctcactctgtcacccaggctggagtgcagtggcatgatcaccatgcactgcagtgtcgacctcctgggctcaagggatcctctgaccttagcctcctgagtagctgggactatagtcatgaaccaccatgccaggctaattttctagtttttttgtagagatgagagtttcaccatgttgcccaggctgatcttgaacttctggagtcaacaagtctgccttcctctgccttccatagtgctaggatggcaggcgtgagccaccacccctgcctaacttaattataagacattaaacatgtaacttagttttaaaaggaaaggagaagttccatggctgaagaggatgtattttattatcgttcacaatgatcactttacttgaacttcaatttccaactgtgtcccaattaaacacaaaaggaagattcatcccttgctagagtgattctatgatggccccaacaaccacctcctggtcattcaccttcccccagttattcaaccaactctaatgtaggtgctgctgtgaaggaatttagcagacataataaaggggctcaattagttgacttcaggctgggtttatgctgcttggactgtcctaatcaggagagtccttgaaaggactgggttcttcctgagcatagagattcacagtgtgagagggattcagcatgaggggtttcctccactgtgggctttgaaaatgaaggggctgtgtaggaaacaacactggtgggcaccaggaattgagtacagccctccctgttctctacattgacagccagcaaggaacagggacctcagtcttaaaactgcaagaaagcacattctgccacctctgtataagcctaaaggaggattcaaaatgaagactcagatttgggaagcctggaacagagattccatctacatcatgcccagatttctgactaaggtactataaacagataaatgggtgttttttggccaggcgtggtggtgcactcctgtaatcctaacatttgaggagctgacacaggaggatcacttgcagccaggagtgtgagaccagcccaggtaatacagtgagacactcgtctctacacttttttttttaattagctgggtgtggtggcacttgtctgcagtcctgtctactctgaagactgaggcaggaggattccttgagcccaggagtttgaggctgcagtgagccatgatcatgtgactgcacttcacgctggatgacagtttttagagactctgtctctaaaaacaaataaatgaatacaataaataaaaacaaataaataaatacaataaatgggtgttgtttaaagccaatgtttgtgataattttttacacagtcttataaaattcatacacaggctcaacagactaatggaatgaactgatgaattgatatatacactagttacataaaataaaatctttctgaactttttcagtgttttgcattttataattatctgtgatgcaatttaatatactcatatttcattcattcagtcaacaaaaattaatttagtccctacaatgaaccaggtatcccctcatatgctcacgtgcctgacattctagaagcttcacaagaccaaggtggagccactggagtgttttaggtggagaaatgacacactttgactcacattagcaggaccactgtggagagaacagtcacgtagcaggtaacgggagagtgccagtgtcacaattcaggagtgacagtgtgatggggactaaggggagaggaggggctgagtgataagagggacggagggaagggctggagaagcagtaggtgaggaaaaggagtagagggatagaattcaaaagcagcacaactcttaggtttgaacactttttttaatggtatttcaatagatccatctacagagcctcgcagggtgttacttgcagttggcctttaataccttaagtgggtctgcttaaaaactaattgtttttatgttaatcaggttttaaaaatactaagtgttcctaagaaatatacacaccacttagatgtggatacttcctaaaaacaggcagtgcatgagcactggtgatggacattgtgactgcatcgagcgcttgcaactttgaggtgaatgaagtctgtactgactcctggttgcaacacataggaacacagtggctactttgtattgaggagatgtcctggactcacagaaactcagggctatggaataaaggtaaatttaaaacaccacaagcgggagtcacagataccttgtttgcaaaagtgaaacttaggagctttgtgagtcctgttgtaatgcttttagacactttatatatcaaggggccaaagtcacatgtttttaccgattagattcctgatcattcaggggttaccaagattctgctacccactgtagttaatacacaaaaagcaaactggtctctatactatctcatgcacccaggcacaacttttccagatttaaagaaaaagaaaaaagaaataaaagaaaaaaacctctgtctctacacctccattcccagggagagctccctctctggcaccaagctccctggggtgagttttctttttgaagagtccaggggaacaggtaagcagcggggaagcagggagtccatttcagggacaggaattcccggatgaaaagtgaaaggagagggacggggcccaagctgagggtttcttcctggtttctcggacagctcctggaccaagactcagggaacattgagacagagcgtttgtcacaggaggagcggggtcagggcgaagtcccagagccccaggcatggctctcagggtctcaggccccgaaggcggtgcatgggctggggaggtgcagcattggggattccccatctccgcagagtttctcttctccctctcccagcctgcgacgggtccttcttcctggacactcacgacgcggacccagttctcactcccactgagtgtcgggtttctagggaagccaatcagcgtcgcgcggccccggttctaaagtccccacgcacccaccgggactcggagtctccccagacgccgacgatggggtcatggcgccccgaaccctcctcctgctgctctcggggaccctggccctggccgagacctgggcgggtgagtgcggggtcaggagggaaacggcctctgccgtgaggagcgaaaggtccacctggctggggcgcaggacccggggagccgcgccgggaggagggtcgggcgggtctcagcccctcctcgcccccaggctcccactccatgaggtatttcagcaccgccgtttcctggccgggccgcggggagcccagcttcattgccgtgggctacgtggacgacacgcagttcgtgcgggtcgacagtgacgccgtgagtctgaggatgaagacgcgggcgcggtgggtggagcaggaggggccggagtattgggacctacagacactgggcgccaaggcccaggcacagactgaccgagtgaacctgcggaccctgctccgctactacaaccagagcgaggcgggtgagtgaccccggcccggggcgcagatcacttactccccgctccatgcctcacggacggccctggtcccctgagtctccgggtccaagatcgaccccgaggctgcgggacctgcagagatcctcgacccgggagagccccaggcgcctttacctggtttcatcttcagttgaggccaaaatctccgcaggttgctaggggccgggccagggctcggtgggcggggctgaccgcgggaactgggccagggtatcacatcctccagggaatgtttggctgcgacctggggcccgacgggcgtctcctccgcgggtatgagcagtatgcctacgacggcaaggattacatcgccctgaacgaggacctgcgctcctggaccgccgcggataccgcggctcagattacccagcgcaagtatgaggcggccaatgtggctgagcaaaggagagcctacctggagggcacctgcatggagtggctccgcagacacctggagaacgggaaggagacgctgcagcgcgcgggt

SEQ ID NO: 11178 - DNA, 6000 bp, Homo sapiens
gggtctggggccttccaggttgggtcgtaggggcgggagcgcacaggctgcgagagaggagcaaaggttggtggagggagaagagcagtctggggcctggctggacaggtgagccctgagacctgagctctgctcccttctctgggctaactcccgcagctgggctgggccgagcctgtgggaacctgcttcttcctctgtgccctggggctgctcccctttgcctctcccaccaggaaccgatcccagaagtaggaggggcgtcttcccctcgtgggccctgagcgggactgcagccagccccctggggcgccagctttggaggttctcgtttggggaagcgggggtgggctgcgagtgggtggagggggctgggcgcggagccggccggaggcagcggcgcgggcggctgggcggcctgggagcgcccaggcgggcttggcgggcgggttacctgggggaggccgggccgggcgctagcgcgcggggtgggcgtggcgggcgcggggcctggagctcggcgccgggcgtgggagccactgggactactgggtccgggagggggaagggagggctgcgagcccgaacgcgcggcgagaaggccgaggggagggaggggagcgaggagcgggaggaggaagggagggagccgaggcgagggggaggcggcgcctgggcccgagccgccccagccctggctcctctccccggaacaggcccccgacagctgctctcgggagccgcctcccgacacccgagccccgccggcgcctcccgctcccggctcccggctcctggctccctccgcctcccccgcccctcgccccgccgccgaagaggccccgctcccgggtcggacgcctgggtctgccgggaagagcgatgagaggtagggagagcggcggcggaacccgcgggcggaggcctggggctcttggggtgggggcgcgcggcggcgcctgcagggcgaggggcgggggaggcaggacgtcccgagccatgcttggtcgtccagctcttctaagcctccctgcccgcctccccgatgctctggcataccgtctgaaaaccgggggcggggactgggtggaggtgaagcccgtgacctcccagaaagagttttgagcctccagccttgaggcaagtcccctctcactcagtgcggaggaactgagccccgggaggaggtgctcctgtgcagccccactgagtcagctcatctatcgcctgccctccacctggccagtccctgcgggcatctaactgctaagcctccgctcagccaacacccagttggtcagtctggtcacagtccagcaaaaagagggactgccactctaacccaccagtgacaccactcttcccggctggatggtcaattagctctggcatgagagaatgtcactgccggtgagcgccagcttcagggtcccacccccccatgcctggctcttggctgaacatttcttcccagcgcttccagcagccagaggcaggcgcccaagctcgctggctgttgctgagggcctgtaggtgtgtccaggactgagtggtgtggtggagacaggtgaaaggggagtgagtggaaaggcagggaaaggctgttgtccttattgccactcttcccacccagcgcccacctgttccctgccccctcgacgtccctctggcttggtcacccatgtgtgttagaggctgggccccagttctctggggatcctgtgcccaagggcccgggtgtgtgtgtctcatgctgtcttttggtcacaggagcatgtggtgtctgtcatttcatgttcacaggtgtctgaaggtggctattcactgagcgatggggttggacttgaaggaatgccaaggtgtggacgggttgatgtatgcatgagcttctgtgtttgctctgtctcagaaactctgtgagggttgtcagggacactgagaggtgggtgtgtgcatgccacatttagcctcgctgtttacagccagttcagtaagtttgtgtgtttcaccgtgtgtgtgtgtacagagctgtgtgggtgttgtctgagtgggacttgggggttgggagaggagcgtgaagggcttgaggcagggtggcctggcccctggtttgtctttggttgtaatggagtggaagggggtgggattggggaaggtcttctgggcttgtcctctcttgccctctgggtctctgactgtggactgaagacccagtggagagagatgaggtgactgggggtgttggagaacagacagcccagacgtctctgtgcttctccgtgttcctctgcttggctctgtgccccgtgtttctgagcctgctctatttacctcttgcattgtggctctcgctctgtctccgcctgcctcgtatcctctgcctgcctttgtatctctgccccgggctcctctcggctctgtgtggctctgatgactcatctgggataggcatgaaggttacttaggggaacaagagccccgctgttcccgagagaggtggggttggagagcggcacccaggaattccaagccagtctcctgggactctggcagcctgctccccggcgctggaccctaagggaccaggcgtgatgccttctggttctagcctctgagtgccccccacaactcagtcgtccccctcagctgctgcttcagagctctggggtctcagctgcctcttacattcctgccctagtgcattgtgggagcagctggaggaggacaaagggatgggggagtatcccccactcctcctacctcctggggtgacctgccttccttgtctttagacccgccctcgtctccaaggcaactcagcctttcctcagtccctcagaggcagccaccttctggaagtgggaactggggggactggatgtctgggtctcaggaaggcagagcagggataactgggcccaagatgccctgaacctgataagaggtggcagtcgagtccctcaggactccagggcctggagacttcagtacagggctctgagaccagtacaggttaggatagcttttcctgcagcaggggaggggagagtagttacttgggtttgtaaggagatgccatttagaatagttttatgtggggtaagcttcctgggcctgaggaacagagtagggattttcaaactttaatgggcacaggtcacctgggaattgtgttaaaaggcagattttgattgagcaggtcaagggtgagcctgagattctgatttcttccatgcttccaggtattgctgatggtccagggaccaccctgggcctagagggctataggggacagtaagactagaaggtgctggggtcccctctgcccttctcttagaattctggactcctatgtgggagggcagcagggtgagctggtccaggcttatctgatgtttaattctatcatatcctcaacaaggaattgcccaacctttcctgggacatatttattttttaaaagtcaaaatgattttcatattcttttacatatcttatgattttacataaatgcatttatgttacaagatttagaaaaatagtacaatcaacctgtctttttaaatttgcttttcttttgccccgttcatgttaactcttgttatattgtattctattgttatattctattatatattctctccttctagacgtacacacaggtatatatacaaacatgggtgcttgtttattctattttcaaaaggtgggatattttttatacttctgttgcttgcttttcatattcaacagatatacatggaaatcacacaaagttaggaatatattgcctctttgttacttttcatagctgcatagtagtcaataaaccttattttttttaattccagcctgtcccctgtgggcattcacatatcttacagatttatgtcttacaaaaggtaccataataaacatctttgaaatcttcttttttatttttatttttcactttttttaaagagatggggtctcactatgttcaccaggctggtctctaactcctggcctcaagtgatcctcccatctcggcctcccaaagtgctggggttacaggcatgagccaccagacccagacctgcacatatgttcttacttcctggtgcttctctctcgagggaatgctgggtcgaagaggatgtgcatttttaattataatagacattgctagattgctttccaaatagaagataacactcatttctgccattgagcatggtgcctcccttttcatcactttctaccacttttatatgttacagccttaaaaaaatatcttgtcagtctgcttggtatttccctgaggctggtgaatttgaccattaaaaaaaatgtttgttggcaatttggctttgcttttctgtgaaatgactattcacattctttggctgtttctttattgggttacttatatattttttcttgtcagttcctaaggggccttagtttattgtagttattaaaccttttcctgttgtatgtgttataaacattttttgcacacttgttgtttgttctaagccgttgtttatggggatattttgcccattcctgattggagaaatggggctttaggaagttatttaactgatctctgccctagtttcttcatgtgttaaatatggatagtaatagtatctaccttatgaagtgactgtgaagataaaattatggattctgtttaagggtttaggccagtgtctggcacaggggaagcattctaaaaatatagctgatgctgttaaacaatgactgttgttgttgttttactgttattatccccaaagcggcccattctgtctgttgctgtcagctatgactcagtcccctgattaacttacgcaccacccattttatcccctgcagagatgctgcccccacccccttaggcccgagggatcaggagctatgggaccagaggccctgtcatctttactgctgctgctcttggtggcaagtggagatgctgacatgaagggacattttgatcctggtgaggagactgaatcatgggtccctgagggccagggcttgggaggtagagagttgggggccttgacctgttacatgcctgctttttactcagccaagtgccgctatgccctgggcatgcaggaccggaccatcccagacagtgacatctctgcttccagctcctggtcagattccactgccgcccgccacagcaggtacttggcacacctggcacacttgtagctgccccgagaggagctcctgggacctctacttcccctccaacccctctgcccatgccagtgaaacccctgcaggctgagggggcaaatgaagtggggtttaaatactggagatggaggcagacctggggccagatgttctctgtgcccctcttcaccctcaggttggagagcagtgacggggatggggcctggtgccccgcagggtcggtgtttcccaaggaggaggagtacttgcaggtggatctacaacgactgcacctggtggctctggtgggcacccagggacggcatgccgggggcctgggcaaggagttctcccggagctaccggctgcgttactcccgggatggtcgccgctggatgggctggaaggaccgctggggtcaggaggtgagactggcaggggcagcacccagaggaggttggctctcctcacttccagctgtactttaaacaccacctatacgctgacgactctccagtttatatcatctccagactaagcctctcagctgagctccaaacaatattgtaaacctggccaccttttggatttctccacttagatgtctttttttttttttctaatagatggggtcttgctgtgttgcccaggctggtcttgaactcctgggctcagtgatcctcccaccttagcctcccaaagtgctgggattacaagcactgtagccagccacctagatgtctaataggcatctcaaacgtacgtttaacttcccaagctgaatttgattcccattcccagcctaaacctgctcct

SEQ ID NO: 11179 - DNA, 6000 bp, Homo sapiens; identical to SEQ ID NO: 2446

SEQ ID NO: 11180 - DNA, 6000 bp, Homo sapiens
atcatgtacatttgtaaactaaaaatagagcatttggccgggcacagtggctcacgcctgtaatcccagcattttgggaggccgaggcaggcacatcgcctgaggtcgggagtttgagaccagcgtgaccaacatggagaaaccccatctctctaccaaaaacacaaaattagccgggcgtggtggcgcatgcctataatcccagctactggggaggctgaggcaggagaatcgcttgaacccaggaggcagaggttgcggtgagcggaagcttgccatgagccgagatggtgccattgcactccagcctgagcaacaagagcaaaactctgtctcaaaaaaaaaaaaaagagcattttactttagaaaatatgcatatattggtcttaaaagtcactaaaaattaaaccaatataactgtgtcaatttggcatcaaaatctaccctgcctatatcaagaaagtgttgcacagtacattttgcaaaatattcagtgcatcttaagtactcaagaacagttcattaaagaaattttactcaccttctttttacccattggccttgaatttaagcaagataacccttatcttagtcacaagaagcttcaggaggagaaagtattaacatgtttaatttttacagatattttatatgctttcagatattcctcaggaagtcgagacatgctgtcctatgtaattttagatttactagtagccacattaaacaatggcaaaatgaggataattaatttttcaatatattttaacacaatgtcaaaaatatttcaacatgcaatcaatatgaaaaaaattgagatattttaacatttttctttccatactgagtcttcaaaatccagtgtgaattttatatttatagatctcaattcagactagccacatttcaagtgctcaatagccactggtggctaaaagttactgtattggacaacacacatctagagtctaacccccttctatctccagtataatcaccttaaaatgtacaaagtatataaaaggtaacccaaaattaagtagtgctctgttaaaatgcaagtgaaagatttaatgttgaaagtgtttagacgttttctaatgactaaaaggggaaatagttatttaggaatggcattgcaaatctttttgacattttcccatttgctcattaaatctttctgagaactaggttattttgttctttttcctccatctgagttttgtcattcaatatttatctgctgacaactatgcaaaacattatgctagatgggctgggtgcggtggctcacgcctgtaatcccagcactttgggaggctgaggtgggctgatcacgaggtcaggagatggagaccatcctggctaacatggtgaaaccccatctctactaaaaatacaaaaaattagccgggcgtggtagcacgtgcctgtagtcccagctactcgggaggctgatgctggagaactgcttgaaaccgggaggcggaagttgcagtgagccgagatcgcgccacttgcgctccagcctgggcaagagtgggactctatctcaaaaaaaaaaaaaaaaaatgctagatgcaatgaaccatgtaaaatgcactgcatctccactttcacaaagtttccaaactactgagaggaaaagagtgaacatgggaaaaacatgaaaatataatctctgtattttattttactgtatcactctgttaattctttgtttgcttatcagtccttccccagttccccaaagaagggaatggactttatcttcttactctttttctctatttgtggaattcactgtaatgaataattatgttaattttctagaacagaggtccctccaaagtacactaagtgcataaagaaacatttatctcctctatggggaacagaaagactttggcagaggaattaccaagggcaggccttgaaggatttgacagaagagaacagtgaggaagtttaaagaaaaaaaggaagtttttacagatgagaaagtatgaaaatagaggagtacatcacatatgataggtactccctgcatacaagttaataaaaagaagagcctgaataacctgagaatataatttatggagacagaaatggaggatttgagcaactgaaggggaggttgtgctgcataaactacatggaaaaaagtgattgagtaagcagttgcaactgctaacgttttaaggcaaactaccttggaaggtaccaaacataccgtgccctgctttcttctctttgggataatgtctattgtgtccatttaaggactttaatgattctgtaatttttagttaacatcaatttaaggactttaatgattttaatccattaagaactttaatgattttaatccattaagaactttaatggattaaaggactttaatgattccataatttttaattaatatgaacaacttcattcaagcattacatttatgggtaaggtgaaaaataagaaatctagcagaacaacatgcttttattttaccatcatgcataaaaaggaagacaaatatgccaatggtacacttccaatttgtcagagcaatttcacagtatttaagcaatttaggaaaaaagatatatcacttactaagttgttaccagggaaaattatcatgtaagacaatcaattaaaccatacttttgtagattatttttccatgaaggcaatttgacaagcctaacaaagaccaagttgttcaaactatgtttctaggaatatagtttaacagaaacaagaacaagttgaaaactgttatgactattcatatgtctctatattgtacaggcaagtaagactgttgttcttccaaatgttcccaattgaaatcaaaagaatatctgtacagctcaattttcacaataagtttagaatcagaaaaaaaaattttactaaatcctaatgaaataacaatcttccacataaattaggtcacaaaacaagtaagaaagcattcaaagttgcgctgtctttctttaaagaacccttgtctaggcaacatatttaacactttaaccccttcaattctccctgaaaagtatttttccattcatcatcattggggagtaagtactccttcctcgaaagctcttaacgacagcacagtcttcactctaggcccaatttttacctggcccatgcctctagccttttgttcagtttctcctgcttagggcacctttcatcccatctagatgtgtctctctttaactattctaggagttgataaaagggctaggaagtaggaagttgggaagaaggggaggggcgtaagagctctagcactctattttacaggccaacttctttgcctctgaaaatgacagagccaaaatgaaataaaaaccttgcttttacaaatgtttctgagctatcacttttttaagagaggattgggaggctaaggagggcggatcacgagatcggggttcgagaccagcctggccagcatggtgaaaccccgtctctactaaaaatataaaaattagccgggcgtggcggcgcgcgcctgtagtcccagctactcgggaggctgaggcaggagaatcgcttgaacccgggaggtggaggttgcagtgagccgagatcgcgccactgcactccaacctgggcgacagagcaagactccgtcctccgtctcaaaaaaaaaaaaaaaaaaaaaaaaaaggaaaacagggagagagagggaccttggcaggagccaatgtagggcaggtagcaatagaaagtgactagaggtgaaggaagagcaatgaagtaccataaatcacacagaacaagtggctcactgcttttctcctctgagttcattaacgtccagtaactgtccacagggcatgtgcccatactgctcaatgcagagctgagtaggtggaacaggctcccaaagctagaaatccaagtgacagcaaccagttcagaggccctgggaataaacagggtccaagcagtgcagataaaggcagtacaatctacagtatcatttgcttggcttacaagtagtgtgaaggatgacctcgtagcatgtgatattccagaacagcatgaaggtcatatggaagtggagaagcatacccaccaccgtctcaatcttgaggttgagagaactgaatatccaaaggaaacagggtgcagaaaagtcagcaaaaacaaagcacaatagaaggcatactcattgctgatgcccaagcacaggtccagcagaaggtggtaggagaccttgtgcaggagtattcccaagggcaaatgttaaccagactggaacccaaagggcctggggatctctacaggctcccttagcgggcgacgtcgggctctacggactccttcacgcaacaggtagtattgcagtggatttggccacagatcctctttaataatctcagcaattttgtcggactctggaaggctgtggtctgaaaaccaagtgaagaagctgcagatgaggtcttggtttctgcgaatgaaggactggggttcatgccccctgcgccatataattggagtagaaagagacaccactcggccggaggatcttacctcatattccttgacaatcagcttgtttctgaagtaggggtttcttctaaagaagaacttgaacttgcaaccggttctagggtgtctgagttccttcacctctaaattggttatgtaccttaacatctctgcatcttggcccctaatcatggcggacaactgggggtggtttcgaaaagcagtcatccagaagcccgggatattctgaatgatgtagttcctccgctccaggtagtgtcgacgcatccgcccaaacttgtgctccagctgttggaaggccctgtcggcctgagcattcacagtgtccagttccagctggatggcctccagagggtccatgcggagagcctcatgcaaaggccagggcccttcttcctccctcgcctcctcctccaatctatcctcctccgccacttctatttcttcaccttctggcggctgctcctctacctccatctgctcctccattacctccttctccgccaggccttccttcaccacctcagcgctctccctctcagccacggctgctgagacggtggcgcactttcctgtcttcacctcctccgcctcagcctccgcccccgccgtcagctcagacgcggatctctgggcgccacagatttctagggccttctctccaccctgaacgccctttttcaggctgcggtcggctgccatcaccacagaagcggctgccaggccttcggcgggaggctggccctcttcctgcccggctttgatcgccacatgaccgcgacccccaacaactcggatctggggagtaccgccacggcccgcggcatcctggggtacgcccccctcctctgaaggcggtggaggcgggagcgcgacggtctccgagcctccctcacccggctccgccatcacctgtgtcgcctcgctttggtcgcggagcctcaggtactggtgtgcgtcctggtcgctcgggacttggtcagaaataatgatgctgtgggtttggaggggagtggtcctcttgaccccatccaggccgctcatgttgctaacagtcggaccaaccgcaggcgaacgcccgttttcctcagaggccgaactgggagctaaccgccgctcgcaccgcccaccctacagtctcactaacatttcagcggcggtgtcgtcaggactggagatctcacggtatcgcgagaacttgctgagcccgggattggttccgccgctccctgccagccaaccggattctctgggctttatttctgtgaatttacccatagcaacagtaattttacctacgtaaataaatgtcgattgtgctgagtctggaagcgcggacgacccaccttgagatgcatctagcgactgctcccagcatgtaggagcagttgtaaaatcacagccgtaacagtgcctgctctccagtgtctgaaaacaaatgtttttctggtcttcact

SEQ ID NO: 11181 - DNA, 6000 bp, Homo sapiens
agcagaactgggattagcccgacgtttggatagtgggaacatcgatctgcggcgctggtgttaacccaactcattcggctggacgactcagccctccccatattaggtgatttacagagcaaaactgaactaaaggcccacccctttcttaatgttgtacacagagtagaacaggattgacttcaactccgttttaaaccttcagagcaggaaagctctgggctcaacccctttgtgagtggtgcaaaagggacaaagcccgccccttttaaggagacccgcggaggctagacccgccctttcctctttataatttgcccatcagaaatagggtcttcttcccaggttggaccccggggagtttgggcttttcctacaatcactgaccctcactgtgactaaaggagcagaattaggtaacagtcctcccactaccaatcctcttcccgagggcatgtaaactaatgcagggtaaaggtgtggctagaggggggaccttgataaaagatcccatgtgactcaagagtaaggaaagatgagaagttagcagttgcgtaaagaaggactggggcagatgaggattcaggaagcttgaggtttaggaaggaagatattgagagggaaaggtggaaatgaaggagagtgaagtgatggaatgatcctagtaaagggataatgggagtggaggaagagaagagggggtggaaaactagatacatggctaccaaattaaggaggcacgcgcattccagaggaatcggcattcttcctcactttttatttttctagaaagcacccctgaagccaaatttccattggaagaaaagatgtacccatattgtatgttgtgagaaggggttgtctcagcttgggcaagtaaggagactgatacgaaggaagtaggaaagaaaaggtacagaggtaaaagagcatggaaaaggaaagggtcagggataaggccaaagagatctcttctctttaaaggccagagaaggcaggtggaggggggagctggactgctgggagatagtgagggacaaagggcaaaggaaaccagaccagaggactggagagtgagatggagtgagatggagtcctggagagaaaaagaagagaggtgaacttaatgcttgtcatatggtaggtagatgcttgataaatgtttagaattgaatgggtacgggaaaaggggtccttaagaatagttggggggaataagcagcagataaccggagttgagaaaaaaagagaccaagtaaaagtggcagttaaaagagagctgatggagaataaaggaaggaatgtgcggaaggaggaatacagcaccaggggatccagagctgaaagggagttagagaaaaaaaagatgcagctggagccagagatgggggcaaagaccgagggagagccctggggcggggctcgcaagaggacactggtagatgtggggaggagatgccagagtttctgggagacgattggcaaaacaggctgcccatcaccgccctccacttcctggccggccccggaaaccagcaggcgttggggaggggtggcgggggaatagcggcggcagcagccccagccctcagagagacagcagaaagggagggagggagggtgctggggggacagccccccaccattcctaccgctatgggcccaacctcccactcccacctcccctccatcggccggggctaggacacccccaaatcccgtcgcccccttggcaccgacaccccgacagagacagagacacagccatccgccaccaccgctgccgcagcctggctggggagggggccagccccccaggccccctacccctctgaggtgtgggcgggaaagggatgggaggaggagggaagagggtgctgaaagcgactaggatgaggggaaggggagagattgggtctgggagggccgactgggggagagggttgctggggaaaggagaggggccgactgggaagagggttgctggggataggagaggggacctgagagggaggaaggatggaagagacctgggagggaggagaaatggaaacccttgtgaatttgggactgggagcgtgcacagggaatcctggagagggaattccctacaccttccccaattccttttcttgccctttgaccccacatgactcttgaagggtcatgaggggagaaggccagcagaatttgcctcttaggaatacccttaggtgcctctgtttccatctaggcacaggacctcttgtttctcagtggccttccacactgctagacccttactgacacacaaatgccttatgggagccatgttttctacattgagtctgtgtgcctttgacatgtttaatggcttgtgtgcaactaggttgtcccaatgctatccataggctgtgtagaaatggtgtgttattttctatcagaattgcccattcttcattcttgtgtccatgtctcacatccagttttgacatgttttaagtaccgcatgtgtgtgagttttcatatattgcacctgttctataatttcatgttacttgcacattttatgttttggcatgtttatttcagcatgtgaaggttatataccttattttgctttggctgacatgtccatggtcctaccatttgcagtagtcttcatgtgtgggatcccatggcttggctgaataccccacactctgatgtctgactgaattggcctgtttgctgtgttttcccagtcacagttcacagaacacatgtgtatgcgcctttgcatgatacactgatgtaacaggaccatagaatgtgtgttataaatttgtcatcagtatattttgtgagccgtatgctcattaaatttggccctccattgcatttctaaatccttggacttttgttctccaaagagggtcacttaatatcaagtgttaagagaagaaggtaactgggtctccaggtctgcaaagaaccatccctgcatgccttaccttggtgacctccctggcccatacctctctacacaaacattatctttccagtggctgtgtacagtctgtgtccatgagctcaatgcatgtcacagggtcaatcctgctgtgaaccccattgttggtatttatttatggacattatcctccattctttgcactgttggcacacatttgatgagagcagcatctttccctgtggcatcttgatcccattcggtacatttctcttgtgagatgacctcttcctgattattgttactctgccttcattatggctatgtattgcatgtatctattcagagtcggttaccattaggcttggtgtgttcgttactttctcagtgacttcttttagtagtcacttctactcaagaggataactatctaatttgtgatcagaaccgccatctctgtcattaactgtggctctatgggtgggtatacagccttagaatctgttcagcaagtgtttattgagcacctactccatctcctattgtcctggcactggagataagacagagtccctgtccttaagctgcttacagcctaaggagggaaacaaaaacgccagtcaacacatagtgtgttgtcaagatcagtggttcttaaattcaggcgcacatcagactcaccagagggcttgttgaaatacagattgctagccagccacgatggctcacacctgtaatcccaacagtttggaaggctgaggcaggaggatcgcgtgagtccaggagttcaaaaccagcctgagtgacagagtgagaaaaagaaaaacagattgctggacctaatgcccagaatttctgattcagtagatctggggtgaagtctaataatttgcatttctatacttcgagacccgctgatcaagataaaagtgtaaggaaagcacaggcctggaggggttcaggcagccctccaaaaggtgacactgagctgtgtgaggcaggagaagagacaggcattccagccaaagggaacagcatgttcaaggtggggaagcatgaaagatcatggtgtctgaggaactgaagtgaatcagtttgactggaacaaagagttttgtgaggatgtggtcgaagatgtaagcagaagtcaacttatcaagaagagcctttaggcaagacagggaaatgctctgtgtttcagaaaaatctgtgctaacagaaaaatctctgtggttgctacgtggaagatggattggagggagttgggagcctactccacatagttcaggggagaaatgatgctgttctgaacttgtaggggcagtgggatggagcagctcagaaagcctacggtattccaactggcagggtctcctgtttcctctattgcctgttaccttctcgcttggcaataggcttacctttgagcatagcccttcccatcatgggaagacagtgcctgtggcctcagtaggaatgacaggtatttgcctgaacaccctttttgtgaattgttaccctgcccccaacactggggcagagtggaggaaggaggaagaacctagaacacaggttctgtgttcctgcctctcttcctcttgagccctttcctctcccagggcaagtgctgttaggtcacctttactccattccctccttttttcacttggtgaggcctcacacactgtacctgcccacgcaaagtgtcactagaaggaagggaaagggtagtaggattcgtttgcctgtctggaggtaggattggtctttgtagctattccaggtatgtccataagtttacctaggaataggggagctgcctgggtggagagggatttttctagttatgcatttacattcttttatctgtcactgggtgtaattataaatttgtgtctatgtgtgaacatgttagtctttgtatgactgtgtgtctgttggcattagtgacacgaacttttaatcttgccatttggcccttgggtatatggctgtgagtgttctgtcacaatcaccatatatgctgtgtgctgtgttcgtatatatatatgcaatacataccagtgtcagcgtaatggagtggttaggaacacaggcggcttagatttaacctagaaactgctgtttaggagctgtatgacctcaggtaagttatttagcctccctgggcctatttcctataaaatgtaaatagtaatagtactttctagactatcatatgcatcattttaagagtttaacttaatgtatagaccagtactgttctacagaaatataatgcaagccacaatgtaatttttttatggtagccacatttttacaaggcaaaaagagtgaaattaattttagtaatatattttcttgaatctgataacatccaaaagattataatttctttttttttttttggaaatggagtctcactccattgcccaggctagagtgcagtggcgtgatcttggctcactgcaacctccgcctcccggattcaagcgattctcctgcctcagcctcccgagtagctgggattaaaggcatgcgccaacaggcccggctaatttttgtatttttagtagagacggggtttcaccatgttggtcaggctggtcctgaactcctgacctcgtgatctgcccacctcggcttcccaaagtgctgggattacaggcgtgagccactgcgcccggcccaagattataatttcaaaatgtagtcagcataaaagattagtaatggatatctcacattttgttttttattcagtctttgaaatctgatgtgtattttacatttccagcacatctcagttcagactagctgcatttcaagtagccacatgtaggtggtggctactttctcggacagcacaagtatagaccattataagacccttaccagctacaagtgttagctattattcttgttgtcatttattatcaggtatctgtgaattgtagatgtctgtgtcttgtgtctcttgtctgaatatatccggagcctttgggaagagtggtgggagagcagtcctgagctctttctccaccaccctcatcctagagagccttcctggg

SEQ ID NO: 11182 - DNA, 6000 bp, Homo sapiens
accagccatcctattttaaaacagacaaaagcaaaaccaacccaggatgtctctggacaccataaaccaaaatagtcgctggaaaaaacagtgatggtaggttccagatttaagattcataaaatggtaacatttccaaaaatatctctgatgaagacagtcatatgttagtacgtttttaattttgccaagagaggctgctgttttaaaaaagaggatcttttacattgcacgaatttatcttcatgaaaaccttactgcgttgtccttatttttcttattcgcggttgtcccacaaacatttcatcaagaagcaccagtttcctttctgtaccctcaagccacaggaggtagttccttggttccctcctggggtagaaagaagggcagcaaaaagagcactgtgctaagctggcccttccctctccaccccaggtctcaagagtgcatgccagcttcctcccccgacctccaacgcactttggattcagactttgtgtcttgcttcttaggacttctgatcagcctgcatggatcctgcttgactggccatgactttagagagtagtagaagacagaaaagttaatacaccttctaatgaattaccatgtgggtactgatctttcaaagatagtatagaatagtttgttgtgtggtctgtttttaaagtctgttaacatgaagctacagaaatttggaacagaccctttagagataatttagtccaacctcatcattttatagtaaaaacaacaaaagcccacaggaattagctggcttgccccaggtgctgggcctggcactcaagccttcctcctaattccatggctcttcatcatgaactgatgcttctcccatgctaaatccttgtgctcttctttggccatgaaaagcctgttaactctcagtgcttttttatgtgtagaaggtgacaaagcagaaggaaaatggcaagaagaaagataaccaaagaaaaatcagatagaaggcaggatacccagcgtgagtgcagcggctacacccattttttgccatttatttctgatgtcagaccaggtggaaatatcacaaggtgtcttcagatccttgtaatcacctcttgttccctgggggggaatctgtgttgctcgccaagctaaactcttgtgttcaaggacagggaacacaagaattggggtgcagactctacatcacagccctgcagttatcacgggcccattgaggggaggggcccgtgataactgctgggctgtgatgtagagcctgtaccccagttctggggtcctctctgtgacagcatagtgcctactgtgctgcaagtgattctgaggcatgggcacttgtgaagccttcagtttgtgaagcctaattcatggatccggaggattgtacatacaacaacaggaaataatgaagataaagttggactaaattatccctgagcctacagcagtggttctcaaagtatggtttccacatcagcagcatcagtatcacctggaccttgttagacatacaaattctaggcccccagacctactggaacagaaacacccccagggacccatgttttactaactcacccctcaggtaattctggtgctgcacactcaagtttgaggagcactggcttagggaaagcagccagaggcttctgtggggcagagcagggagcctgtgattggcttggtctgggcacttgtgctaggaccaagggggtgacgggctgagggttctgcagagaagcagcgtggtaaaggaaggtctctgagggcagcagcctgggagtgacttttaagcccaccccttaggaaattgagactcaagtcattaaagctttccttttgtttacacttgcctacaattgttttttctcagagcaaacttggctcagcacagcccaaggtaaattatcacagattctgcaactaataaagttcaatgaggactttacatggctcagatgctgttggtgactggctctttcttcttttttagttagtaacaggagtatgggaaggcaaatacaacttcttctgtcagggcacacgcaccgcaggagaatcagatatgaaggtactgtctctttttcagaaactttattattataagtgttgagtttttaaaaataaattgtataaaatacaaaatggcccataacctcactgcccaggcaatccctgttgatatttttaaaagaataaaaaaggcaatatatacacatcaaattaaaatttgaatgtgaaaggtataaaataaaacctaaagcatccccctctgtaaaaataactccggttaacaattggcaggaaaaatcacatgcagtcagtatgttatatttacacaatcaggatcataagagcaatgtcttaaatttttaaaatcattcatccaagtacttttttccgagtagtggtgttaaaaataaaatctgacttccactcatgaggtttgttttaaatcacaggccaacagtcgcagctcagcatgggcagtcatctccttagagcacttgtttgacatgtttaattgggcagagacctgacactgcaggttctgattccttttcttctgtgtcacttatcaggtcggctgctccatgttagtccctgaaatcaatagcgtttttcagatggttttcctttgctaatggctgtgcaggctgcttccagagggaataggcagacttcaaggttttgaaccttgagcctcatgtttttgttagtctcaaagagtgtcagggaccctttcaaaaatattccctgtagtcatttcaaacccctccagctgtcccaacccaatcatgttctttggttaaaggtacttggagagtgaccatagctcccagccactgatggacattaagagctcttggggcactcgggcttctccgagttgacatcagatttttggatattagtgaaacatgtcagaggtgatattccagagaagccgtgaggataagccttaaatctttgaccctttcctcttagattatccgtgtcctctggtggtactacttctccaaactcatagaatttatggacactttcttcttcatcctgcgcaagaacaaccaccagatcacggtcctgcacgtctaccaccatgcctcgatgctgaacatctggtggtttgtgatgaactgggtcccctgcggccactgtaagtattagagacggggacttggggaacaggtgtgagcagggaggagagttgaaactaaggctttcagaaaaggtgctgtttctgtaaatgtctaggtcaggctttcagctttgtgttcaagttgcttttaatgatagtttatgtacctatgcacacaaaacccttttttagttaagtgaactttctgtgctgattgggtgagatgagggagataccactggggacatattaaggaataggtacaatattctctgacttagagggcaactttccaggttctttctggtccttctgtatggtgtggaaggtttgagacgggcaggtgaggaaaataggatcacactgttgcatgagtaccagggagcaaggctcattttgaaatacagctttagctgtcatgcattaggaagtctccacatgttctaacaaccctcatattccctgaagcatggtgatcaaggtgtcttctataacgagcaccaaaacttgatataaattttctaaggttgtacttggtttttggaaagcttgtagtccaaagtttcttataattttcagagattgccaccttcagattcagcctgggagttttagcaaatgtctcagtcaaaagtcccgtcatccaaacactgaagaatttaactgagaacctatgggtctatttatggatatttttttctctgggatagcactgcccttgattacctgagcctgctaagattcacagtgtcatggaattccagagctaggaaaaaaaaaaagctttccaaatacagatcctttgggtttgggaggaaactaagaccacagaaaggtgggtagagttggggctttctgctcttcctcccactgtcagagctcatgatggtggattaactgacctaactttctaatagaaacagcccctccctacatttgaagagtgctttaaattttcagagaactttcaggaggacagatttaatcagctccacttgggccatgagaaactgaaccagggaatggatgtgatgtgtccaaagtcaaaagccagttcctatcatagccaggagtagaaacttccctaacaccaggctgtgcacctgcaactgcacagggaaaagccagatggcttggtttggttgctgactgttggggaggaggacagagtctggaaaaagaactagtggtcctactgaacattgaaaatgatgtgataagatggctcttttatctctaaggagctagactcttgactctattattaataaaaatgtatgacctcagcactgcagtcctgggaaataattagaagatggcttcagagacctctccacaccccagcaaatgtatagaaacaaccatttttgagcatattgcccatcagctgtcttccacagccttcagagagcatatttgggcagttgtgcatgtaaagaaaaacagctgtctctgagagtgggtgggcatctgcagcaaagcctgtaggtgctgggatggcgtcgtggcttcagtgtcagatgcccctctagcagctacagctgacccctgggctcggagcctcctggtggctgcctgcccaagtggaaattgaattctcattacacatccatgcattgcttgctgttgcagtgtttgtcagctccgttggaagtcatctctctttctgattcaaaaagaatcttgtattttttttttttttaccacctgttctgtttaaaacactaatacattctccttcccaaatccctctgttcctgcagcttattttggtgccacacttaatagcttcatccacgtcctcatgtactcttactatggtttgtcgtcagtcccttccatgcgtccatacctctggtggaagaagtacatcactcaggggcagctggtgagtgacttggcctctttccccaggacttacttcctggtggatacagacctcttcctggctttagtgttatgtaatagcatctaagatgccccttctccaccctttttcatttgatgtaattaaattccttgaagtgggtagattagggaattttcttgttttgaactgatagtgaactgtgaccatgggcatacagctagttgaattgtacaaagaggtctagaatctaatttgccaacttcaagttcagctcttctgagtttttgcacataagcacatatgcatgtatgtgtgtatatgtgtgtgtgttttctaattatagtccaaaatccaaaatgaaaattgtatgtttccaggggttttagaaggagctggagagtagtatggagtccagggtatgtgtagcccattactaggcagcaaggatatttgtttggcaggtatggatgacccctcagcccccatgcagtggagcacctgttggtgaggatggcagctgtttgcttcagttaacagctcctcccctggtttactgccagggccaggccacttcacctgatacttctcaccatccttgattaagccttctgcattcatcagtatattataggtaacctctttctctcctctcatgaattcgtctatgaactaattaatactactactgctcatattaaacactgacatttcctaagtgtttagcacatgttgggtactcatactaagtacatgattttacatagattgttccagtagcctgatttcatattattgtccccaagccaggcacagtggctcacgcctgtaatcacagcattttgggaggtcgaggcaggaggatcacttgaggccaggagtttaagaccagcctggggaacatagtgaggccctgtctctaccaaaaagaaaaacacatattattgtccctattttatagatgacactgagtcaataggccaaa

SEQ ID NO: 11183 - DNA, 6000 bp, Homo sapiens; identical to SEQ ID NO: 3446

SEQ ID NO: 11184 - DNA, 6000 bp, Homo sapiens
tctctcaatcttaatagacttgaagtgagagagagggccttgctctggattaggctttggcttaagggaatgctctgctggtttgatcttctatccaggtcactaaaactttctcctccatatcagcaataagactgctttgctttcttatctatcatttgtgtgtttgtgttcactggagtggcacttttaatatccttcaagaactttttcttttctttgcattcgcaactcagctaactggaacagaaggcctagcttttgacctgtctcagcttttggcatgctttcttaactaagcttaatcatttctagcttttgatttaagtgagaaaggggactcttttacttgaacagttagaggccattgcagggttattaactggcctaatttccatatggttgtgtcttgaaataggcccaaggagagggatagagacaaggaaatggctggttggtggagcagtcagaacacacacaatgtttgtcgattatttcaccatcttatatgggtgtgatttgtggtgcccgaaagaaattacaatagtaacataataggtcactgatgagagatcaccataacagatgtaattaataataatgacaaattgtgaaatattacaagaattaccaaaatgtgaaacaaagtgagtacatactgttagaaaaaatggaaccaatagacttgtttaatgcagggttgccacaaaccttcaatttgtaaaaagaacagtatctgtaaaatgctaaaaaaaaaaaaaaaaaaaaataggcaaagcacagtaaaacaaggtatgtctatgtaagaaactgggtgaaattataagaaaggtatctgatttgcatagagcatataattgtcgtatatagaaagaaaaactcttcaaattcctgttgattcaattgtgaacagtataattttttcacattattaaattactcttttagcctgtgactaccttacaattgaatttgataattgggctttgtaatgcatcttattataggctagttatattgcataccatgagaatagaaacatatgttgaaaggagacaaattagaatagacaaaaattattacctattaaaaagaagaaaatgatctcttttcctaaaaaatttatctgatgttatatgaatctcattgagtttacaaactgtaggtattttatcataggtactttataacttggagaccaatttattttttgtttttttgttttgatgtattacacaaagatttcctgtttttttccaggtaggtggttagaaaaaaattattagtagtttgctttagagaaggaaatagccttacctaattggctttaaggtaagaatcattttcattagtaagatggagtttgacagatctggctttgcaggagaaaaatatgtattttagacactttagtgaatattttagcaatcctactttttttttttttttttgagacagagtctcgctctgtcgttaggctggaatgcagtggcatgatctcggctcactgcaaccgcctcccgggttcgagtctttctgcctcagcctcccgagtagctgggactacaggcacatgccaccacgcccagctgatttttgtatttttagtagagaagcggtttcaccatgttggccaggatgatctctatctcttgaccttgtgatccgcccgcctcggcctcccaaagtgctgggattacaggcatgagccaccgcaccttgcctactttcttctttataaaagaataagacttgagtaagcagtaggtcattatactttattgggtaatttccatgaggcatttgctggagtccttataactggtttttgtgtaagctgtcttggttttttaacaatgtgctgtatcaaattgataagcttcataaagtctgtatcataatctcaacatatgatagaaaagccagtgcattgtggtttataatctctgaattttctttctaaatctactagaattatactaaccttagaaagttcatctatatttcacctctttcctgattgtagaggtaattatctctcagctatcacatgttgttgaaaattaaatgatttaacttttccaggtacttctataaaatcagaactattaacacttcaaaggtcttattaataagtgcaagttttcttcaattatttttgttatactgatgccttttccagcaattgtttctcaatttgcaggggtatagagagttaaaaataacttttgtttgctctgaaaaacatctttttaatatattctaacattttaatttggctttatattacagaaacaaattgcaacccaagtctactaagcataattggctacaatacaacaagcactgtcccaaaggaagggcagtcagtccagtggtggcatgctcaaggaattataggactaattctctttttgttgtgtgtattttattccaggtaggaaaaactatggaatttttttctttaaacaagaagtctagctgtttatttatgaatcatttcttttaaaaatgttcttttttttctctcctcctaaactctctttcatacagcatccgtacttcaaacaatagtcaggttaataaactgactctaacaagtgatgaatctacattaatagaagatggtggagctagaagtgatggatcactggaggatggggacgatgttcaccgagctgtagataatgaaagggatggtgtcacttacagttattccttctttcacttcatgcttttcctggcttcactttatatcatgatgacccttaccaactggtacaggtatttatatttcatgaaaactctggatgtgtgaattctgatggcattttatgattctcttgtgaaaccatgatgtgatatgaagtactttttatcctctgatatatttcaaaatgtacagctaaatgaatagtgagatcagcatgagaaatgcagtctttacttccttgctttaacagtaacacaaacattgaaatagttccaaatcttggagagattaaaataaaaattttcatgaaactaatactttttacaaaaatccatgttgatagtggatctaacattttttttttcaattctgtaaagatagtgaagtaaaggatacatccttttttctcttttgtttgaactgtcattaaaagctctgaaaatttttaaatttaagtatgaattcattaatgtagatagattcttagaattcttacaagccacaatttttacaagcttagaattctttctacaagcaacaatttctacaaattctacaagcttagaattcttacaagctacttttttttttaatcacttcaaacttaatccataaatctttttctgttaaaaggaagatagtgatttatagtgtttcatttttgaaagttctggttttgtccaaatgattactgaaagatttggtcaaagattcaaattgaactatgtggtttgggaagttctgtttttaataactttttaatgcataatattaataaacaaattgtaaggcggctctcagtatcagcaaaagatggaggaaaaagattattctttgttgtatgtctttgagtgcagcctttactgatttttattattgaaaagtatatatattttttaattcttacactgtagcgtattaagctataagaatccagctggttctttttttttttttttttgaaatggagtcttgctctgtcacccaggctggagtgcagtggcttgatctcagctcactgcaagctgtctcccaggttcacgccattctcctgcctcagcctcccgagtaccagctggttcttaactcagatccttggctgtcacataatagtagatattaaggctttataccagaaggattttggtatatttcattaactcaaaaatcacttaaacttgagatatatttccttcccagtctcttaattctttctttttttaaggagatatctctgagtcataccagtctcttaattctgagaagggaggggcgggggagggggttgggggagtggaaatcaggtgaggagttccatatacatcttgaacaatcttatgtaatagtgacatctcatttatccagaggtcacattcagttcctcttctgtctaataacatggcagacatgcataaagtgcttcagagattatgcaaaataactatttcagaggcctgtatactttactccattaaaggaaataacagatttttaccttcacactagcagtgtggaaagaaagggagcagattagatgcagcaatgatatatctgaaatcacaaactgtatacaaagcacgcttctgaattaatgaagcttcatagcttggtggctgataattcaacccccttgcccctttttaataattttccctgaaattttaggtatgaaccctctcgtgagatgaaaagtcagtggacagctgtctgggtgaaaatctcttccagttggattggcatcgtgctgtatgtttggacactcgtggcaccacttgttcttacaaatcgtgattttgactgagtgagacttctagcatgaaagtcccactttgattattgcttatttgaaaacagtattcccaacttttgtaaagttgtgtatgtttttgcttcccatgtaacttctccagtgttctggcatgaattagattttactgcttgtcattttgttattttcttaccaagtgcattgatatgtgaagtagaatgaattgcagaggaaagttttatgaatatggtgatgagttagtaaaagtggccattattgggcttattctctgctctatagttgtgaaatgaagagtaaaaacaaatttgtttgactattttaaaattatattagaccttaagctgttttagcaagcattaaagcaaatgtatggctgccttttgaaatatttgatgtgttgcctggcaggatactgcaaagaacatggtttattttaaaatttataaacaagtcacttaaatgccagttgtctgaaaaatcttataaggttttacccttgatacggaatttacacaggtagggagtgtttagtggacaatagtgtaggttatggatggaggtgtcggtactaaattgaataacgagtaaataatcttacttgggtagagatggcctttgccaacaaagtgaactgttttggttgttttaaactcatgaagtatgggttcagtggaaatgtttggaactctgaaggatttagacaaggttttgaaaaggataatcatgggttagaaggaagtgtttgaaagtcactttgaaagttagttttgggccagcacggtagctcacccttgtaatcccagcactttgggaggctgaggtgggtagattacttgagcccaggaattcaagaccagcctgggcaacatggtgaaaccctgtttctataaaaaataatctgggctttgtagcatatgcctgtggtcccagctactgaggaggctgaggtgggaggattgcttgagcccaggaggcagaggttgcagtgagccaaggtcacgtcactgcactctagcctgggcaacagagtaagacaaaaaaatatatatatattgaaaatcaaaggaggcaaaattttgacagggaaggaagtaactgcaaaacactaggctttagtaggtacttatataaaatctagtccagttctctcatttaaaaaaatgaagacactgaaatacagacttaaatagctcagatagctaattaggaaatttcaagttggccaataatagcattctctctgacatttaaaaataatttctattcaaaatacatgcataattgattttacacctcattactggtggataatttatgtgatgtggattgctggtgtccagcatgacccataaacaggtcagaagaatgatggaatgttttagaataaactcctgcttatagtatactacacagttcaaaagatgtttaaaatgcttttgtatttactgccatgtaattgaaatatatagattattgtaacctttcaacctgaaaatca

SEQ ID NO: 11185 - DNA, 6000 bp, Homo sapiens
tttattatttattattattattaatttattttttttttttgagatggagtctcgctccgttgcccaggctggagtgcaacggcacgatttcggctcacagcaacgttcgcctccctgattcaagcaattctctgcctcagcctcctgagtagctggtactaccggcgcccaccaccatgcctgactaacttttgtatttttagtagagacagggtttcaccatcttggccaggctggtcttgaactcctgacctcgtgatccacctgccttggcctcccaaagtgctgggattacgggcatgagccactgcgcctggctatttttttttattttttatttattcatcttttgagacgcagtttcgctcttgtcacccaggctggagtgcagtggcgccacctcggctcactgcaacctctgtctcccaggttcaagcgattctcctgcctcagcctcccaagtagctgagattacaggtgcccgccaccatgcccagctaatttttgtatttttagtagagatgggggttccaccatgttggccaggctggtctcaaactcctgacctcaggtgatccacccatcttggcctcccaaagtgctgggattacaggtgtgagctactgcacctggcctgagatgagaatttaaaataatgctttgggttctgtgatctagacaacaatttcttttgttgctaattagatgaaaggtatagaaagtaaaatgattgggcccccggagaagcaggattttccccagggaatccaacaaatccagagaatgtctttgttacgggaggattgttgttttagttaaagatgtgctttggaaatgtcttcttccttcatgttagtatcatgatcattatcatgttaaaaaaaaaaaaaaaatttacaaaccacctggccacccagagcagaattacagtcagcactctgtttccccaggtcctgaatccttggattcaaccaacctcagcactctgtttccccagatcctgaatccttggattcgaccttgggcgggggaaaaagagtggttgcttctgtactgaatatgtacaggctttttttttttcttggcattattccctaaggaatacagcataacaactgtttacatagcatttacattgtattcggtattataagtaatttagagatgatttaaagtacaagaaaggctgtgcataggttatatgcaaatactacatcatgttatatcagggacttatgcatttgtggactttgtatcctcagaggtcctggaactcatccctggaacagggacgactgtacttaatacgctgtccaaaatgaattggactgccagcattctctactttttcatgtattactcttaggtcaggggaaaaaacaaatctctgtattttataattaagaatgaatccctgagtcatttgacttcttcaatgacagagcaagccacgtaaaaatacccttccaaggaaagccatcagggagcctcagaatgggtacagtttcaccccatttacctaaccttttctgccagtgcagctgagcctctcaacgcgactttaacaaactctctctgagccagtcttctcagtgccatctttgctttcattcaactttacatgtctagtgttgctgctcaaacctgtgtcccctcaagtcctttcccaactaaaggatggtggttaattgacaatagacaaacaagtctcagaacaattatgagggtgtaatgaagtgtgcattcgtacatgcaattaaatagaggaaagatgcaggagggaatgtgtacacaatcctcctccagctggcacgccctgcctggaggtgctcctccactggaagcctgttgtgtgctcctctggcaaggagatgaagtcccagatttttagtgcctcatgcaaggtcttttccacctccttcactagttgacttagcctggcatgtagcaaactctcagtgtcatctgcctccaacacagttttccccaggtctttcgtaccttggccttcacatgggaagccaagagatgctgagcacatggaggagggcaatcttttccccctttgattattatttttttaattcattgagattctaagtcctctgtcatttcaaagaaaggatactctctttcctttggagctatgttctacatatcatcctaagtggaaaaaaatcattaaataggccgggcgtggtggctcacgcctgtaatcccagtactttgggaggccaaggtgggcggatcgcttgagcccaagagttcaagaccagcttggccaacgtggcgaaatcccgtctcttctacaaatacaaaaattagctgggcgtggtggcacatgcctgtaatcccagctacttgtgaggctgaggcaggaggattgcttgaccccaggaggtcaaggccgcagtgagacatgatggtgccactgcactccagcctgggtgacagagtcagacactgcctcaaaggaaaaaaaccaaacatacctcaaataatgtctgcaaaataaaagactatgaacggaatatggagaaagcctctaagatggccccaggggagtgttaacatgtctagcctgattaattggctagtttgggaataattctatccaaagtgagtgacaaggcatggctggctagtgtcaactttgtcctcagctatagttaaaggcaggcctggagggctgacttgttcagtctcagtagcaaaaaagtgcatggtgtctggataagcaggttgtacagcctattagaaaagaaaggtaacagtcttcctctaatgcaataagggattttttttaaagttctcctgtcaagattttttaataccagaatctgagagtggagaaaattggcccaaggacagacaaaagagctgggaggaaaatcgactatatttttcaacacacaatgccatttgaagtactggattgagtacggaagtattacgaacattcctaatttggttagtgtctatatttcttaatatagtaatgctattaatgtctgtctcctaagtttgtataaatccaaacccccatgttattggccagttggaaacaataatgtaaacagactctgttgcccaaattaagttatgtgcaccgaatgctttgtcaaactgtaactattttaatgttcattctaagccacaaatctttgccaaagaagatactgaattactctcttttgtttaggagtagaatacacaataacctaatatttaaaagtattattcagaagaagaaaaacttaggattgaatttttctttatcataaattttagatcattctctttgctcgattccatagaagacactaagaattagactgaactgctttctcattgtattgttttctacttgacctaaaaatccaggggtgggttatatagagagtttatttaggagactttggtaagggagagagaaaaataatgtacaagctggaaacgcatgaaaaatgtaaacaatgaaagttagaagaatggaagcgacagtgtgctcaggaaatgatgtgtcatttggtcggagttcagggtgcccctgaatcccaggagggtagcacttgctttcctgcccattgtgaaggcaaggaatccgcgtgttgtcctatcaattccattcatggcagggtagagacttttcaaatggaagaaaatgtgcattaaaggacattctttctgcatggggtggggtagtgaacgtgttggggttgaggcacggagttgtttaggtcaggtgaatagtgaggggaaatgggcaggcagtcaatggttaagttggtgttttgcaagccattttaagaggataccaaataaaatgcattaatctacatttcattaaaaattagttggtgggaaagtggaaagttgaagatgagaactttccaagtaaaacagcttcatactccttggccagaacaccactatatttacaaataggggataaaaacacccacttcctaggtggtccataagcttaactgggcaggcatatgacacttctgagcatttgatgccgttctctgggggggttaaagcctgaatgcccaccaaatcccctgtctgagcatcatttgtgaccaagattcaaattatttcccatgaagctctaaggtctcatataactcagtggatgtagctcacgacttcttcttttgaccccagtattctaagacaaacaccacagccgaagctggaagtgagaggagaggggttcgtttcagagtcaggagcccaaggcgccccagcaatttcagaccccctgggacaggaactcctcctccagtaagctcttgttttgaaaaacagtggggtggggccaaaaaagcattacaatggagctgggatggatgaggctttcttttatttgagatgtcacttgtgtcacgtttcctgaaacagcacgttggaaaacagaagctattttctatcccgtgggttgcgctggaagagctgagaggccaggctgtggatccttgccacgaacaacaagagagggcaagtccagccgcctgctaggggactagcaggaagcggcacgcctgccagagctcatcacttcaactctggctttcactgcgctcattccctgaatggcagtaaccagggggcgggggtggcatgggaaatgaaagaaagagatatgggaaactaaatctgccgggggaaagagagttaccggagttttagcaaaacagctagcagatgcaaacggggaggcagagggaggagggaaggctgggcttcagcaacctgccacggggatttaaacaaaggaggtttgagagaggcgggatctggctgtaatatcggcacagggacagagacagcagctggactctcgggatgaaacggaatcgattcccagcgtctccaacagggcaggagtgagtggagtatgttgcaaaataagaactcagagaaacgagtgagtttggaaaaaagacttacagattttgacggtctcttgacatttcacccttctttgaggcatgcctttatcaatgcgttacctcttcataatttctgtctctagtgtaattatttttatcgtcttctctgtgttcaattttgggggagatccaagcttccaaaggctaaatatctcagaccctttgaggctgactcaagtttgcacatcttttatcaatggaaaaacacgtttcctgtggaaaaacaaactaatgatccatgagaagtcttcttgcaaggaatacttgacccagagccactacatcacagcccctttatctaaggaagaagctgactttcccttggcatatataatggtcatccatcatcactttgacacctttgcaaggctcttcagggctatttacatgccccaaaatatctactgtgttcatgtggatgaaaaagcaacaactgaatttaaagatgcggtagagcaactattaagctgcttcccaaacgcttttctggcttccaagatggaacccgttgtctatggagggatctccaggctccaggctgacctgaactgcatcagagatctttctgccttcgaggtctcatggaagtacgttatcaacacctgtgggcaagacttccccctgaaaaccaacaaggaaatagttcagtatctgaaaggatttaaaggtaaaaatatcaccccaggggtgctgcccccagctcatgcaattggacggactaaatatgtccaccaagagcacctgggcaaagagctttcctatgtgataagaacaacagcgttgaaaccgcctcccccccataatctcacaatttactttggctctgcctatgtggctctatcaagagagtttgccaactttgttctgcatgacccacgggctgttgatttgctccagtggtccaaggacactttcagtcctgatgagcatttctgggtgacactcaataggattccaggtacgtacaattccatatttcatgcaaaagaaatgtgtcgtatttgaaagggctttagaataaccagccactttttattag

SEQ ID NO: 11186 - DNA, 6000 bp, Homo sapiens
gattctcctgcctcagcctcccaagtagctgggattacaggtaaccgccaccatgcctggctgatttttttgcatttttagtagagacagggtttcaccacgttggtcgggctggtctcgaactcctgacttcaggtgatctgcctgactcgggcctcccaaagtgctgggatgataggcatgagccactgcacctggtgccctatgcaaactcttattttattattattattttttgagacagagtctccctctgtcacccaggctggagtgcagtggtgtgatcttggctcactgcaacctccacctctcaggtgcaaacaattctcctgcttcagcctcccaagtagctggggttacagacgcgcaccaccacacccagctaatttttttctatttttagtagagatggggtttcaccatgttggctaggctgatctcaaactcctgacctcaggtgatccacccacctcggcctctcaaagcaaactcttaataacaactgttgtggaatgacttgggaggtggcactcagagatcccaagtgacacatgagaagtccacagagagagatcatgtttagtggagtttggatggttgcttttatcagtgggcctgtaccttacagatgctatctcattatcttctaaacagactctgggccagtgaccattatctccctcttactgatgtagactcagccaagagaagccagatgttgagtcggaaccttaactctccctctcagacgcagagccctgctttctcccctcccatttgatactctgcttcctcttgcatgctgtgagaggcggcctcattactcctcttccctcctccagtccctccaagcctaattcatcacctttggctttgggatcatagtttccaaaccaaggattgtctgaacattgtctgacaatgccctttttttttttttttaggcagggtcttgctctgttgcccaggctggagtgcagtggtgcaatcatggcacactgcagccttgacctcccgggctcaggtgatcctcccacccagcctcctggtgcgcatcaccacatccagctaattttggtattttttgtagagatggggttgtgccatgttgcccaagctggtctcgaacttctgggctcaagcgatcagccctccttggcctcccaaagtgctgggattataggcatgagccaccgcaactggcaccattgccattggtatttaagaggtgatggtttaggctttgaaattggggttgtttgtgaaaactgagagcaccttttgttttcagatatttcctatggccattggtgtaattggagggaagctctcgccatatataatatttttgagacagccaactaagaaactgggattctggttctctccagggtgcaaaatcctgggagaaggaagtgaattctcaggggcccagaaggagtctctaaaggacctctgccagtcaattctaatctctcttctcccctgcaaatcagcccctgcttctgcctctttctccgcctctcctagattctccccctctggagggcctgagctcccggccaccacccccaatgccgctttctgtttcctctgcctcccttcatctccttttgtctggggtttctttgtctggggtctccctttggttctgtttcacagttctcagcctcccctccctttctccacagccaggctgctcagtccctctctgcgggggcctagaggctcggtgaggggagcgggacttggttgccatggtcacattgaagccagccgcagctggcccgggcagctgctcctcctgggcccggggccccggacgctcggacaaagccaggcagcgttggcagccccagacccgaccccaaaggcctgagactggggtgactgggacctaagagaatcctgagctggaggtgagaggggggaagccagagatgaactgggagggcaggagtgggcactggagctgggccctccccttgtgggcagggaccaggcggtccccggctggaggctggaggtgtgttgggaggaggggagcggcccagagcctggcagggaggaggggaaagagagggaatagagttgggtgccatggtgtggtgaatgggctgagggactagggtgtccccaaagggggaccgttgtccagaaacaggttagattctctctttggtcctcatgtccccatctgtcccgcaggtgcctcttcctttctcagccttttatacttctcatctccccgtgtcccttagcttcacactctgcgccccagtctccctcctctttccctccactctctgtttcactccagccccttcttcccttgtccttgcttcttgtccccttgatctgtctgcccagctctcaagcctcctcagttccctgccttcctctcttaggagtttgtttccaacactgtttccttcccgagtccacttcagttccttcatccagttcagcccttttcttcccaaacttcagtctcctcctctgagcccctggggcttcccaccttttgctgtgtgtgccctgtcttcatcctccttttcctctctcagacctgtctccttggccttgacctcagtccatctccgtctctctgggaattctctcaccattgtccccatctgaccatcagcctcctctccctcttctggtcccttgcccttttcttccccaaccacagctgagctgtttcatctctctcccagagctacgtcatctcaatctcctccttcgctccctggcctcagtttccagtttattcagtggcatcaggtctgactcacacccaaagccttgtacactccttcaccctgccccccacccgtcgcttcttactctccccagctgctgacccagcctgctcctccagaggcagctgcagctcccggaaggggactgcagctagtgtatgtgtgggggcccatctggtccgtcctctcgctcgctggtcgtgctgggcttccctcctgtggccaggtggtctgcaggcctgaagctgccttctcccctctcctacgtgcctctcctcacattttttcagctgtttcccatcctctccttcctgggcagcaggctgccactggcttgaaggggagggaagcccaggatgggaggggatggtagagggtcatttgggggttctcagggacacagggggcctctggggttcggagtgatgcaggagatgtggaatgggctctggggaccacggatgggtaatcaggccctcttggtctttggtgctgctctctgggccccaggatggctgggatttccctctcaggcccctgggaatctcggctccgagtcccgcattccagctggctccagctccctttccgttgtcacttgactccactgggccccagccttgcatccctcccactcctccagcctagagctggggcgaggtgggcatcaccactaggaatttctcctgaggcagtgagaagaggggacaaaggtttcaggactctctagctccttctgctctccccagtggacccctctgtctggcactgccatgccacttagctggggtcagcgtgggcctggggtgtggaatgtcccaccagggtatgacgggctgtagcttgcctggcaggcctgttggggctttcccagagcacagctcctggaaggaggggctgtgggctgccaggtgaggtgacttgggaagccttggccccacccccaggctggccccacccccagtccagcgtctcctgggcctagattccccagctgctgttctctggaggggtaggtgttctgggggaatgaatccctgggggcttggtgggacaggaaggcgggaagaagctgctcttcgagtgaccctggggctgtctgttagcaggtccctcagccgttggaacgtccttgggcttctgaactagtgcccatgtgtgcctcggcctttcccaagggccagcttcttcctggtagtgcttttgtgtacttgtctggttgggacttcgtgtttctttcttgggattgttgtctgggactgcaagcagggtatgtttttatctactgtgaggttcctggggcggagatgtgcagtggagcgagaacttcctgtgaccgtgacattgtctaggtggtgagcaggtgtgggggtgtggagagaggtgaggggctgaggtagtgctgagtggggaaaaagcacctcccaccacaagctgttctgtcccgctccatcctctgcccagtagctctctcagttgctttgcctactcagtctcactgtttcatcttccctgggtctcttggtccccttccttttgactgtgtgtgattttcagtgtgcctccatccttctcctgctcctcttcttcctcctcccgaccactcaactttgtcctggcctcatttttggcctcttctggccagtgatcagaccctctggcccactacggccagagctggctgggcctgagggaggcttgccctgaggactcctgagtccccctcccactccactccgttgggagcccaggggaatcagggcctgggcgtctggacccccgggtcccttagaacgcccttcagagagaggaactgagaggagaaggagaagagagtgggcccgccttcagggtctggggccttccaggttgggtcgtaggggcgggagcgcacaggctgcgagagaggagcaaaggttggtggagggagaagagcagtctggggcctggctggacaggtgagccctgagacctgagctctgctcccttctctgggctaactcccgcagctgggctgggccgagcctgtgggaacctgcttcttcctctgtgccctggggctgctcccctttgcctctcccaccaggaaccgatcccagaagtaggaggggcgtcttcccctcgtgggccctgagcgggactgcagccagccccctggggcgccagctttggaggttctcgtttggggaagcgggggtgggctgcgagtgggtggagggggctgggcgcggagccggccggaggcagcggcgcgggcggctgggcggcctgggagcgcccaggcgggcttggcgggcgggttacctgggggaggccgggccgggcgctagcgcgcggggtgggcgtggcgggcgcggggcctggagctcggcgccgggcgtgggagccactgggactactgggtccgggagggggaagggagggctgcgagcccgaacgcgcggcgagaaggccgaggggagggaggggagcgaggagcgggaggaggaagggagggagccgaggcgagggggaggcggcgcctgggcccgagccgccccagccctggctcctctccccggaacaggcccccgacagctgctctcgggagccgcctcccgacacccgagccccgccggcgcctcccgctcccggctcccggctcctggctccctccgcctcccccgcccctcgccccgccgccgaagaggccccgctcccgggtcggacgcctgggtctgccgggaagagcgatgagaggtagggagagcggcggcggaacccgcgggcggaggcctggggctcttggggtgggggcgcgcggcggcgcctgcagggcgaggggcgggggaggcaggacgtcccgagccatgcttggtcgtccagctcttctaagcctccctgcccgcctccccgatgctctggcataccgtctgaaaaccgggggcggggactgggtggaggtgaagcccgtgacctcccagaaagagttttgagcctccagccttgaggcaagtcccctctcactcagtgcggaggaactgagccccgggaggaggtgctcctgtgcagccccactgagtcagctcatctatcgcctgccctccacctggccagtccctgcgggcatctaactgctaagcctccgctcagccaacacccagttggtcagtctggtcacagtccagcaaaaagagggactgccactctaacccaccagtgacaccactcttcccggctggatggtcaattagct

SEQ ID NO: 11187 - DNA, 6000 bp, Homo sapiens; identical to SEQ ID NO: 2443

SEQ ID NO: 11188 - DNA, 6000 bp, Homo sapiens
aattattaagcattttgttgattatccagcatcggattttacccaaacctagctttctcccttgtcacatcaaccaaccgtcacttttaattaggtcttagaggaaaagaaactaacattaactgagtatatgacatgtgcaagtctttttccatattttattcaattctcacatcaaccatataaggcagctgggatttggacccacttctggccatccataaagttcaatctctttctgctgtattttgttatctctgtcagaaggggaattccatttataataacttaagcaaaatttaattatgagagtgaattttcatgctagctccccttgtcccctactctcacaaaaacctaaagaaaattaaaacatcaggtcaggcgtggtggctcacacctgtaatcccagcactttggaaggccaaagcgggcggatcacttgaggacaggagttcgaggccagcctggccaacatggggaaatcccgtctctactaaaaatacaaaaattagctgggcgttgtggcgtgtgcctgtaatcccagctactcaggaggctgaggcaggagaatcacttgaacctgggaggcggaggttgcagtgagccaagatcccaccactgcactccagccttggcaacagagtgagactcagccttaaagaaataaataaataaaatagaaaggaaaagaaaattaaaacatcaaaatgcaaacaatgtgagaatccactaacaaaccatttataaagccccaggcctgtgaaaagacaccatcatgaaatggtgaaaggatcccttaggtgagccaaatttctgcttcaggtcttaaatttaagctactatagttttatttccttaaataaatttttatttatttaagggaaggagtagagtttatttcttcagtctttgtaaataacattattccaaataataagcagtgacccaaaatactggtttggattgaatcaaaatatgtcattttgccctggcaggaattttcctatgcatttattttctgattaaagttatggtggccctggcagacactcttccagagcccccacataagtacacacatttatgacaagactagacagaaggaggtagaaatcagttggaaagaagacaggtgtgaaatgtttaaatgattacaccatagttacagtaaccccagagagtgaaataaaagataccatgaaaagcgttatggttaaatataaaatgagtatattaacttggaattcaagaaagcagtgttctttcagtaattttcttcatgtaactttgaagatggataggagaacttaaggggaaattaaaaaacattccaggcaaggtattcgggtggcagaaaaaaaatacagggtatagcttcaattaacagtatcagtaccttgtattcacagagagttgcagtttacaaagtattttggtagacattgcctcatgtcttctgaagagggttgttgtaaggaacaaataaggaaatttaggtaatgtggtatcctgggaacagtgatctgattttaggcatcagtcacattggtatctggtgggagatggaagacacacaggaaaaggatgaagataattagaattttaaaccagaatggtagagaatggaaattgaaaactatccagaatattgacatatcaggtatgatgctgggtggcagaagaggccagggtatgatgatcagtcacctctgcatacccaagcctgacagctgcattgcccccattagtcaggagccaagtcttagcctgggacctatatttaggcccagagctggttagatctgggcctctggaagccccacacctgccacatagtaggccatggtagcgtggtcaacatgtttgtggaagtaaagcaatgtggctacacccacaccaggaggcattgggcttaattttattctcaagggttgcgtgttttaaaggaaaaccttaaatctaaagacctaggttgagattaaagttgtgttcatttttagtcatgtgccagaggtcttgaacaagtcagcgtttctgttttggggcaatgatacataattgggttgttaaaaggattaactaagattctgttcagtgctgtgtaagttataaatgttatagaaatatgaggagttggccgggcgcggtggctcacgcttgtaatcccagcactttgggaggccgaggcgggcggatcacgaggtcaggagatcgagaccatcctggctaacacggtgaaaccccgtctctactaaaaatacaaaaaaaaaattagccgggcgtgatggcgggcgcctgcagtcccagctactcgggaggctgaggcaggagaatggcgtgaacccgggaggcggagcttgcagtgagccgagattgcgccactgcactcccgtctgggccacagagcgagactccgtctcaaaaaaaaaaaaaaaaaaagaaatatgaggagttgttattgtcaactaagtgcaacagttctagaaagctagcatttctgagttaaaaggttttataacttgttatagacttaattttcagtggggagattaaaatgtgacagatggaagaattgcttggacaaaatcatgtagctcattttttggcagattcaggattcctagttgatttttcattattagtttgcctttccagtggtttctcagccccactgtgctgccttttcagatcctgtggaaaagcacataaaggataagaggttaccttctaatgacaatacaaattgaagactgtccgtttagcgtttataatatgtgcagcctattacaaattctataaaataatgatgcaagtttcacaaagagataaacttttaaaaatattttcaagtattatatttttaggaacactgaataaaaatcttaatatacaaatcctctcttgccaacataaagttatatgcatttgtgatcttacatgtgatacagtttattaaagactggaaagtgactgatactcatttaagggtttctcttcatttatagagtcaataactttttttttttttgagacggagtctcgctttgtcgccctggctggagtgcagtggcgcgatctccgctcactgcaagctccacctcccgggttcacaccattctccttcctcagccccccaagtagctgggactacaggcatctgccaccacacccggctaattttttgtaattttagtggagacagtgtttcaccatattagccaggaagaacttcctaacttacatcatggactgtcacaacctggattacaagatgttatttatacactgacaagttggagttttacaaaacgcgatttgtaatataaactagttagataactcagagggttttattggccatatttttgtttatgctttgtcacaggctttagtcattgcttccatgtgttttcatccttcaggatatcttcaagaagcctacttatggaccaaacaagttctgaccatcatggagaaatctctggtcttgctcagggaggtgacggatggctccctctatgaaggagttgcgtatggcagctacaccactagatcactcttccaatacatgtttctcgtccagaggcacttcaacatcaaccactttggccatccgtggcttaaacaacactttgcatttatgtatagaaccatcctgccaggtatagtgaggagtcagaagtgtgaaaacattaaactattgtaattttttctgattatgaaaatgagctagactaggcagagaaattaggtccttagagtttgtcatattgaaattaaatagatttttttaatcaaagaaaaattgaattcaagagttgcatatagccagaacattttggaggctaatgtgagtatttatgatttaggtattataaagtttggagggttatggattaaatacaatttctaggcccctcaatactttttttttatatatccaaacttgagtaatatacgaactcatcttcatcattgcaagcaaaatataaacatttgtgattacctgtcagttttcctttatatgtgatccctgatcaatcctattttaatttttggttttcagttttttctttcaaactatacagacatgattcaaaatgaaagattacacctacacatttaagttggagctttagtattgtaatattttattgaagtaaatagtatagaaaagtaaacaaaaaaagtgctgtaaaacttgtaatttctttattgctgtgtcatttagccttctaagagaactagctctaaaaaaaatatatacatgatttaataatgtattcatttccagagaactttgtaacctttttttatttctaaaacaggactaagatgttagaacaagttataaaggaaaattttatcaggatagattcccccccttccccaaggaaatgcaatttttagatggtgattctagacctacaacaaataatatagtatttaaatcttttggctctggtagtatacatacagattaatagaatctccattattggactaattcaaaaatattgcagagcataagaaccattttaagatttagtttagacttacattcaaaaaaatactgctttgttgctttttcttagacatgcaggagaggcctgttttgcaattcatcctagtaaacaaaggctacctgaagcaagggacctttaagaggtttcagtgctttgtaatttaagctgagatctaaaggctaactacatcaggaattgtgtttgctgtgagctgtgtctgtggctacttcctaaagtggaaaagacagtatgaacatgtctaagagcagcatttatatgtttgtgttaattaaacaaacttttattgaacatctgtgtgccaggcactgtagtaggcagaggattcaaagaggaataaaacacatctcctgctttcaaggaattcacagactagtagaagattcagaaaatatcattttaaaataaggtatacttacaagatcatttactaaattattaggaacaaaaacattagctgtaaattacataaatataattgtggtaacattttagaagaggttctatgttaaagcaatctgttttcaacttcatttctctctttttttttttttctacagttgatactctagtagcaatttttttgtctggctgagttttctatcttgctgcttcttttttcatgaacacgtggagcatatccagtcttacctgcttttatttttcttccctattccaaaaatgatatatggctttatgatccttgcattttctgtcgtttaacttccagcagtacatactggcaggagctactccgggaattaaattttcttcctgtagaaactcagtctctcccctgaacttcgtatatagtataacttacactttattgaagccaaactgaagcatgttattttattatcttggcctagaatgcatgttgagttgtgggagagctagtgttcattccaggttcagaaacccaaactgcacaagaggatgtcccatgtatatatgcaaatataatcacgtatagcatgaacattggaaaatgaggaaggcagggaataggtgtagcactaatgttaccaaggacaggttaccacataataaatacaagcttgcacacaacatatgtggaagaccttttgagggattctgactaactggtctggaataaaatgtgaggattgtgatttttcttttattttatcccttccattacacaattctaatttgcaactagatttgaaaagtcattgtttagacctatataggagtgtgaagttttcaaagtatcttaattctttccaacttatttccctagggtttcaaaggactgtggctattgcggactcaaattacaactggttttatggtccagaaagccaattagtgttccttgataaatttgtcatgcgtaatggcagtggtaactggctagctgaccaaatcagaaggaaccgtgtggtggaaggtccaggaacaccatccaaagggcagcgctggtgca

SEQ ID NO: 11189 - DNA, 6000 bp, Homo sapiens
gcccatttttaattgagttgtttgttttcttatcactgagtttttagagttctttttatattctggatgccgatgatttatcatgtacctcacttgcaagtattttcaagtttatggcttgctttttcattctcagcagtgtgtttcaaagagcaaaagttcttaattttgatgaagcccaattcatttgtttttcttttgtgagtcctgttttttatatggtatctaggaaatcttaattctcatatatggtttgattatggcttaaggttaactttctaaaaaatgtatgaatatccaattatttcagcaacatctgttaaaaagattatcctttccatagtgaattgctttggtatctttgtcaaaaatcctttgattatatttgcatgaatctatttctgaactttattgtgttctacttagtgtgtccacccttttccctatatcactctgttttaattactgtcactttaatgctagtcttgaaatcaggtagtgtgtcttttaactttgttcttttttcagacttgtttgagctattctggtgttttttgcctgttcagctagtttatttctgtaaatctgatgttgggattgtgattggaattgggctgaatctatagataagtttggaaagacctgatatcttgaaaataattgtcttccaactatgaactctgtatattttgccattcatttaggtctttgatttctttcaccaatgttttgtagttttcattatttgagatcttgtctatgttttgttagatttataactattttctttttgttttcagttattactaatacgtagaaacatgattgtgtatattgactttttatcatgtgaccttattaaaccgatgagttagttctagttgcatttttgtaggttctttgtggggtatttttattgtttttatttgttttgttttgttgtcatccagactcgagtgcagtggcgctatcattgaactccttgaactcctaggctcaaatggtcctcctgcctcagcttcccaaattgctgggattacaggtgtgagccatggtgtatggccctctttgggattttctatatagacagttgtgttatatgtgaagagggcagtttcgtgtcttccattccaatttttatgttttattttctttcttgcctcattatattggctgggacctccagtgtgaagttgaattcaaatggtgagagaggtattttgccttgtttgatgtcttacagggaaagcattcagactttcgtcattaattatgggtgagagctataggtatttgtaaatgccatttatcaagttaaggatgttatcttctattctttgctgacagtttatatcatgaataggtattgaattttgtcaaatggtttttctgtatctattgagatgaccttgttttttttctttagtctgtttatacagtagaggtcattggttgatttttaaaagtggaaccagccttgcttttccaggctaaactctacctggtggcaatatattatcctttttatatactttcatattgctgtttttgacttgctaaaatatcattaagaatttttttgtgtatgtttatgagggatatcggtctattattttcttatgatgtctttggatttagtctctgtaattctggcccatttttttaaataagaagaatatgtctctttcatattcctttgtatgcaaatccaaatttctctctggtataattttctttcttggaggatttccttcaacatttctggtagtttaattctgcttgtttggattattttgtcttttctattcctgaaaatgtctttattttgccttaatttttggaagatattttcactgagtataaaattcttttttttttttattatactttaagttttagggtacatgtgcacattgtgcaggttagttacatatgtatacatgtgccatgctggtgcgctgcacccactaactcgtcatctagcattaggtatatctcccaatgctatccctcccccctcccccaaccccaccacagtccccagagtatgatattccccttcctgtgtccatgtgatctcactgttcaattcacacctatcagtgagaatatgcgtacaaaattctatgtttacatatttttttctttcggtactgattttaggcttgaaccgtttcttactagaagtgtgatttatttctttgttcctcagtttataatgtacattttatttttctgcctacttttaagatttttctgattattacttttttaagtaatttgattatgatgtgacttggtgtggttttcatgtttattttgctagggctttgttgagtttcctggatctgtgagtttatcgttttcataaatttggaaaaatttgggcaattacttcctcagaagcacctttgtgtcacttctctccaattgaagttcatttcagggactctaatttcacttatattaggctatttaaagttgtctcacaatgttctgatccttttcttatttttatctctctttcattttggatcatttattttcttatgtcttcaggttcattattaatcttttcttctgtcttgtcaatatttagggggcttattttatcatctggagaagtatgatatgggtcttaattttaaattatcttccatgtctgtccgtaacattatcaagttttcctctacttccttgagcatgtgatatatacttaacagtaatactacaatgccctatttataaatgaactcagttatctatatcatttccaggttgatattgactgattgatcctcattataggttgtatttttctggtttttgcatgcctgctaattttttgttagctttccagtgtaaatttttccttgatcagcgctggatatacttttattttcaaaaaaatattcttgggcttttatctttgacttgggtgattttacttagagacagtgtgatctttttatttgcctttaggtttcgttaagtgcaactagtgcagcctttagtttgatggctgatttttctccagtattaattgccttctgatatctttacccaatgcctcatggattacaaagtttttcacctctgggtggtaaaattctcagaccctccctgcagtgaacattctccctaggcagaaataagggccacttggctgggcgcggtgggccacacctgtaatcccagcactttgggaggccgaggtaggcggatcacctgaggtcaggagaccagcctggccaacatggtgaaaccctgtctactaaaactacaaaaaaatacaaaaattagccgggtgtggtggtgcacgcctgcaatcccagctactcaggaggctgaggcaggaaaatcccttgaacccggagtgggtgggggaaggttgcagtgagctgagatcgcaccactgcactccagcctgggtgacagaaggagactgtgtaaatcaatcaattaatcaataaaataagggccagtcatagggctcacattgtctcctcttagaaattgctggctttacattgcctgttgttcattgtctgaaaaacttattttttccattgtttaagtcaggaggataagtctggtcatggtttctccatcttgacctgaatttatagtaattatcccaagccttttttcatcagtaattttatgtttacctatgtctgttttgtttcttgatagttactagttaagtccgttttttcccttctcatttctttagccctttgatttccactttccattgtgttctgttcttacttcatttttgaggtctccttttttaacaaaaaatattttttatttttctgtagctcaaatgaaatactggtaggggatttccttttcttactggattatatttatttcagactgaattcttcatatgccttatattttcttcattcctttttctgaggggagatgtttatgtttaacttttgctaaagtatatttacatagttgccatgacatgtatttccgttttgtggacgtttaatataaagcagctttattcttaccttatattggttggtgtagtggtctggcttctacaacattcccttactgtgatatctaagactcttttcccctagagctgtaattctagggctggaagatctggttcatccaccttctagaagtctgacatctcagcccaggttatgatattatgagaatatttactctgtggctttcttagatactgttaaatactctgtaccagtgttcctctctcctagacaggaagatattctgttcccttgggggcatactgctagtttagtgtggtggttactggagaaaagctagccccagttgtattattatcctttttgcctcactctagttgtagttttcattattatcactatcgccaggtcaaaagaaggaaaatatatcaattcacttttttttccctccctggatgtatttgagaatcctcggaattttttgtattcatcagtctagtatctgggggctaaaggtcaggggctggaggtgggcttagcagctgtgctactcatgaatattccatttcttttcctctttaaactttggttactgctgatgattttttcccctttttgttttagctgatttgtccgttttacttggcatagagtccaaggattttttttgtctttactccttcttagaagttgctaagttttgtggtatatagataatttatatgaaccaaataccgtatgtcccttgatgtaattacttttagtcttttttcttttttaacagatagaatgtcaattttcattgtatcattttaagatatagtgatttactgattcttaataatattttcaataatattctttttcccagataccatgtttgtgtggaagtgccccgtgtttgctatgccgatgctgtcctagtggaaacaactccactgtaactagattgatctatgcacttttcttgcttgttggagtatgtgtagcttgtgtaatgttgataccaggaatggaagaacaactgaataaggttagtctcgtttcttatttattgattaactgaggctatagggtatatatgtatatgtataaaattgattcggggatattgtaaacagaataatatagaataagacagtatgtaatcctagttgtagttcataatcttttaggaaaaagataatatacattagtttgttaagttctatgatggtggtacaggaaatgtactgtggtaatacacagaaagaagtataattctaaccaggtgtcagaatctcaatgggtcatggaaaaaaggatgttctaagaatgattagaacttgcatatacagagattgaaaaatagaaagcataatgagtataaaagagcttttcaagcaaagtatctatactttaggaagattaatcttacaattaataaagtataaaagtcaagcagttaaatatggaggctgttgcagtggtataatcaagaagagaatagcggacctgaaataagattttctggatgtaaaattgactgagcctagcactgaaatattggcagtgatatggaatcataaataacaaccaggttctggtcctacaaaaccgggaggaaagtattgctattaacctagaaaggaaaatttttagagagagtcaggttgtggaaggagattgggaacacataataaatttagtttctaacatgttgacttggtggtattgtatcgtgtacatgtatatatatatatatatatgtatgtcttactcagttcaggctgctataacaagaatatcataggctgggtggcttaagacaacaaaaatttatttctcagttttggaggctgaaagtccgagatcagggtgccaccatggtcaagttctgatgaggatcttattcctggtttacacatggccatcttacatttttgaaagaaagcagcagctctcttctgtctgtttttataagggcattaatcccatcctgagggctctaccctcatgatttaattaccacata

SEQ ID NO: 11190 - DNA, 6000 bp, Homo sapiens
caaaaggtgggatattttttatacttctgttgcttgcttttcatattcaacagatatacatggaaatcacacaaagttaggaatatattgcctctttgttacttttcatagctgcatagtagtcaataaaccttattttttttaattccagcctgtcccctgtgggcattcacatatcttacagatttatgtcttacaaaaggtaccataataaacatctttgaaatcttcttttttatttttatttttcactttttttaaagagatggggtctcactatgttcaccaggctggtctctaactcctggcctcaagtgatcctcccatctcggcctcccaaagtgctggggttacaggcatgagccaccagacccagacctgcacatatgttcttacttcctggtgcttctctctcgagggaatgctgggtcgaagaggatgtgcatttttaattataatagacattgctagattgctttccaaatagaagataacactcatttctgccattgagcatggtgcctcccttttcatcactttctaccacttttatatgttacagccttaaaaaaatatcttgtcagtctgcttggtatttccctgaggctggtgaatttgaccattaaaaaaaatgtttgttggcaatttggctttgcttttctgtgaaatgactattcacattctttggctgtttctttattgggttacttatatattttttcttgtcagttcctaaggggccttagtttattgtagttattaaaccttttcctgttgtatgtgttataaacattttttgcacacttgttgtttgttctaagccgttgtttatggggatattttgcccattcctgattggagaaatggggctttaggaagttatttaactgatctctgccctagtttcttcatgtgttaaatatggatagtaatagtatctaccttatgaagtgactgtgaagataaaattatggattctgtttaagggtttaggccagtgtctggcacaggggaagcattctaaaaatatagctgatgctgttaaacaatgactgttgttgttgttttactgttattatccccaaagcggcccattctgtctgttgctgtcagctatgactcagtcccctgattaacttacgcaccacccattttatcccctgcagagatgctgcccccacccccttaggcccgagggatcaggagctatgggaccagaggccctgtcatctttactgctgctgctcttggtggcaagtggagatgctgacatgaagggacattttgatcctggtgaggagactgaatcatgggtccctgagggccagggcttgggaggtagagagttgggggccttgacctgttacatgcctgctttttactcagccaagtgccgctatgccctgggcatgcaggaccggaccatcccagacagtgacatctctgcttccagctcctggtcagattccactgccgcccgccacagcaggtacttggcacacctggcacacttgtagctgccccgagaggagctcctgggacctctacttcccctccaacccctctgcccatgccagtgaaacccctgcaggctgagggggcaaatgaagtggggtttaaatactggagatggaggcagacctggggccagatgttctctgtgcccctcttcaccctcaggttggagagcagtgacggggatggggcctggtgccccgcagggtcggtgtttcccaaggaggaggagtacttgcaggtggatctacaacgactgcacctggtggctctggtgggcacccagggacggcatgccgggggcctgggcaaggagttctcccggagctaccggctgcgttactcccgggatggtcgccgctggatgggctggaaggaccgctggggtcaggaggtgagactggcaggggcagcacccagaggaggttggctctcctcacttccagctgtactttaaacaccacctatacgctgacgactctccagtttatatcatctccagactaagcctctcagctgagctccaaacaatattgtaaacctggccaccttttggatttctccacttagatgtctttttttttttttctaatagatggggtcttgctgtgttgcccaggctggtcttgaactcctgggctcagtgatcctcccaccttagcctcccaaagtgctgggattacaagcactgtagccagccacctagatgtctaataggcatctcaaacgtacgtttaacttcccaagctgaatttgattcccattcccagcctaaacctgctcctcccctggcattctccagctcaggaagtggtatcaccattgcctggttgcctaggctataagttaagatgatatccttgattcctttttttctctcacctccttccaaagcatcagcagccccgtctgttctacctccatagtgttcctgagtccagtcactcctcaccactccacctctactgccctaggccacctgcccgccatctccagcttagatgagtgcagtagatgccaaacgcgtctccctgcttctgcccttttctgcctggagtcaaatctccacctgggggggcggcatccagtggaccttagagcatgtaaatcagatacgtcacacctagctgacacccccatgctggctttccactctgccagaacaaaagctgagtccctagctggtgcaggatgctcagcctgacctggctcctgcctgcatcacttgtttcttggcgcctccttggccacgctgcctttcttcttgttgctggaacaagccagggctcgttcccacagcttctggacattttctctgtgcctgcaaagctcctcccctaaataaccacaggctctccctcactccattcagttctctgccaggtgtcacctccttagagagccttttctggccacccacctcactgctctgtccatacttcctgcctcttgttcttcgcagctgttttccctgctgggatctcagtcctacaagggtggggagtgacgttcaccactgagaacgcgcctggcacagagcgggcactcagccaacttctgctgaatgaacagagggaatgggctgaaatgaaggggaagctgaggcaggggtgcagggctgtgaggattggggagaatctgggcacaatgggatgataggcttggagacaaatggatggagccaggcaaggagaagagggcagctgagcctgaagtctgaggatggaacatcagagctgcgacagagccagaggtctcagctgcagatcttcatttcacccatgcctggctgcgccccacagtgctgtgtgctcggtgccacccctcatgggtctctaagtggccactgtgggctgggccagggagcagctggtgggtgggaagtaagatctgacctggactccatcccacccaccccctgtttcctggcccacaggtgatctcaggcaatgaggaccctgagggagtggtgctgaaggaccttgggccccccatggttgcccgactggttcgcttctacccccgggctgaccgggtcatgagcgtctgtctgcgggtagagctctatggctgcctctggaggggtgagtggctcagcttcctgggaatctgtttcctgagcaggggactggagggtggggagtgtggagaatgggcatccaggatcccttctcctgctgggaagctgtcactctgaggagggggctagccagcattgtctcctccatgccaatgagccagtggagagatacaagaagggacctgaaacctgcccaggcctgatgcagggatgggggatggagccttagtgcctctgacccccatcctctcaccctgccccagatggactcctgtcttacaccgcccctgtggggcagacaatgtatttatctgaggccgtgtacctcaacgactccacctatgacggacataccgtgggcgggtaagaaaggcccctgcaggatatggagtttggggtgggagggaggactgtgtgtgtgtgtgtgtgtgtgtgtgtgtgagagtgtgtgtgtgtaggggggctggtaagtagggtggggagtgagatggaagagctgagaagagggatgggttaggtggggcctcaaagggtagcactagggtgaccactagcccgtatgacactgtatgaaaaaggcacccctttgctaacacacattgttggaaattgctgcaataaatatacacatcatagattgaaatggtgccccttagaggtggtgcctttgtgctggatgtgacctgcaaggtacctgtagtgctggggtggggtggagagaggagaagggccagctgcatgagtgtgaggtgggatgggaatgggactagtggatgggagccaggctggccatgccactgtgccggagggtggcggagcagaatgcctggatgtcaagaccctcttcccttccaacctcctcttccttggtcccctcttctccagactgcagtatgggggtctgggccagctggcagatggtgtggtggggctggatgactttaggaagagtcaggagctgcgggtctggccaggctatgactatgtgggatggagcaaccacagcttctccagtggctatgtggagatggagtttgagtttgaccggctgagggccttccaggctatgcaggtgagtgagtccggctctcgaggagggctctgaagccatgcagggtgccgttggggtgcccccaccactcctagccttgaccctgtgccctcttcccttccccccaggtccactgtaacaacatgcacacgctgggagcccgtctgcctggcggggtggaatgtcgcttccggcgtggccctgccatggcctgggagggggagcccatgcgccacaacctagggggcaacctgggggaccccagagcccgggctgtctcagtgccccttggcggccgtgtggctcgctttctgcagtgccgcttcctctttgcggggccctggttactcttcagcgaaatctccttcatctctggtaagccctggagtagcccagtctccagtccctgaaattgacaactgatttcattcctaaccctgcagtgtccctaaaatactcattccttgcattatatctacccatcacccaccgaaacttctcaattaggggtgccccaaataacttgagcccctttctgcctcttgttctctgcgtatccatctttcctttgtaagccccttgcccgtgactattattgagccagtatgacagtactggttgttaaaatattgaaatacttctgtattagttgagaaatagcctcttctctaagcctccagatacctgtcctccacctccccacaatccagcaactatagggttaacacccaccacagctgggtgttccaggaccctgctcccccagcccccactggtcagtggttgcctattgagaatcacccatgcttctgctcctttgcacaacagtccactgcctctgcctcccttgggtctcctcctcatttacctccctcctttctttttgttccttctccccagatgtggtgaacaattcctctccggcactgggaggcaccttcccgccagccccctggtggccgcctggcccacctcccaccaacttcagcagcttgggtgagcaatcttgggtgggcgtgtggaccctctgcacccttctccctgggcctccccctcggctagggtgggaccctcctgtggtgctgaccctgctgcctccaccagagctggagcccagaggccagcagcccgtggccaaggccgaggggagcccgaccgccatcctcatcggctgcctggtggccatcatcctgctcctgctgctcatcattgccctcatgctctggcggctgcactggcgcaggctcctcagcaaggtgggcacagccgtggcatgtggagtggcggggggaggccaggccccagcacgagccagcgtccagtgggacctgcagggcacagcccactagcatcc

SEQ ID NO: 11191 - DNA, 6000 bp, Homo sapiens; identical to SEQ ID NO: 2442

SEQ ID NO: 11192 - DNA, 6000 bp, Homo sapiens
tagttttcattattatcactatcgccaggtcaaaagaaggaaaatatatcaattcacttttttttccctccctggatgtatttgagaatcctcggaattttttgtattcatcagtctagtatctgggggctaaaggtcaggggctggaggtgggcttagcagctgtgctactcatgaatattccatttcttttcctctttaaactttggttactgctgatgattttttcccctttttgttttagctgatttgtccgttttacttggcatagagtccaaggattttttttgtctttactccttcttagaagttgctaagttttgtggtatatagataatttatatgaaccaaataccgtatgtcccttgatgtaattacttttagtcttttttcttttttaacagatagaatgtcaattttcattgtatcattttaagatatagtgatttactgattcttaataatattttcaataatattctttttcccagataccatgtttgtgtggaagtgccccgtgtttgctatgccgatgctgtcctagtggaaacaactccactgtaactagattgatctatgcacttttcttgcttgttggagtatgtgtagcttgtgtaatgttgataccaggaatggaagaacaactgaataaggttagtctcgtttcttatttattgattaactgaggctatagggtatatatgtatatgtataaaattgattcggggatattgtaaacagaataatatagaataagacagtatgtaatcctagttgtagttcataatcttttaggaaaaagataatatacattagtttgttaagttctatgatggtggtacaggaaatgtactgtggtaatacacagaaagaagtataattctaaccaggtgtcagaatctcaatgggtcatggaaaaaaggatgttctaagaatgattagaacttgcatatacagagattgaaaaatagaaagcataatgagtataaaagagcttttcaagcaaagtatctatactttaggaagattaatcttacaattaataaagtataaaagtcaagcagttaaatatggaggctgttgcagtggtataatcaagaagagaatagcggacctgaaataagattttctggatgtaaaattgactgagcctagcactgaaatattggcagtgatatggaatcataaataacaaccaggttctggtcctacaaaaccgggaggaaagtattgctattaacctagaaaggaaaatttttagagagagtcaggttgtggaaggagattgggaacacataataaatttagtttctaacatgttgacttggtggtattgtatcgtgtacatgtatatatatatatatatatgtatgtcttactcagttcaggctgctataacaagaatatcataggctgggtggcttaagacaacaaaaatttatttctcagttttggaggctgaaagtccgagatcagggtgccaccatggtcaagttctgatgaggatcttattcctggtttacacatggccatcttacatttttgaaagaaagcagcagctctcttctgtctgtttttataagggcattaatcccatcctgagggctctaccctcatgatttaattaccacataaaggccctatctcccactatcctcccattgagggttagagtttcagcatttaattttgggtagacacaaacacgaagtccataataatatacagcagtaagtagaaaacatgaaggaatttaaaagagaaatcagagctagagactgccttgaggatagaaattgaatgttgaaaccatggcagcgtatgctgaagatcattcagagtgagcagagctagaactctgccaaaatctcttacttaagggagttagtggagaaaggaaaacctgattctgatcctagaaaactgggagggaagggataacagaaaagaacaaagaaaatgtataggttctaggaagaaagttttaagaatgacagggatagtgtctatataaaaatgagattaaggaatgtgattaagcagtagcctttgggtttggaaaccagtacatgactagtatcctggaaaagcagtttttttagagtgctgggactggaaagagtgggaggaaataatttattcttatatatatgaataatagatgtattaatagttctgaacagtagtctcagaaatagcacttacactactaaaacaagtctatcgtgctattcaagtagaatgcaagtttttaaaatgtaggataaatctataactcaaaataagcaaccagcatagagttggtattgtagtttatgatttgcgcagatggggatttaactcttttttccccactgtatgtgattaaaatgtatcagactcatcttgagtacatattcatcataaattgtaaagcaaatgccagttttctaaacctttacttaaactatttgattacatgtaatttttatttttacttaatgaaaaaaaatgatggatcataaactcttttgtttttctagattcctggattttgtgagaatgagaaaggtgttgtcccttgtaacattttggttggctataaagctgtatatcgtttgtgctttggtttggctatgttctatcttcttctctctttactaatgatcaaagtgaagagtagcagtgatcctagagctgcagtgcacaatgggtaagtttttaaataagcttcaatataaaagcttgggtagcctcttcttgataattgccagtttatccaaggaaactttaaggtaaaataaacttatacaatttgcagaattactttattcatgaatgacaggataagaaaatcttgtttttactggagaatgtcagactttggatattaaataatagctgtgataacctctgatccacagtgttttatattttcatactaaaaaagaggctctattatatttgtgactactaagggaatagctatttctccttctactgttaactttaggtggaccagtccacttacatagaactctcagttccctagacccagagagcagatttttctaggttggttgtattggacaacccagaaagaaacttcagggtttcttttatcaatcttccttcatatagagcactacttctggtacccttatttgactgttttaatatctgctgttgcttatctagttatatgtgctaccaaagacaaaaagtataaacaagtagaatataaatattaatgagaaaatatgtgacgggttgcttttcctttattttgttcctttggtcattgattattttattaaattattagagttttagatggaggcatttatcatgtgtttataaaaactattcatttatacagttcaccttatactttgatacattatcccacttatgtgaaataagcctgtgaaatggaactaacattctcatttttccataatgaattagtgagaaatacatctttctcaaaatggtcttaaaagcagtttatgtaattgttgttttttctgataatcaagtgtattagggttctctagagggacagaactaataggatagatagatatatataaaggggagtttattaagtattatctcacatgatctcaaggtcccacaataggccatctgcaagctgaggagcaaggagagccagtcctagtcccaaaactgaagaacttggagcctgatgttcaagggcagggagcatccagcacaggagaaagatgtaggctgggatgctaggccagtctagtcttttcactttttttttttgcctgctttatattctagccctgctggcagctgattagatggtgcccacccagattaagggtgtgtctgcctttcccagcccactgactgaaatgttaatcttctttggcaacaccctcacagacacacccagcatcagtactttgcacccttcaatccaatcaagttgacactcagtattaaccattacaagtcagtactttgcatccttgaattcaattgacactcagtataactatcagaagtctacccattgtcaacttgaacccgtatacatctcctgagatcatacataatctgcaaataaagacaataataaggtcatacaactaaccttacaactgaaaacgcaccagtccccaaccaaaatactaattacataaagttaacaatacttaaatgctgatgtgaagtcagtaaatcttatgtcacatgataaaggagaatggaaataaaatgaagatattttcttagtacaagtatatgcatgcatgaacatgtttttgacaaaacaaggaggaagtactcacaacaattacagccctcgtttctgcagctggacatgtggtcatagctggtattgatgactgccttctgctacccattgtgtattccctttgccttcagcaagcaactcagcaggtcgtggtttttttcctggtggagtgacccaatgatctccataagcgcctactttaactgggggaccacaatgttgttttgggtcccctggaatcaatgtcagctcagagccagtgtccagtagtccccaaaatgtcttatcatttccctttcttttccagccatttgctctgatgcttcctctagcgtggtctgggctttaatccattcctttcacatgttgacttgcctttcttatcagattttttttgctttgttttttccaattggaaagatctataatataagcttgggttcatggtaatggttaatttcactctctctccaaactatgttatctaaatatgatgattaccttgttttgtagttacaaatatggctacactccagatcataatatcctcagaaagaagtagaacattcacataaagtgtagctatttgttaagatgcagttaaatgatttcatatatgaaattatttgatgaatgtctattaataaaaaattatatttctttttgttttagattttggttctttaaatttgctgcagcaattgcaattattattggggcattcttcattccagaaggaacttttacaactggtaagaaatcctttttaagttgtttgacattgatattttataaaggaatctgaaataattgtcacctggaactataattgtttgtctttttgtttgggggtgtgtgtgtgtgtgtttccccagttggcaaaatcaagatgttcatataaaattttattttcctttttgtgtactgtgattttgaaaggaaatgataaaaatcaaactaaccaatcacttatgtatgctttctttccctttcagtgtggttttatgtaggcatggcaggtgccttttgtttcatcctcatacaactagtcttacttattgattttgcacattcatggaatgaatcgtgggttgaaaaaatggaagaagggaactcgagatgttggtatgcaggtaagctttcgtcgcagaacaacttcagtatagttgaactttgaagtcgagaatagatatgtagactaggtaaatcacttaggatttttatggtctactttcctatgatgaggtttttaatttaaactttgtgagtgtcaaaatatcacattgtatcagcaacttggtgagcagatcttttagcagattaactgggaacataacccaagaaccaggaaagaatccaaaagaacctgaatagctaaaataaatgttccaaagcatattactgaaagcatgtgcactttatagcctaattttctagcctacaatgggttaaaagcaaaatattaaagggaagaggattgctaggaatagataaacacacagtgatacaattcataaacagcagcaaataaaaaatataaaaagcaactcggatgttttattcaagtgcaaaggatgcttttatgtgcatcaataacaactaaaggaattcctatagtaatgtaattaatgattatttataatgatgatgttgagtcctttggggttatacttgaaaacagatatcccaattcaaatgcttacagggccaaaccaggtaacaaaaatgag

SEQ ID NO: 11193 - DNA, 6000 bp, Homo sapiens
tagcctctgagtgccccccacaactcagtcgtccccctcagctgctgcttcagagctctggggtctcagctgcctcttacattcctgccctagtgcattgtgggagcagctggaggaggacaaagggatgggggagtatcccccactcctcctacctcctggggtgacctgccttccttgtctttagacccgccctcgtctccaaggcaactcagcctttcctcagtccctcagaggcagccaccttctggaagtgggaactggggggactggatgtctgggtctcaggaaggcagagcagggataactgggcccaagatgccctgaacctgataagaggtggcagtcgagtccctcaggactccagggcctggagacttcagtacagggctctgagaccagtacaggttaggatagcttttcctgcagcaggggaggggagagtagttacttgggtttgtaaggagatgccatttagaatagttttatgtggggtaagcttcctgggcctgaggaacagagtagggattttcaaactttaatgggcacaggtcacctgggaattgtgttaaaaggcagattttgattgagcaggtcaagggtgagcctgagattctgatttcttccatgcttccaggtattgctgatggtccagggaccaccctgggcctagagggctataggggacagtaagactagaaggtgctggggtcccctctgcccttctcttagaattctggactcctatgtgggagggcagcagggtgagctggtccaggcttatctgatgtttaattctatcatatcctcaacaaggaattgcccaacctttcctgggacatatttattttttaaaagtcaaaatgattttcatattcttttacatatcttatgattttacataaatgcatttatgttacaagatttagaaaaatagtacaatcaacctgtctttttaaatttgcttttcttttgccccgttcatgttaactcttgttatattgtattctattgttatattctattatatattctctccttctagacgtacacacaggtatatatacaaacatgggtgcttgtttattctattttcaaaaggtgggatattttttatacttctgttgcttgcttttcatattcaacagatatacatggaaatcacacaaagttaggaatatattgcctctttgttacttttcatagctgcatagtagtcaataaaccttattttttttaattccagcctgtcccctgtgggcattcacatatcttacagatttatgtcttacaaaaggtaccataataaacatctttgaaatcttcttttttatttttatttttcactttttttaaagagatggggtctcactatgttcaccaggctggtctctaactcctggcctcaagtgatcctcccatctcggcctcccaaagtgctggggttacaggcatgagccaccagacccagacctgcacatatgttcttacttcctggtgcttctctctcgagggaatgctgggtcgaagaggatgtgcatttttaattataatagacattgctagattgctttccaaatagaagataacactcatttctgccattgagcatggtgcctcccttttcatcactttctaccacttttatatgttacagccttaaaaaaatatcttgtcagtctgcttggtatttccctgaggctggtgaatttgaccattaaaaaaaatgtttgttggcaatttggctttgcttttctgtgaaatgactattcacattctttggctgtttctttattgggttacttatatattttttcttgtcagttcctaaggggccttagtttattgtagttattaaaccttttcctgttgtatgtgttataaacattttttgcacacttgttgtttgttctaagccgttgtttatggggatattttgcccattcctgattggagaaatggggctttaggaagttatttaactgatctctgccctagtttcttcatgtgttaaatatggatagtaatagtatctaccttatgaagtgactgtgaagataaaattatggattctgtttaagggtttaggccagtgtctggcacaggggaagcattctaaaaatatagctgatgctgttaaacaatgactgttgttgttgttttactgttattatccccaaagcggcccattctgtctgttgctgtcagctatgactcagtcccctgattaacttacgcaccacccattttatcccctgcagagatgctgcccccacccccttaggcccgagggatcaggagctatgggaccagaggccctgtcatctttactgctgctgctcttggtggcaagtggagatgctgacatgaagggacattttgatcctggtgaggagactgaatcatgggtccctgagggccagggcttgggaggtagagagttgggggccttgacctgttacatgcctgctttttactcagccaagtgccgctatgccctgggcatgcaggaccggaccatcccagacagtgacatctctgcttccagctcctggtcagattccactgccgcccgccacagcaggtacttggcacacctggcacacttgtagctgccccgagaggagctcctgggacctctacttcccctccaacccctctgcccatgccagtgaaacccctgcaggctgagggggcaaatgaagtggggtttaaatactggagatggaggcagacctggggccagatgttctctgtgcccctcttcaccctcaggttggagagcagtgacggggatggggcctggtgccccgcagggtcggtgtttcccaaggaggaggagtacttgcaggtggatctacaacgactgcacctggtggctctggtgggcacccagggacggcatgccgggggcctgggcaaggagttctcccggagctaccggctgcgttactcccgggatggtcgccgctggatgggctggaaggaccgctggggtcaggaggtgagactggcaggggcagcacccagaggaggttggctctcctcacttccagctgtactttaaacaccacctatacgctgacgactctccagtttatatcatctccagactaagcctctcagctgagctccaaacaatattgtaaacctggccaccttttggatttctccacttagatgtctttttttttttttctaatagatggggtcttgctgtgttgcccaggctggtcttgaactcctgggctcagtgatcctcccaccttagcctcccaaagtgctgggattacaagcactgtagccagccacctagatgtctaataggcatctcaaacgtacgtttaacttcccaagctgaatttgattcccattcccagcctaaacctgctcctcccctggcattctccagctcaggaagtggtatcaccattgcctggttgcctaggctataagttaagatgatatccttgattcctttttttctctcacctccttccaaagcatcagcagccccgtctgttctacctccatagtgttcctgagtccagtcactcctcaccactccacctctactgccctaggccacctgcccgccatctccagcttagatgagtgcagtagatgccaaacgcgtctccctgcttctgcccttttctgcctggagtcaaatctccacctgggggggcggcatccagtggaccttagagcatgtaaatcagatacgtcacacctagctgacacccccatgctggctttccactctgccagaacaaaagctgagtccctagctggtgcaggatgctcagcctgacctggctcctgcctgcatcacttgtttcttggcgcctccttggccacgctgcctttcttcttgttgctggaacaagccagggctcgttcccacagcttctggacattttctctgtgcctgcaaagctcctcccctaaataaccacaggctctccctcactccattcagttctctgccaggtgtcacctccttagagagccttttctggccacccacctcactgctctgtccatacttcctgcctcttgttcttcgcagctgttttccctgctgggatctcagtcctacaagggtggggagtgacgttcaccactgagaacgcgcctggcacagagcgggcactcagccaacttctgctgaatgaacagagggaatgggctgaaatgaaggggaagctgaggcaggggtgcagggctgtgaggattggggagaatctgggcacaatgggatgataggcttggagacaaatggatggagccaggcaaggagaagagggcagctgagcctgaagtctgaggatggaacatcagagctgcgacagagccagaggtctcagctgcagatcttcatttcacccatgcctggctgcgccccacagtgctgtgtgctcggtgccacccctcatgggtctctaagtggccactgtgggctgggccagggagcagctggtgggtgggaagtaagatctgacctggactccatcccacccaccccctgtttcctggcccacaggtgatctcaggcaatgaggaccctgagggagtggtgctgaaggaccttgggccccccatggttgcccgactggttcgcttctacccccgggctgaccgggtcatgagcgtctgtctgcgggtagagctctatggctgcctctggaggggtgagtggctcagcttcctgggaatctgtttcctgagcaggggactggagggtggggagtgtggagaatgggcatccaggatcccttctcctgctgggaagctgtcactctgaggagggggctagccagcattgtctcctccatgccaatgagccagtggagagatacaagaagggacctgaaacctgcccaggcctgatgcagggatgggggatggagccttagtgcctctgacccccatcctctcaccctgccccagatggactcctgtcttacaccgcccctgtggggcagacaatgtatttatctgaggccgtgtacctcaacgactccacctatgacggacataccgtgggcgggtaagaaaggcccctgcaggatatggagtttggggtgggagggaggactgtgtgtgtgtgtgtgtgtgtgtgtgtgtgagagtgtgtgtgtgtaggggggctggtaagtagggtggggagtgagatggaagagctgagaagagggatgggttaggtggggcctcaaagggtagcactagggtgaccactagcccgtatgacactgtatgaaaaaggcacccctttgctaacacacattgttggaaattgctgcaataaatatacacatcatagattgaaatggtgccccttagaggtggtgcctttgtgctggatgtgacctgcaaggtacctgtagtgctggggtggggtggagagaggagaagggccagctgcatgagtgtgaggtgggatgggaatgggactagtggatgggagccaggctggccatgccactgtgccggagggtggcggagcagaatgcctggatgtcaagaccctcttcccttccaacctcctcttccttggtcccctcttctccagactgcagtatgggggtctgggccagctggcagatggtgtggtggggctggatgactttaggaagagtcaggagctgcgggtctggccaggctatgactatgtgggatggagcaaccacagcttctccagtggctatgtggagatggagtttgagtttgaccggctgagggccttccaggctatgcaggtgagtgagtccggctctcgaggagggctctgaagccatgcagggtgccgttggggtgcccccaccactcctagccttgaccctgtgccctcttcccttccccccaggtccactgtaacaacatgcacacgctgggagcccgtctgcctggcggggtggaatgtcgcttccggcgtggccctgccatggcctgggagggggagcccatgcgccacaacctagggggcaacctggggga

SEQ ID NO: 11194 - DNA, 6000 bp, Homo sapiens; identical to SEQ ID NO: 2450

SEQ ID NO: 11195 - DNA, 6000 bp, Homo sapiens
gagcatataattgtcgtatatagaaagaaaaactcttcaaattcctgttgattcaattgtgaacagtataattttttcacattattaaattactcttttagcctgtgactaccttacaattgaatttgataattgggctttgtaatgcatcttattataggctagttatattgcataccatgagaatagaaacatatgttgaaaggagacaaattagaatagacaaaaattattacctattaaaaagaagaaaatgatctcttttcctaaaaaatttatctgatgttatatgaatctcattgagtttacaaactgtaggtattttatcataggtactttataacttggagaccaatttattttttgtttttttgttttgatgtattacacaaagatttcctgtttttttccaggtaggtggttagaaaaaaattattagtagtttgctttagagaaggaaatagccttacctaattggctttaaggtaagaatcattttcattagtaagatggagtttgacagatctggctttgcaggagaaaaatatgtattttagacactttagtgaatattttagcaatcctactttttttttttttttttgagacagagtctcgctctgtcgttaggctggaatgcagtggcatgatctcggctcactgcaaccgcctcccgggttcgagtctttctgcctcagcctcccgagtagctgggactacaggcacatgccaccacgcccagctgatttttgtatttttagtagagaagcggtttcaccatgttggccaggatgatctctatctcttgaccttgtgatccgcccgcctcggcctcccaaagtgctgggattacaggcatgagccaccgcaccttgcctactttcttctttataaaagaataagacttgagtaagcagtaggtcattatactttattgggtaatttccatgaggcatttgctggagtccttataactggtttttgtgtaagctgtcttggttttttaacaatgtgctgtatcaaattgataagcttcataaagtctgtatcataatctcaacatatgatagaaaagccagtgcattgtggtttataatctctgaattttctttctaaatctactagaattatactaaccttagaaagttcatctatatttcacctctttcctgattgtagaggtaattatctctcagctatcacatgttgttgaaaattaaatgatttaacttttccaggtacttctataaaatcagaactattaacacttcaaaggtcttattaataagtgcaagttttcttcaattatttttgttatactgatgccttttccagcaattgtttctcaatttgcaggggtatagagagttaaaaataacttttgtttgctctgaaaaacatctttttaatatattctaacattttaatttggctttatattacagaaacaaattgcaacccaagtctactaagcataattggctacaatacaacaagcactgtcccaaaggaagggcagtcagtccagtggtggcatgctcaaggaattataggactaattctctttttgttgtgtgtattttattccaggtaggaaaaactatggaatttttttctttaaacaagaagtctagctgtttatttatgaatcatttcttttaaaaatgttcttttttttctctcctcctaaactctctttcatacagcatccgtacttcaaacaatagtcaggttaataaactgactctaacaagtgatgaatctacattaatagaagatggtggagctagaagtgatggatcactggaggatggggacgatgttcaccgagctgtagataatgaaagggatggtgtcacttacagttattccttctttcacttcatgcttttcctggcttcactttatatcatgatgacccttaccaactggtacaggtatttatatttcatgaaaactctggatgtgtgaattctgatggcattttatgattctcttgtgaaaccatgatgtgatatgaagtactttttatcctctgatatatttcaaaatgtacagctaaatgaatagtgagatcagcatgagaaatgcagtctttacttccttgctttaacagtaacacaaacattgaaatagttccaaatcttggagagattaaaataaaaattttcatgaaactaatactttttacaaaaatccatgttgatagtggatctaacattttttttttcaattctgtaaagatagtgaagtaaaggatacatccttttttctcttttgtttgaactgtcattaaaagctctgaaaatttttaaatttaagtatgaattcattaatgtagatagattcttagaattcttacaagccacaatttttacaagcttagaattctttctacaagcaacaatttctacaaattctacaagcttagaattcttacaagctacttttttttttaatcacttcaaacttaatccataaatctttttctgttaaaaggaagatagtgatttatagtgtttcatttttgaaagttctggttttgtccaaatgattactgaaagatttggtcaaagattcaaattgaactatgtggtttgggaagttctgtttttaataactttttaatgcataatattaataaacaaattgtaaggcggctctcagtatcagcaaaagatggaggaaaaagattattctttgttgtatgtctttgagtgcagcctttactgatttttattattgaaaagtatatatattttttaattcttacactgtagcgtattaagctataagaatccagctggttctttttttttttttttttgaaatggagtcttgctctgtcacccaggctggagtgcagtggcttgatctcagctcactgcaagctgtctcccaggttcacgccattctcctgcctcagcctcccgagtaccagctggttcttaactcagatccttggctgtcacataatagtagatattaaggctttataccagaaggattttggtatatttcattaactcaaaaatcacttaaacttgagatatatttccttcccagtctcttaattctttctttttttaaggagatatctctgagtcataccagtctcttaattctgagaagggaggggcgggggagggggttgggggagtggaaatcaggtgaggagttccatatacatcttgaacaatcttatgtaatagtgacatctcatttatccagaggtcacattcagttcctcttctgtctaataacatggcagacatgcataaagtgcttcagagattatgcaaaataactatttcagaggcctgtatactttactccattaaaggaaataacagatttttaccttcacactagcagtgtggaaagaaagggagcagattagatgcagcaatgatatatctgaaatcacaaactgtatacaaagcacgcttctgaattaatgaagcttcatagcttggtggctgataattcaacccccttgcccctttttaataattttccctgaaattttaggtatgaaccctctcgtgagatgaaaagtcagtggacagctgtctgggtgaaaatctcttccagttggattggcatcgtgctgtatgtttggacactcgtggcaccacttgttcttacaaatcgtgattttgactgagtgagacttctagcatgaaagtcccactttgattattgcttatttgaaaacagtattcccaacttttgtaaagttgtgtatgtttttgcttcccatgtaacttctccagtgttctggcatgaattagattttactgcttgtcattttgttattttcttaccaagtgcattgatatgtgaagtagaatgaattgcagaggaaagttttatgaatatggtgatgagttagtaaaagtggccattattgggcttattctctgctctatagttgtgaaatgaagagtaaaaacaaatttgtttgactattttaaaattatattagaccttaagctgttttagcaagcattaaagcaaatgtatggctgccttttgaaatatttgatgtgttgcctggcaggatactgcaaagaacatggtttattttaaaatttataaacaagtcacttaaatgccagttgtctgaaaaatcttataaggttttacccttgatacggaatttacacaggtagggagtgtttagtggacaatagtgtaggttatggatggaggtgtcggtactaaattgaataacgagtaaataatcttacttgggtagagatggcctttgccaacaaagtgaactgttttggttgttttaaactcatgaagtatgggttcagtggaaatgtttggaactctgaaggatttagacaaggttttgaaaaggataatcatgggttagaaggaagtgtttgaaagtcactttgaaagttagttttgggccagcacggtagctcacccttgtaatcccagcactttgggaggctgaggtgggtagattacttgagcccaggaattcaagaccagcctgggcaacatggtgaaaccctgtttctataaaaaataatctgggctttgtagcatatgcctgtggtcccagctactgaggaggctgaggtgggaggattgcttgagcccaggaggcagaggttgcagtgagccaaggtcacgtcactgcactctagcctgggcaacagagtaagacaaaaaaatatatatatattgaaaatcaaaggaggcaaaattttgacagggaaggaagtaactgcaaaacactaggctttagtaggtacttatataaaatctagtccagttctctcatttaaaaaaatgaagacactgaaatacagacttaaatagctcagatagctaattaggaaatttcaagttggccaataatagcattctctctgacatttaaaaataatttctattcaaaatacatgcataattgattttacacctcattactggtggataatttatgtgatgtggattgctggtgtccagcatgacccataaacaggtcagaagaatgatggaatgttttagaataaactcctgcttatagtatactacacagttcaaaagatgtttaaaatgcttttgtatttactgccatgtaattgaaatatatagattattgtaacctttcaacctgaaaatcaagcagtatgagagtttagttatttgtatgtgtcactagtgtctaatgaagcttttaaaatctacaatttcttctttaaaaatatttattaatgtgaatggaatataacaattcagcttaattccccaaccttattctgtgtgtagacattgtattccacaattttgaatggctgtgttttacctctaaataaatgaattcagagaaagtgtgtagtgtactgattatttagcagcttaactttaggtggccataataacatttagacctttcttcctatgtgaaaaaggacctggcactagaaagtaactgcctgttttctgtaatgataattaaattgcttaggagattgttaccctttggttgtctgtaagtgaccccagaagtaggatctcaaaggtaaagaggcattcttcccctaaagagtcttcagtatatggatcagtttagtttggagaatattaatatattttcagtggatattctacatctactatgtcttccagctattttttctggttgccagttttgatgcttgtcttcttccacagatacttcagatagtataaaaatttcccttactaaaaaagaatgtacttttactgataaaatactccaactcatgttagttaccaagctttagtatattttattccataattcttgtgaagtggtctttctccaacattatcagcagcacaatgcccataaaagtattgactgtttatcccagataaaatcttatgttcacataaaaacctgcacataaatgttcataacagctttatttgtaacagacaaaactggaaacccagatgtccttcaatagatgaatgaaaaaacacacc

SEQ ID NO: 11196 - DNA, 6000 bp, Homo sapiens; identical to SEQ ID NO: 2449

SEQ ID NO: 11197 - DNA, 6000 bp, Homo sapiens
ggtggggccgggagccccggcgacggtcaccagttgagctcgcctgatctgttgtgggctacgagagtccggggacgggcaatctgggcagagtcgcacgaggctgctgcagtgatgaggcactggttctagaaatttacccaacggtgttgtcataggggggacattacaggtgattgctgatttcaaccacagatgactttcggggaaagttctctcctgggggtttctgtttctaccccgccgcgtcctctccgagttctgcgcgctcctcccagggcgcccgctgtccccgagctctggacccgggtcctgcccagtggagaccgcggagttggtgccccgcttgcggccgatgctcccgggcctccgagtccacagcgtccggacaaaacggcctttggaagacctgggaggactcgccggtagcggcaagggaaggagccaggaaatgcgggggtcggtggggtgaggagcacggggttcctacttcatcctcgcggaaactttgccaccggctcagtgtggagacctcaccgtcccgcttggatccgtggggctccggcagtgtggcctccgcgaggacccccatcctccttgccctggggatgctgcgggagggcgcccgggccgcactaggtcctgagtgtccagggtccggcaggggcttcccgttgtcgcctccccgaccccgccgctcgcggtccagggctcctggtttctccactgggctgggggcccggagcatggacgtcgtgaggcggagaaaaccttgggatgggtggaaaagaaggatcggagagagggcgggagaaagggagaggaaggaagcaggtaaggccggagaacaatgagcaacccccaccacgaaagtggggagagggggacacgcgcacagcccccacactccaccgactctccgtctcctgctctctgccctgtaaggaacgcaggccccaccccctccaccctcactgtgtttgggatcagccatttcagcgggatgcctcttgtgggtgcgattggcatttccctgagggctgtgaacaccaaacaccttttcctgggctcactgcaatttgcattcttcttctgatgccagtgggcaaggggaggtccccaaacgctgatgggaccccgactctagccggtgtggggctcttgacaccgcatgaggaaatgaattcaaggacgagtaggaaaatagagaaaggatggagatttattgtaaaaggaaaagtacacactcaagtaaagggagtgcaggggaactcaagagagaggcaggggcaagggggtttggggctgccaactttcagcgtttcttcaaccaaggggtggaatattcatcaaaattcctggaagaaggtggagatttctcagaactgtggtgccacccatttttacacccaatatgggtattctcagaattgccaggacactggtgggtgtgtgtttagtatgttaatgagcatataatgaggtcctaggtgaaacctaggtcaaatccagggccatgtttggtccactctttcctagccagcttggtccacatcctgtcttttagggttttatcagcccagagcctaacagatatttcaacaaattccttttgctagtcacctgaaactgctgcctaaaattttctattcttttgtgaccactttgtgtctcactttggagaaatatctattcaaatcctttgcatatatttaaattgggttattttgctttataatgttgagttgcaagagttctttatgtattcagcatagcagccccttaccagatataggattttcaaacattttctaaatttttaaagtgttttaaccttctaaatggaagtctttttgaagtacagaggttttacattagcatgaaatgaaattaagctaccttttattttgccatttgcactactggcatacagtacttaagaagcattagccaaatccggggtcacaaaaatttactgctctactttcttctgagactgtcatagtttcatgtcttaggtgaacacctgccattcatctagagctagtttttgtgtgtgctgtaaggaaggggtcagcctcattcttctgcatgtggcatccagttgtcccagcaccattcactgcagtgtaggatgcacctgtcccacctcctgtccctcctcctgcacttggtgtcagaactgcctcctgctgaacggttctcccagggtttccaccaatgaagtccccttatgaatcctgtgtaggcgtctgcttctcagaggacctggactaaggagtggatttgccagaggaaattatatttcatgagatgtaaccttctgagaatagtaacactcagcatacccctgaatacatcaaaagtaagaaattgcatgatttggtcatttgggtcccacaagtcttctgtcaatttagcttattggagtttaaattttttttttgttatttctgctgttattgttgctgttgttgttgttttctttgagacaggctctcactctgtcacccagtctggagtgcagtggcaccaccatgactcactgctacctcaaactcccaggctcaagtgatccttccaccttagcctcctgaggagctgggactacagtgacatgctactatacttggtctgttttaaaattttctgtagagacagggtctcaccacgttgccacggctcatctccaactcctagccccaagcaatcctcggcattggcttcccaaagttctgggattacagacatgaaccaccactcctggccccaaaagttattgctttttagtttttacttttcacatggttgtatgacattatgtagatttttaaaattctgtataagtaatttggggaatgctatataatataatgttttctttagccacagcttcctaaagatagaagtggtattaaaatgttgtgcattcgtcaaatcttgaagaagtttcaaatttttaggttgattctaacctctcattttggttgacacaataatccataaaaacaagtaaagcgcccactctgatctggaaggggtaaggaggtgaaagtattgataagccaaagtgacagcctcttttgtagacatgatcctgcctaaatatctcatgcccctcaaaagagggccctgaacgccctgcttctgcagagctccatgcagtccttgaagcactctctggctgtctctgcaagtggctgaacagctcctcctggtctctgtggggctgcagaggctccaggtccccatggctcaggggctgtcatgctcaccaggtcccatcaagggtgcaccccactgtgggtggtggaggagaccaggtgtagctgctcctgcctctacacctctcctgactggccaatcttaacaggaggaaggagtagggatgagtggagccatggaggttggtgctggaaagaacagaaatgaagaccttcgtccaatcccccaaatgatggggatccctttctgagttctagcagccctggggtagtctgatgattggattcctcccatgtgtcttaaaccctattgtatggtagccactgtgctaggtgctgggtttacatgtgggtgatggatgtgtccagtccttcaggaacttagaatccagggacagaaacaaatacccacgtggctgctcctgctgatgtgatgtcctcgaggtggttggggctatcagagtacagaagagggggtgactcattctgcctggggagttgcatggaggcttctcgggaggtggcatttcagactcttcttttgggaatgggaagaatacagcatagccaggtgggaagagaaaacagggcacctggcagagggacaaggatgaggaggtggcctgggggtacaaatatcatagaacgttgggaatctgtgagaagtctgtagtaatgaaacctcagttactggggtagactctttccacagggaggagggaatgtcaggagggaagatagggaaggaggggtgggcaggaacccccctggagtccctgtctccatccacagcaaatcaaccaggaaatcaattcaccattcatacatgtatgttaacacacacacacgcaaacacacacagagatatgcacgcacagtctctcacacactcacaccacacatacacatacactcacacaaaaacacacacatacacaaatgtatactgaaatagagacacagacacaaatgcacgtgcacacacaaagacacataaacacacagaagaaactgggtgtcatctcaagagttgtcatgtctggcccatcctgcccactcacctgtcacctcaggggctgcctcctcgctcatgaaggatttctgaagtcgtcaatcaggatgtcactgtgtgatctgaaacactcagacagctcctcactctgaccttcattcctggtccccttggttctgggatgaagcagagtcctattggtttacgttgcagcagacgagaaacctctcccgtggggcagaactgctgggccaccagagagcacccctctgctctttactctcagagcatctttatctgcagggtgggaggaactgccccaacccctaaaaaggaactctttatggacccctcatccaccatgatgtcaacgtctgttttgtcttctctgtagcccttggctgtggatcccaagctgtgtgccaaggagctcagggcacaaacgcaccttgagcaaaccctctgggcctattgaaatagtgtgctggaccacactagaaagtactagtccaagattttttataatttcaacattagactatgcaacattgctttagatgacatagtatttttaaaatctgtgatttcaacagttgttgtgataaaaaaccaagaacctctgcaaaaatcggtatgaaataggaaataaggatggctgtgtccaatctgcttgcaaggtttgagaagttgctcagtgcccagcaggtacacatgtccattaataaacacatgtgtctatttaagaatgaaatagggggaattcttgtggaggtcagagtggaaacaggtgtgagaggatccagcagaagaaaacatggctgccaaagtgtttgagtccatcggcaagtttggcctggccttagctgttgcaggaggcatggtgaagtcaggcttatataataaggatgctgggcacagagctgtcatctttgaatgattctgtggattaccagacattgtggtagggaaaggactcactttctcatcccatgggtacagaaatcaatgatctttgactgccgttctcgaccacatactgtgccagtcatcactggtagcaaatatttacagaatgtcaacatcacactgtgcatcctcttccggcccgtctctagccagcttcctcgcatcttcgccatcaccggagaggactatgatgagcgtgtgctgacgtccatcatgactgagatcctcaagtcagtggtggctcgttttgatgctggagaactaatcacccagagagagctggtttccaggcaggtgagtgacgaccttacagagcaagcagccatctttgggctcatcctggacaacgtgtcctggacacatctggccttcaagaagttgttcacagaagcggtggaagccaaacaggtggctcagcaggaagcagagagggccagaattgtggaaaaggctgagcagcagaaaaaggtggccatcatctctactgagggcgactccaaggaagctgagctgattgccaacgaactggccacctcaggggacagcttgatggagctgagcaagctggaagctgcagaggacatcgcgcaccagctctcaggctctcggaacatcacctacctgccggcggggcggtccgtgctcctccagctgccccagtgagggcccaccctgccttcacctccatggaccgacggcccacagacccgatgattcttaacaccgccttccttctgccccctccccagaaatgactgtgaaatttcatgatttgcttaaagtgaaggaaagaaaagt

SEQ ID NO: 11198 - DNA, 6000 bp, Homo sapiens
gcgatgggactgattttacaagcaggtgaatgtttgtcctttcaaaaataatttcaaagatacttatgttgggagaccaaacgtgttttccaagtaggccccagtgggagttagaatcacagactctcaagatggaagggacgttccaagccgtagtctagtccagacacagtatatgactgtcttcctggtgtgatagctttttttctaggaaaatttctttggtggctacaaattggataagatactttaggaggaaaacatttggagcaaagcgatgggatggtgttcttgcatgactcagaggcagactctgaatgcaaatgccatgaacaggagttcattattgcgtggcgtccacatttgagaagtgtatcgccgttgtgaagagcagggcgtggtctctagacttagacagacatgatttaaaatgtgctgggaaagagagactctatgtttgcatgtaattggtgctcagtcatgttaggtctttatcctaaattcttatatgttacacacaagtcccaatcctgaattagaaaaagtgagtttaggtgctgggatgatgtggtcaggaagcagcctggaccacagtcctgaagggggtgcattagttacagattgccttggtggcttaaaacaacctacattcaccatctcacagttgctgagccacaggggtctgggccttacaaggctccagtgaaggtgctggctgggctgaatccgtgtctggagttggggtcctctttccagctgctgtggtggctggcagaattgaggtgcttgtgactggggggctgaggctctgtttccttggtggccgtcaggtggggctgctgtcagctgcttgccagctggcttttttgcagcatggcagcctacttcttcgtggccggtgtattagttttttatcgctgctataagaaatcaccaccatttagtggccaaaaacaccaccagtgtattatttcataatttccacatgtcagaagtctgggctcagctggcttttcgactccaggtcccagaaagtgtagacaggactttgattctttctggaggctttggggagctagtggcttccaggctcattcaggttgttggcaggattcaggtccttgcagttgtaggactgggtccccactgccttgctggctgtgagctgagggataccctcgcctcctagaagccctgcacgtgggtcccgcatttcaggaccagcaagggtgcgttgaatccctttcatgctggaaacgtctctgccttccttttgccggcgtctccatgattccaaccagagaacattccctgcttttaatggcttttgtgattagattggacccttctggataatccaggataattttcacatttggggttctgtaaccttaattacatctgcagactctttttgtttgtttgtagagatggggtctccctgtgtaacccaggctggtctctaactcctaggctcaaggccttctccccccatggcctctgaaagtgctgggattacaggtgcgagctacaacacccagcctgcaggggcttttgttgccatgtgatgtaacattacaggctcctggaattagagcatagacatctctggtggggtggggagagttactctgcctaccacaaccggcaagagaatctctcattctagtctgctaaaatggagttgaatttaatgtgacagagtcacagaaaggactgtccaatcacctctgccatttctctgggctggaagcaagtcacaggctctgtctgtactcgggaggggaggatgcaagagtgtggctcactggggtcaccttcccgtgtgtccctacagagctggaagctgggtggggtggggcgttttggttgcctggcagctgttggaccaggtggcctttaagactcctactacagtgaagaagggacagagcctttcttccagcctttccagaatattctttccccactgcagtcgggtcctgccccaggcagctgtctcttgaccaacgtccccatcattcgtttgttactgtttctccccacctgtgtataggttctgctgggaattttgaggtttcctgtgaagtggtctggctgggccttgcttttacagtgtagacctgcaaacatttactactgtgagctgtggaaagtgagcctaaggtttagatgggggagttaattagggtctgagggttgtgctggaggacatggggtacttgcccataaggtccttgtatagatgcagacacttggctccattgcctgccctgtacagcccaggaaggtgacggggatgctgagaggatgcagggaaggctgtgtgcttcttcctagaagtggggcacccaaggcaggcatttaacacccaaggcagtgctgattctttgctttccttggcctcattcttgtgggtcacatttctcaaatctcttctccagaaatgctttgcaaatcaggacatttcttactgacactcctaaacaatcaccgggtgccacacacatattctgtctttgggtgtggaatgagcctgcaccttcctgagctgatagcttggctgcagcctcagttactgaaaactgcatttctttgtcaagtagaggtttatcaccacagcaagaaggaatagaaaaggccattaaatatcaaaatacaaaagtgtttcctggatttatatttcccaacaaaacacaattatgttcctccccaaaatagtgatacttatttcgtatcttttctgaaatagactgttttacattttgtcttatctagaaaacaactagtttagcgcaatgattctcagcaaaagtattctgtctcctatgccatttgcttaatctaaatgatctattctatttatggtctccaggagttttgaattgtgtgtacatgtgtgtgtttatagttggtcattttcgtgataggtgggagtccagaaattgaccctctttaaatgaattttatgagatattaaaatgttgccccatccattctcaattttgtgtagaaaggggaatagtctaagccctgaagtagtaactatcattttgtgtttcaatttaaaattcaattcaattcacatagttgccatttaatagtgctgcaaacatttccccatctctaataagacacaaattcacacatctccagtgtgtcgaaaagagatgagaaaaatgcagacatactctttcaggtctgggtgtgagttctgccaagaccatgaacttgctggggataatctcagatgtctaatttatgatgaaactcaaagacagaaactgtaaaatgtaatgtgactctcccggttcaatggtttcacaggcagattaattcagagatgtatttaaccagcgtaaagtacccgattttgatagagaagaataagcactctaaaaggatcctttaataaatgaagacttatttcagtatcttcttttggttctctgacagagctatttcatccaaatgtctagtctttccccttcattactgcgtcgttctttagatagtctcctatcattttagaaatcccacacactaagattcagtatgattccttctccttctgatctgaattctcactgtagctgttcctccatgctgctctctcttgtagtagagactgccctgtgtagaaagagaaactcagctgggccattggtaacttttgctcacggtcccaaatgttcccacatgaaaatatacagagaacacaaagtgagtgacgtatttgttgttgaatttctattaagacacatttgctgacttattagtcaatagcaggtacccccatagctgggtagaataaatttaggggggaggggactccccggtgtgccgagctgccctatgcatgttgcctaatgtcctgggctctgcagaactttcaaaaaattaacacactcaccaaatatgtttttcttgctcattaacttgatgaagcccactggttttttagaatcacggcagcaagttgtaaatgatgtatgaaatgaaaaatcttttctctcccagtgagcagggagggagagctgacaatgctccgtcaatgctgctgccgcctgcagtagcatctagacacagagacaccccaggacccaacctgtcccagtaccagcagtgagctcagaaggagtaagcgatgggccctcagtgacctcccggtaccaagatttccttgctccttcacatactgcactggggagctgaagacaatgtggctgaatgaaatcaagcatctgagccaggtgcctgcttgctgggaacaggatggcctgagtccagagcaaacctcttgggcccactggtgtttgaggctttaggagtcaggagcaaatctcttgggcccactggtgtttgaggctttgccctttggcttcatgcatcaaggcttttggcttagttcgcatcccatagttgcggtcggttgcaatgtattgttcagctgctgttgttcatttgcttgataaactaacaaatgtttgcatgtgcatatacccagaactgggccaggcattgtaaaggacaaaataaacataaagtagagatatatccaatataaaaacccagcttctgccctccaactgccgacaagccagtcaggtgagaaaataatttacttaattaacatcttttcctcaaataggataattttattcttattgttgcccttgtggtgccatcatagtgtttcaggcatcgtaatggaaagtgtattagtatatgtttacccacttttgtaaataatgcgtgttcattgctttaaaaagggggttgaagcctaacgatgaaggaaggcagttttcacagtgagacagtaaatgcctcactgaagggaggcatttacgggcctccccccgtaaatggtatcatctcaatttaccaccgtacccacacttactcaagaacagagtctgttaagacggcagagcccggcaattgcgtaaaatttacaactttatgggcagaggttcaattcctcttcttaacaacgtgcccatagccaacctcctacttcttattgtacctattctaattgccatagcattcctaatgctaaccgaacgggatgtgtctccccggatgcaccaacatgaaccaatgttaactggttgacattaaccaatgttaaactccaaaaggctgatgtatacaccagaatgccagtttattgttttgaaacgtgcacatgacctgggaaggtgccttgtagtcagcgggtcgtgtgggtgagcatgcacttctaacagggggcctggtgaaagaacatgaatgcttactggcattaagctctgagaagcagcccagttgccttcctcagagttgacctgcccccaagactagccgttgtatccacaggccaggtggctctcctctttcaggactggaggtgctcctttctctgtgttttctttttctttctttcttttttttttgacggagtcttgcaccgtcagccaggctggagtgcagtggcctgatcttggctcactgcaacctccgcctccagtgttcaagcaattctcctgcctcagcctccctagtagctgagattacaggcacctgccaccacgcctggctaattttttttttgtatttttgtatttttagtaaagacggggtttcaccatgttggtcaggctggtctcgaactcctgacctcgtgatccgcccgcctcagcctcccaaagtgctgggattacaggtgtgagccaccatgcctggccttctgtgttttcatgattgtcaaactcctcctgactgatcaagcctttctttagatatttaacctaatcaccaggtgacagtcatgtcatacaggcctatggctctttctcaaattttaggaggctttgcctgtctccttagtctacagatatcaattttatggttcaactgcataagacaatgttgtctccaaatttgcgtatctcattttttgtccctcttacccccttctgcataatcatggttgctgcgtgcccactgtgctac

SEQ ID NO: 11199 - DNA, 6000 bp, Homo sapiens
tcagaataaagacgttattttcttcaatttcagtaaaggaaaatgacattcagaggttaagtatattagtaaaagtgtccaagtgtgatctgcattatttccacatccataacacacttctgatacactatgacattgagaaaaatggaacaagtataaaaagccttgccaaaaattcatgactaaatatagacaagcagagccaaagcaaagaggggttaaggttcctcattatagattcaaggtaaggatgtgctagtccctagcatatacttactgatgtagtattaatataaacataaacctaagtgatagctgtcttaaagagtggctaccactaaaaaaaaaaaactaccaaaatattgtcaaaagtatgtaccacaaaaatcaggactcccaatgaaaacgattttaagccatgcataatttcatcccagatgattcagaaaacaaaactgcagacatttgttatattttcttttcctgttttttaaatgataggccctttccattagccacagttactaagtccaccttttctaactatacacagccatccatactttggcaaatatataaatttaggccacaaaaatttgtttacaagatttaaaatatcagacaccctaaaatttaactgggagtgattttatcaaataatgtatctcacacacattttaaggtaatcaggaaccagtttgtagcttcctgcttcgcatgctagctaatcacttttcttctaatggtaaataaggcccttttcttaatacattgtactacgttttataaaactaaaagttaaaactgcatttatggaattcagtagaaatgtggacatcataaaacctatgtgcgtgagtagacctcaatattccttttgagactgctccatctgaatactcatcttacaaaaatctagtaataaactgaatcgtcaaatggcttatttcactttttaaaaagacccttctcctataatatatacacgttttgtcccaattacgaaaacatttgccacccaatagaaactatttcctgaaatcaaaaatgaaactaaaaacatattaaaagccaaaatatttcatcatttaacaatgtgatttaatagcatttcatgacctacagtcaggcagtaatttaatattttggacaaatgactgtttcttagtataattacaacaactaatactaaataatactaacttccaaaaagaaaagaaaaaaaaggattgtaaaaaagacacattccacatgttacacggtaaggtacttaaaagaaattcctgaatctaggtcgcatgtccatatttcccccaacctcaacaaaaaaaaaaaaaaaaaaaaaaaaaaaaagcctattcccaagggtcatagggacataatggattcattctcattacaagaaaacaaaatactgaaaatgattggtaccattaagaaaaaaatactctaaagtaacatggtcctacatctgcctctaacttcattcgtctctagtttacgaagatgtgaattttaaactgctcctttaaaagcaggctgacaaagcaaacctttttaaaattaattacgtgggtttatttccatgattcttctctataatgtttttcctcgtgtgaatcaaaaacaagttgaaatcacaagttttctattaagaatagaaaaatctattatccttaaaagcaaaactccaataactaaagatctgaaagcagtggacagcagtgttcagcctaggattcacaagattatttgttaaattcagcccttccttcactctgacaagtctctaaggtatgattattgttaaaatacctcttcctaaaataaatgagttacataaaaatatacatacaacgactgttgttcctctctaacagattaggattttttaaactttcatagcattaacatgaaagaaaaattatttggaaaaaaagacacccagcacaacttgcttagaatatagtttccctaattcatcgtgtaagcagttcaaacaaggctcaaattacctaatctaacaaaacaatgaagaaaaaaaaaagattatggggcatttctgtattctccacatcaaaagcaaatatgaaatgattcttagtatttcacaggaatatctcatttttccccttttaattattgttatctgcacaaatatgtggtttcctcatttcgttttttaaatatgtcaattctaaccaaaactcctcatccacaaatatctttgaacagtcagaactgataaatcacaaaaaaatgaagcttaaatcttgtttatcaggtgaattacacatcaccaaaatatattgctgcctatcaaaatcttaaaaaaattttaaggttttattaagctgcgtgtgctgacagaattcaaatttttccatagttgaatttgtaaagggaagacttttataaaggctttacaaatccaaaaattggtaaaattcgtggtttacttatttttcaatggccttatcctcagcctccaattaaagtctatgatatatgtaatgtgcatattctaagactatcatcaaagatctgaattttgtaaatgcccaatactggacaccagcgaactgtttttctgtatttgatcctcttattaataactatgattcataatagtttcagctttaaatactgaaccttacatttgcttgtaatagagctcagttattatttgtggcaagaatttttgtgactgtactgctcagcacttctatttacatcagcagtgctaaatgcccaatggtgagaggggagccaatcagatggcagattagatgtcaactcagaggcagctgtctggagactattacagccagtttacctccacaattcaaattccaaaccttgcaaaggagatcaagtcagtctttaggctcagcctactagcaagaaacagcaagagtgcaggacacttcctaacagcgctgtaggactcgggtgacagcaaaataaagaaaatccaaataaatacgatcccaaaagatcaattttcactggtctgctatcttactggatttgctgaataaaatgcatgcctaatccatgatcaaaataagttcaattgatccggaacgtgctcctttcacatagcctgcctgttgaaggtgactccctgcaagcagcccgtaagcccaataatggatttccctggctattctaaggaacgaatcgatgtattttacaatattgcacctccatgtcgttgtaaattttgttattattcctaccagcaaacgttcgagctcgaagcccgcaccgagtgtctctgaatggctctccctaagtaggaaaaacccactcgcttgtcacaaagctaacctattttccctgcctggacctcggaagccaagagggaacgtgctgtggctaaaggtgtgagaaagttcctcattctttcccccgttaaagcacattgtgggcgctcccagaaccgatcgggtggctcttcgccccagccgtcctggccgggagagcctatttgttacaaaagcacccgaacggtccccgccgccccaaacggcgaccgcgcgggtggcgcctcgggatctcgcttcgcgttcccgggcctgggggaggggggggacgcgggtgcgggccggcggggtagaagccacccggcccggcccggcccggcgaagccctcccaggcctggacagcgcgccggcccccggggcgccccgaccgcggcgggaggcggccgcccgtcaagatggctttgggcgccgcgcccccgccgcccccgcgggaagacggggaaaagtacgcggcaaagaaagaaactcaggctcgcggcgcggcgaggccgccgggcggaagcaggcccggctggcgcgagggttacctgggatctgcccatggtcggtccgggggtgccggggctcatcgccgggtgactcctttgttgcgcggccgcccaggccgggctggcagcggcgtactgggcgcccatgtccttgcccaagcccatgcccgcggccgcctgctggccgcccgccgccgcccccgccgccgccgcctgggactggggctgcgacggcggcggcggcggcgcgctggggctgctgtactcggggtagctgccgccgtagctccgcatcatggggctgggcgaggtgagcagctgattgagggtcggggtggcccccgacgggtgctggttctggccggcgaagcgctggaagccccccgccgccgagccggcggccgccttgctgaggctcgcggccccgccgcccccggggcccatcatcatgccgccgccctgctgccggggggagctcagcaccccgtaccccgcggacgagcccccatagccgccgccgccgccgcctcctgctgctgccgccgccgccgcggccgccgccgccacagctcccgctcctgctcctcctgctcctgctcctcctcctcctcctcctcctccgctgcctcctcctcctccgccgccgccgccgccgccgccgcccgcgccgggccggctgtagcccggataatggttgcactggctgttggggtacccttcgtgggagttctgcagggggtccatgctgccgggggccccggcggcggcggcggaggcggagtgcatcatccccatcccggggctttgttgtccgccatgttgatcaaagcaaggcccagcgcggccgccggggccgccgctcgcaggggcagcgctgccatagtaattattaaactccgggacggccgccgggccgccgccgcccccgggcacggcgaccggcggctgctgcgtgcccagggcgcccaagcccgggtgctcgtagcggccgcccgccggctcccccatcttgggcggcgcgtcgtcctcgtcgcccggcttgctcagcagcggcgggcccggggggtcggcctggccgcccgcagcactgtccttggcgcctccatgttgcggctgctccatgtcggggccgggctgaggcgcgccgccgcccgcgccgcccaagctgttgttgttggaaatgggatgttgctgttgctgctgctgctgctgctgctgttgctgctgctgctgctgctgctggaactggtttagctgctgctgtagtgcgtggtggtggtggaggtggtgggcatggtggtggtggtggtgggcatggtggtggtggtggtgctgctggtggggcggcgcggcgggggcttcgccaacggttttcagtttgtggttggggagcagccccgtctccatggccgagcccgggcccgacgaggaggaagaggatgccgccgctgccgccgcggaggaggaggaggaggaggacagcgcggcggcgcttccaccctccttgagagccgcctcggagccgccgctcttggcgctgtgggtgccggcggcggccgcggcgcccgcgttatgggccatgttgagttcgtgacgggggagcagggggtggtggtgcacactgttcaggccgccgccgccgtcgccgccgccccccagcatgggtcccggtgccgccgccgccgccgccgcgccgcgcgcccccgcctccaggtcccgggctccgggcgccggccgcggcccggggggcgcccgccgttcgccgctgcctgcccgcgcccgcgcccgcgccgccgccgccgccgccgccgctgctgcccgcgcggccatgatcgccgcggcgtggcgaggccgggcggggggcggggggagacaataacccccacttttcaggccgcggcccctcctgtgcgcatccacgcggcccgccgggaagccgcgaccccctccccctccgcaggccccgccggagcgccgggccgggcacgccttacgctctgggcctgctcctgctgtgtgctttcatggtgaaagtttttagttcaggtttaaatgaaacttttctcttttcctctctagcccggatatgggtaaatacacgactagctgagcctatcgggcccagcatggcttgagaggcagcgggcgagctcgagcaactattatccacttcgctcgcatt

SEQ ID NO: 11200 - DNA, 6000 bp, Homo sapiens
actccaagtcaaagattttgaaaatagaacatatttagtgaaaacttacagtggaaacacatattctactctgaaaaaattcactcactcaaagtgaattgctaattaaaactatatagtatatgtctatcattccattcattcagatgtcagtataaggaaaaacaaatgaatacttaggacactcaggtaatgactgatacctaagtcattttatctttaccaaatttcctgaagaaaaagttgctaaagtacaccaagtttttagatcagaattaattcactcaattacccaattaaaccaaaagggccattgagtctcattcaaatagcctccaagctagagaaaagatatttataatagttctacatctatgatacagaaatatattcttggtagaggaacagttttgcctggtgcctctcccggacacgacagggaacagggtttgggattcctcagcctcaagcaagcacacacagcaagcgtgcggcactactttacatatccacagagaacctgcaaaaacctccctcccattcaggaaagggcacctccgaaaaggcatgcaaccaaaaccacccaatcccaaaaaggcctaagaggtggatacggccccttgagtaataacagcagtgtaaaatgtcataaaaattttataacatccaactggaaaacctaaatattgcaaaaaaaaaatggaattaagttttattaatattttcagcctccataaatctgtcattttatgcaacacaccacacttctatcaaacataaatatcaatctcaaatttacaaatctacacatacactccaaaacaaaagtgacacgagtgaaatatcagtcccttttccacccacatggatcaaagcacacaaccccatgagctgagcagtgtcagtccagtgtagagctgcaagaaaagcctccagattgaggacaccggcaaaaaagcgaatacagagtcctaggccagcacatccaaaatttacatccccagtgagtctccaaacggagtagaaaatttcatggaaccctaacaaatgttcatcaaatcactcatctcctaggaaagggtagggttaaataaatgaaatgatcatcttttcggtttgcctgtgatattggaatttatcctaggaaagcaagtgttcctattacatcagaagtcatctttttagatagatacaccctgcccagaatcataaagaaataaagtctattaataaaaaatagaactgaaaactcaaccgcattctattacacctattctctttaaaaggtatctgtgtctaataaaacgatcaaatgagcttatattaagtcttcctctacattgtcttacatttttaaaatcagttctcaaatcagaattaatgttttttttttttaaatatcagaataaagacgttattttcttcaatttcagtaaaggaaaatgacattcagaggttaagtatattagtaaaagtgtccaagtgtgatctgcattatttccacatccataacacacttctgatacactatgacattgagaaaaatggaacaagtataaaaagccttgccaaaaattcatgactaaatatagacaagcagagccaaagcaaagaggggttaaggttcctcattatagattcaaggtaaggatgtgctagtccctagcatatacttactgatgtagtattaatataaacataaacctaagtgatagctgtcttaaagagtggctaccactaaaaaaaaaaaactaccaaaatattgtcaaaagtatgtaccacaaaaatcaggactcccaatgaaaacgattttaagccatgcataatttcatcccagatgattcagaaaacaaaactgcagacatttgttatattttcttttcctgttttttaaatgataggccctttccattagccacagttactaagtccaccttttctaactatacacagccatccatactttggcaaatatataaatttaggccacaaaaatttgtttacaagatttaaaatatcagacaccctaaaatttaactgggagtgattttatcaaataatgtatctcacacacattttaaggtaatcaggaaccagtttgtagcttcctgcttcgcatgctagctaatcacttttcttctaatggtaaataaggcccttttcttaatacattgtactacgttttataaaactaaaagttaaaactgcatttatggaattcagtagaaatgtggacatcataaaacctatgtgcgtgagtagacctcaatattccttttgagactgctccatctgaatactcatcttacaaaaatctagtaataaactgaatcgtcaaatggcttatttcactttttaaaaagacccttctcctataatatatacacgttttgtcccaattacgaaaacatttgccacccaatagaaactatttcctgaaatcaaaaatgaaactaaaaacatattaaaagccaaaatatttcatcatttaacaatgtgatttaatagcatttcatgacctacagtcaggcagtaatttaatattttggacaaatgactgtttcttagtataattacaacaactaatactaaataatactaacttccaaaaagaaaagaaaaaaaaggattgtaaaaaagacacattccacatgttacacggtaaggtacttaaaagaaattcctgaatctaggtcgcatgtccatatttcccccaacctcaacaaaaaaaaaaaaaaaaaaaaaaaaaaaaagcctattcccaagggtcatagggacataatggattcattctcattacaagaaaacaaaatactgaaaatgattggtaccattaagaaaaaaatactctaaagtaacatggtcctacatctgcctctaacttcattcgtctctagtttacgaagatgtgaattttaaactgctcctttaaaagcaggctgacaaagcaaacctttttaaaattaattacgtgggtttatttccatgattcttctctataatgtttttcctcgtgtgaatcaaaaacaagttgaaatcacaagttttctattaagaatagaaaaatctattatccttaaaagcaaaactccaataactaaagatctgaaagcagtggacagcagtgttcagcctaggattcacaagattatttgttaaattcagcccttccttcactctgacaagtctctaaggtatgattattgttaaaatacctcttcctaaaataaatgagttacataaaaatatacatacaacgactgttgttcctctctaacagattaggattttttaaactttcatagcattaacatgaaagaaaaattatttggaaaaaaagacacccagcacaacttgcttagaatatagtttccctaattcatcgtgtaagcagttcaaacaaggctcaaattacctaatctaacaaaacaatgaagaaaaaaaaaagattatggggcatttctgtattctccacatcaaaagcaaatatgaaatgattcttagtatttcacaggaatatctcatttttccccttttaattattgttatctgcacaaatatgtggtttcctcatttcgttttttaaatatgtcaattctaaccaaaactcctcatccacaaatatctttgaacagtcagaactgataaatcacaaaaaaatgaagcttaaatcttgtttatcaggtgaattacacatcaccaaaatatattgctgcctatcaaaatcttaaaaaaattttaaggttttattaagctgcgtgtgctgacagaattcaaatttttccatagttgaatttgtaaagggaagacttttataaaggctttacaaatccaaaaattggtaaaattcgtggtttacttatttttcaatggccttatcctcagcctccaattaaagtctatgatatatgtaatgtgcatattctaagactatcatcaaagatctgaattttgtaaatgcccaatactggacaccagcgaactgtttttctgtatttgatcctcttattaataactatgattcataatagtttcagctttaaatactgaaccttacatttgcttgtaatagagctcagttattatttgtggcaagaatttttgtgactgtactgctcagcacttctatttacatcagcagtgctaaatgcccaatggtgagaggggagccaatcagatggcagattagatgtcaactcagaggcagctgtctggagactattacagccagtttacctccacaattcaaattccaaaccttgcaaaggagatcaagtcagtctttaggctcagcctactagcaagaaacagcaagagtgcaggacacttcctaacagcgctgtaggactcgggtgacagcaaaataaagaaaatccaaataaatacgatcccaaaagatcaattttcactggtctgctatcttactggatttgctgaataaaatgcatgcctaatccatgatcaaaataagttcaattgatccggaacgtgctcctttcacatagcctgcctgttgaaggtgactccctgcaagcagcccgtaagcccaataatggatttccctggctattctaaggaacgaatcgatgtattttacaatattgcacctccatgtcgttgtaaattttgttattattcctaccagcaaacgttcgagctcgaagcccgcaccgagtgtctctgaatggctctccctaagtaggaaaaacccactcgcttgtcacaaagctaacctattttccctgcctggacctcggaagccaagagggaacgtgctgtggctaaaggtgtgagaaagttcctcattctttcccccgttaaagcacattgtgggcgctcccagaaccgatcgggtggctcttcgccccagccgtcctggccgggagagcctatttgttacaaaagcacccgaacggtccccgccgccccaaacggcgaccgcgcgggtggcgcctcgggatctcgcttcgcgttcccgggcctgggggaggggggggacgcgggtgcgggccggcggggtagaagccacccggcccggcccggcccggcgaagccctcccaggcctggacagcgcgccggcccccggggcgccccgaccgcggcgggaggcggccgcccgtcaagatggctttgggcgccgcgcccccgccgcccccgcgggaagacggggaaaagtacgcggcaaagaaagaaactcaggctcgcggcgcggcgaggccgccgggcggaagcaggcccggctggcgcgagggttacctgggatctgcccatggtcggtccgggggtgccggggctcatcgccgggtgactcctttgttgcgcggccgcccaggccgggctggcagcggcgtactgggcgcccatgtccttgcccaagcccatgcccgcggccgcctgctggccgcccgccgccgcccccgccgccgccgcctgggactggggctgcgacggcggcggcggcggcgcgctggggctgctgtactcggggtagctgccgccgtagctccgcatcatggggctgggcgaggtgagcagctgattgagggtcggggtggcccccgacgggtgctggttctggccggcgaagcgctggaagccccccgccgccgagccggcggccgccttgctgaggctcgcggccccgccgcccccggggcccatcatcatgccgccgccctgctgccggggggagctcagcaccccgtaccccgcggacgagcccccatagccgccgccgccgccgcctcctgctgctgccgccgccgccgcggccgccgccgccacagctcccgctcctgctcctcctgctcctgctcctcctcctcctcctcctcctccgctgcctcctcctcctccgccgccgccgccgccgccgccgcccgcgccgggccggctgtagcccggataatggttgcactggctgttggggtacccttcgtgggagttctgcagggggtccatgctgccgggggccccggcggcggcggcggaggcggagt

SEQ ID NO: 11201 - DNA, 6000 bp, Homo sapiens
gaaagttcaaatttgagggcacccatggagatggttgtaatttacaagacaatctaaataaatcggcctttcaaatgtgggcatggttcctagtcttgcaatctagccccattaatattcattaatcaactcatatgataaggatttactgagcacctactactggccaggcacagggccagctgctgaggatactgtggtgcccccttcagtttattccctacacagcagccagagtgagcctgctaagtaaagttagatcccttccctgctctgcacaagaccctgtcatagctcttctcattgcgctcagagtaaaacccaacatcctgcaataatcccaagactcgaatgacctgccccctaaatctctctgatctcagctcctcctactctcccctcaccttctcagctgcagccacgtcctcctcaccaccgcaaggccttttgtcctcgccatcccctctctctgcaatgtcctccccctagatactggcatggttcggtccctctaatcttaaaggtcatgactgaaatgttagtggggtccttctgggtaccttctctgacagttcagctcttacatttcctactcctttccctagctttagtgttctccttcataccctgtactatccaaataccgtattttccccatttgtgtagtctattgtctgtctcttcgctagactatagcctccatgaaggcagggattcttgtctgatttatttacattgagtctgctgtgcctagggcagtgcctggcacatagtaagcactcattaaatatttgttaaatgaatgaatggtgaacatatagacaaggtccctgctcccatgcagcctgcattctaccaacagaaggtctgctgggggtgtgggatgaggaggggggtggtgtgggctacaaaccgtgagtgacatgcatcttcagggccccttttctccacgggtatcatggtgggattgcattctcaccagtcttgagccaccacagtttataataggagttaactgcctgctaattagcagctgaagccattaattggctatttgttagagcccgaattaataaactggtctttcagcggggtcataactctcccgttcctcacccctcccagtcatccttcccccacatgaccagaaagcgtcttgcaatgagattgaatcaatacctgccactgtatgattttcagagacaatttctctcacaaggcgacaacaccatctagcaaagactcttcctctctctctctttctttctctcctcttccaggctgtcactcgccggaggcgagctagtggcaggaggagatgggagagctttctagtaacatgctctcacaacaaaccgcagttgccctgcttgctcaatgcctggagcccctggttccctggcccctggcttgtggtcagcaacgagttcctgaaacctcctggggcccaagtgctaggttttctttgaggcaaatatatatatatatatatatatatatatatatatatatacacacacacatatatatatatatatttttttttctagtgggaagtgacctagaatgatcttgagtggaaccgaagacttggcagctgggtgctgaccaccaagcctccagatagcctgacctcaggctcatcctgtgccctatggcccatgtcaggtctagcagtctagctctcatgtcccccctgcccttggtgcaatttgggggccagagtattgttctctgtgtctgtaaagggaacaggaaacagttcttgtggaaacattatttgatacctaggcccttgcccctcttcagtatagaacagtgggagagggcaaggtcgccgagccaagctactgaggtcaaagctcagtttggccccttagcagctgagtgagtcactacatcttcctatgtcattccatgagaataacagccctgtcttacataatggttatgaagattaaatagttaatacagtgcctggcatgtggtgtcagctgttattcttattactccacttctctctaggaagacagggatcttacctagtttacatctggggaaactgaggcctagagaggttaggactgggacgcaggactgatgtctagggctctttcccttctctgaggttgcctcccattgtcagacactgggctgtgttgaggcagcaggcagggcacacttgggggaggagacagctgaatttacagacacacacaaacaggctgtcaaggtatttacactgcatacaattagctgcagagtattcacaagtggattagctacagcaaatgttcaatcccagcctggctaacttggtcctctgttccccccaccccgccatcatgaaccttctttctcctccaggctagtgtgtgagtttagagagggcaaagtcaagagaatgtcagctgagtcagtgcagttctctgtccccagtaactcaccccaaagccaaagaggagcaattgactgctgtttggtgttggaacagctaattggaaaatcagagcgcagtttcgcacgacatggagaagtacacattcagctcagaatgggcaaagccaggaagagccacagtcgctgtgatcactccctgagagcttcctggaaggggtagagacttccaggaaccctctaataatgggaagaggatgacaatagaagaagctatccctcatcactccctcaattggcaccacttccttttctgactggatgggggaggcgggaagaggcatggtggctgtgtatctctgtgggacagaaaatgaattttttgcctttgaggtaacagtccggggctggggagtgaaaggatggctaccctgagggtatcccaggtctgtgatatctggccatgatgggcatcattcgtgaattcactgaacatgtctgcagctggcatctgctgggagcaccgcactgagtctggacttcctatcagccttggacccacggggtagaaaggagagaaaagacggaagagggcacaagggaggcgcaaacgagtggaggtgggctagagaataggaatcttcggatgttctcgggcttcctgagatggacagaaagggggctgagaaaggaaggtggaacccccccatgccaccaggcacttcccgacacctcccgctcctcttccagcagtcaggagcgcgcgctccggtggggcttaagccctggagagtcaagggaggagagacccagcaggaaatgggcctggggaagggacggttcattattattattttaaaaaaatttatgtttcaatttatatgcagactaacctttttggagtgtggagatctttgagttttgacaaatgcatagagccgtggaaccaccatcaagatattgagcagttccagggggcgaagggagggggggttcgtagtctccccgcttgttagctgctgcgattgtctgcgctcccacgggccgacctaaaacaattcttgcgcacacgctgagataaataacggcgacaggtggagcaggtgagattagcaggacccgggttgggcgcggggcgggatcggaggcgcgggggaggccaccagcctcgcttgccagcctacgcccctccccgcgggcgtttgggaggagcgttctccgcactcctgctccgcgagggccccttcgaggcggctgagacccgagtgccggactcccgccgctggagcggggctcgggttcggcagccggaaggaggtgtgcccccggggcgcttgggggcgcctgaggtcccgaggggaggcaagatgggaagagtggctagccgaggaaaatgtggggtgacttagggaagctctggcggaggggtcgtgcgagcaaacctgttggcaacctgtgggccgcggcaagggcaggagctctcagcgcgacctctccgccagctgctccggcccggccccagcaccagacgcctggaaaggggcgggggcctctcgagccgggcagacagccttgcagacccacagccgcggcccgtctcgcgcggctgcaggaccccaggaaccgcaggcgcccggcctttccctaggacccccgcttcagtcccgcctccccaaagtgcaaaacatttacgaagtgtgcagtgccctgcgggcatgggtctccgaagcgagcggccgtgtttgccccgcgggctgctggcaacggtgcacccggctcggccagctagtctgggtgtgcaaggctggagaacagcgagtgtgcgagcgcgcggctgcagagcccccgccgaaacccaggtccctccgccactgtcctcgggatagatggatccatttctgctttctgacattttcctgctgggcggggttgggggggaatgttagggggcggagagaggaagagagagagagggagaggagaaagggaaagagaggagaggagaggaagggagagagagcgagagggagagagagaggagagagagaagagagagagaggagagagagagaaagagagagagagagagagagagagagagagagagagagagagagagagagaaagagaaagagaaagagaaagagaaaggcaggcagtcagcttcccccagccctgttttgttttctctaattggtcctgggggaggcgaggaaattggacagaggctgggccaggcgagctgggctgcctttaattggctcctttttttaactggaggggaatcaaacaggagagcgagcgacaacgggtgggagagcgagagaccgaacgaggagacgcgaggaggagggaggaggaagagagggagggaggcgggaggagcgcggaatgaaaagctcggaggggcgaaaaagcagcacagcaaagcccaagttgctgagcgagcggagcgctcccgcggcccggagccgagcggccgccgcgccccggagcccggcccggccccgcccgctctgggcccccgcaggccaaggccgccgggcgggggcggggacgaccaacttggggcgcggcgtagccccgctctcccgagagctcggagcccgggagggctacggccgcggccagacggcgggagaggagcgcggcgagcggaggcggcgagcggcgcccgcgccgcagccccggcctgggcgagagcgcgaatatttttcaaaagactcaaactttcctcctttccccgttttctggggcccttcttgcctggaattgctctccagattcccgcggggcgccgggctgctattcttcccccgggtttatcggcggctcggctaacttcacggacccggggacccgcggcgctcgtccctcggccgaacccagcccgcgctgctccccggatcaggagggccgggcccggggctgcttcgccgccgcgagtgctttcagcccggccccctggagtcgggccgctgagcccacggcagcggccgcaggactggaaacagcagattgattaactcgagcggagccccggcctccccgactccgctccgctgaggggcggccccagtgcggggaaacgacaagtttgtcagtcgtccgtggcctgttggatcgaagcgccgcctccgccgccgagaggtccccggcgcctagcatcccgcgcggacggccctgggtacccggggcggctcggcggccgggctcctcgggtcggggcgctggctgctgtgccgggcgcgccgaggcacccggggctgggccagcgccccctgcgtccccacgcgggcagcggccccgccggaggagaaacacgggtcgccgccacctccgcctcttcagtctcctggtcttcgtcgccgctctctctctcacctctcagggaaagggggggacataggggcgtcgcggggccccggcgaatgcgccccccgccgcctctcgggctgcgccgcctcgcggggatgaagcaccggccgtgaagatggaggtgacctgccttctacttctggcgctgatccccttccactgccggggacaaggagtctacggtaagagcccgcgtcccgctccaccttggcttaacctcgcgcg

SEQ ID NO: 11202 - DNA, 6000 bp, Homo sapiens
ctgggtcagagaaaggttgtagaacctcagggagatgccagagataatggcatagaagaggaaatggaaaaggaaaggagctcaagaaagccacctcagtctcaccctgccccactaggaatgtcatcaatcaggtcctgacaggcccacagcacttagccctgtcaccattaggtccttgttcccaatgagctaagagctcagtatcacttcccattcttgcatttcctcaaattatttcatatactcctgtcttgcctccccaattgaattgtaagcctttaggctggacacatgtagaccctcaataaatacgtaacaaccatactctctacatttgtacattccattatccgtttcaaaagtcgttcatgtccattttctcatttgctcttgaactaagcattgtggtgggcagagcagatgttattgcacctgctattgttattgccaatgtgaaaactcaggcagggggagaatgacgccccaaccagtgccatagctgggcattaaatccacatcccctaacttctggactgaggttcttcccacagtaagaaaagagatgagggagggaaaggcaagagagggaagatggggagaggagacccacatcaatgtcctgcggagggagttgctgcaggagggtctgaagtccagtccagttgggggcttggttggtgtccaggcaaagggaacccaagctcagaactgcaggaccctgaggagacatggaagaaggggaggagtgaaactaggtttttctttcctttctccttctttccccctcatcattgccacctcttctccaatctagagcagcttctaagcatgccctccatttgggagggtcctccttgcagatcctcactgagtgcaaggatagctgactgatgcctgcatgtgtggtcttccttgagggaggctggggaggccccacaccccaaaacagcttcccttcttatgctttcccttcttaacccccttcacgccttggggccaaagcccctagagtctggtttgacaatacagaccccctaggagagataatgaatactcatgtgaatgagtttaaagtcaaaaccccatgttctaagcaggtgcagagacaggaattcctgaaaagagaaaaaggcaacaagagattaggcacgaagtcaaactacctccgggttggtggaaaagggtggccactccacaggatagaggacatgttggtctcagaggaagggcacgactctactacctgagcatgggtatcctcagggtcctcccccggcaggtggcctgagtcactgtctgagttggctggtggacctggatcctggggcttggggctgtcttcttggtggggccagccagagttctgcactgacatttgtggcaaagcctaccccaaaacaataagaacacctccatgtattaggccgttacaatgtgctaggaagtgttaagtgctttatagatattatttccctcagtcctcccaacacccaaacgacttaggtagcattatccccatcttacagatggcccaactgaggatcagaccttgagtagcatgcccaaggtcaaacagctagtaagtggcagagccaggacttgaggtcaggtcttttggtccagaatttctgaagttcaaattctggggtctcccaagatcaggatggaggtaagaggaggcccatggtagaaggagagggcactttgcctttctggtgggcctttggacactctctccttacctcatcagccttaacttccaccgtttctcaccatgcacccacagccccagtgagcctccttgttcacaacttcctacatgggcccaggttttccagctatataggcttgggcctctggttaaaggatccccttactaggaagcccttctcagcctctgtgaccacaccagctctcccttccctgagctcctgaagcaagcagtgccccaagatttagcacctaatgtttttctctttgctccctgcatctctctcggctcctaatctagtctataagttcctcaaagacagaggaacaccttgcacttttatatatagcagcaattgcattggataatctaagttcatctcttcagctttcctctcggcagctcctgatatgaccataatatcttgggggtaagaagtgactattggctgggcacggtggctcacgcctgtaatcccagcactccgggaggccgagacaagcggatcacgaggtcaggagatcgagaccatcctggctaacacggtgtaaacctcctctctactaaaaatattaaaaaaattagccgggcgtggtggcgggcgcctatagtcccagctactccggaggctgaggcaggagaatggtgtgaacccgggaggtggagcttgcagtgagccaagatcgcgccactgcactccagcctgggcgacagagcaagactccgtctcaaaaaaaaaaaaaaaaaaaaagaagaagtgaccattggctgggcacagtggcttatgcctgtaatcccagcactttgggaggctgaggcaggcagatcacctgaggtcagtggttcgagaccatcctggccaacatggggaaaccccatctctactacaaatacaaaaataagctgggcgtggtaatgtgtgcctgtaatcccagctactccagaggctgaggcaggagaatcgctccaacctacctggaaggcagaggtggcagtgagctgagatcatgccactgcactccagcctgggcaacagagtgagactccgtctcaaaaaaaaaaaaaaaaaagcgactattaatgtagagaagagatgagccccgccctcaaggagctcatagtgggtaagacaaagatgaaaccaggtagaatgggatcaatcagagctcgggacagacatacaaaaaccctggagaaaaaaataaccagagcaaactttttaataatatttactctgtgccaaggactcttctagaatattacataatatagtccatcctcacaataatcttatgaggtaatctctttcattccacttgacagttgaaacaagttaattaacttgcccaagatcataccagaggctaagggaagccttagggggacctggcttctgagagctgggatagattctgaaagtagctgggcacaggagggtcatcatcaaatccctggcctctaagactgggccagggattcgtactggggttgaggtgagggtttggactgtaacagttaatattgcttcccagcactgaaccctcctcagcaccgcccctccactcccacttcaaatgtcctgtgccacccttccctccttcctggcttcacacccacctgcttccttcctcttctgtccttcaggtcaggtttcctgtggaaggtggccaggatgggctgttcacaccaggagtagccactaacagcactgcccctgctccaggcagcaagaaaggagggggcgtctggggccccaggaggggacttgcaccctcttccattttggctctagtttgcatagaattgtccaacacagaaacaacactcagaaatcaggcctctattcctcacccttccaatctccccaaaggcagccaaactccacctccacctagcactggaacacccttactaacaggccagctggattccttccataattcccttccccctcccacctcagataagggacagagctgaaccccttgtcttgcctccgtgcagagcctccgtgcaagagggctcaggagctggacatccccaacacccgctgccctgaagggcagagcccgagaggacttagggcttggggaggtggagggatgggaagatttctggggacagtgggagggagaaggaaggggagtgcccagtcccgccaactgccctctcgatagatccccagagtttttctggaacttggcgggcccgcctccggggctgggacgcggtgtttcccgagtccgctggggttcccggtctggctgctgggattttaggggaggggaccaggactccgctggggtctcaccctcgctgtgcgtcgctgtccgggcagttctggaccgactctgccgtcaggcccctcacccggtccccaccccaaggcttcagcgcccgcccccgtccgcccccgcccgccctaatagcgcggcccttcctctcccacgccccagcggcccccgcccgcccctccccggctggtggagaggggcggctcagggaggggcctggagctgcagattggggggaggaaaaaaaaaaggaaaacaaaaccacatttatgggatctcagggtggaaatgtgcgggctccatggcctctgccatgcaggtgcaagggctctctggctcggactgcgcccggcaggcatccagcagacgccgggagccgcgtttacgctgggttttcaaccattcgctgaatggaaacgcctcgccgggcccgcagccctgtctctccgcagttcccaggtctccccaaactctccctgtggtctcccagccccgctcctccgcgtgtttcccttcagttctctcccccttgtccccagtggtccccctggccccttcccctcccctcaaccctcttccaggttccatcgtcttgcccttctcctttcaggtcccttcagaccctctccccttcccttcgtttctcgcccaaccctccgtcccctttccgctccccggaccacccccaactttggtgtcctcagccccgcctccgcgccccgcctccgccgcaggctccgccctgtcccctccgggcttgctcagcccctggccaggagcgccctctggcgtctgcgcatgctcactgctcccgactgcaaagtcctccaaagggaccttctaggctgcgtgccggtcgcccccgctcgggtccgccagcccgcagcgtctcgttggtgctgccggtgacctccgaccccgcggccgcggggcggggcggggcggggaggccttagctccgggcgggcggcggctgctgcagcgggacccgggagcggggcccggcgccgcccgggccgcggggcgatgtgagtcggggcgcggcggggcggggacgaggcggcttcaccgaggccgcgccgcgccgcgccgcgccgcgccgcagtctccactccctccctaggaagccccgggcgggcgggcaggcggcggagcaccggggctgggggcggggatccggggacagcgcgcacccagacctcctcattccttacgggcatgtagaaattccccttgacagtcctgtagcctgtcctgcagcctctggctcccccaacccacctctaccctctccgccctggacacatcatcgcatctcctggagccctcagaaccccctcattcactcaacaaatctcctgctatgcccacggacccaccatttctcttggatgcccccaaatgcttccactgcccggaaattcctaggatccctcatatccccattctccttgcactatccaaaatgcccacatccaaaattcttgctcatgtttccccaaacgtcctcatacgttttcagcccccacacccccctctcactcctgcccctgatccatacctatcccagaccagaggcctctccccatttccactcaatgcagtccctcctcagtgggctatctgatacatcctgatatcttaaggagaagagatggtgatagggaaattcagcccctcccccatcttgcaccctagagttcttcgtttcagtgcccgcgccgtgcccccgtcggtggctcaagccccagtattttcccagcaacctatctttagtctgtgcacacctccctgagcctgcttcttccttccagaaaataagccagaccaaggggatggggtccttttacctggaagttgtccaaggatgcagggtgcaaggggccctgggaagtgtttctccagagcaggaatgtgggatgtccagggtctgcagagtcctggcttgttgacttgtctaccttgggctcagatatcctgaaattttggctt

SEQ ID NO: 11203 - DNA, 6000 bp, Homo sapiens
tcttatggctttaattaatatttctgatacagcagagtataactcactggtaaacaaaaaaattttttctttcatgagagcaagttcaagccacatcatcatgtttacaggctacattaacaatgcaaaaatagttttattaagtcctatgcagagatatgtattattgtaacattagcaacttgtgatattacagttcctggcttataactcccatatcctttgttagggttttttttttgtttgtttgtttgttttaacattagggggttttaggcctcaggagcaggcctcatgaaacagaatctccctctctgaccttaccctgtcctccctttacctacctaaggcaggactataatctgattgtggctcaaaagaccctcatttcagagagggtcccaccccataccctagaggaagaaatgctataaagagatgtcaagacaaacctgaacagacaagctttactgggtttccccactcaaactgttagtatgggatcataacctttttgtccaatcgcatttctacatggttgtcaatcgtgactatgtaatgaagcttccataaaaacccaaaaggacagggttcggagagtttccttacagctgaacacgtggagggttcctggagggtggcacacctaggggtgcgtggaaggctctccagtccttcccccataccttgctctatgcacctcttcatttgtatcctttgtaatatcctttacaataagccactaaaggtaagtgtttccctgagttctgtgagccactctagcaaactaattgaactaaaaaaaaaaggggtcatggaaaccccaacccagagccatttggtcggaagatctggaagcccagacttgttactggtgggaaggagggggcggttttgtgggactgagcccttaacatgtgggatctgatgctatctttggataaatagtatttggattgaactggaagatagccagctgatgtctgatgcagagtcaattgcttgctttctagtggggagaaatctccacctacttgggagtaaccagtcttttgtgttagttgttgtgctatgagaccagaggaaaaatggattgtttctcctaaaaccagattaatgtcaacaaaagaattgacattgtgttgtagccactaaatattaaaatatgggcgtatattttgagtagcaatgcagaggccgactgccaatcaatcttttatcagacacaagtatatggacacacttttacatgctgtgcacatggcttttcagagttcaccaggtgaagtgcaagaggcagtgcccactccactcagtccttgctcttccctccttttcccttgtttctggttctctctgcgtaagctgggcaggacttgcttctgagttcctctggggacctgctgcctggggtggggtgatcactgctgtgctagcaaaatccagaatactgtgggtcttgccctattctggacagtgcgatgtcatgttttccttgcaaaaggcaatctgctccatctatgcaagtttggttggaggagtctggaggtatcaattagggcttttgtctacactcaaagtcatttccttggagacaattctcccagtttctactttgtgtgagcagaagggctgcatttggggaccttggctggctgtagcagtagggttaaggatccagagaaccagcctaggagttgtagtagaggctgctggtgcctcccagttccatgtcctgctgatgatactctactgcaagaactgcactgtttctatttctatttctttctttctttctttcttttttttgagacggagtctcactctatcaccaagctggagtgcaatggcgcaatctcggctcgaggcaacctccgcctcccgggttcaagcaattttcctgcttcagcctcccgagtatctggattataggcgcccccgccccccacactgctcccttccatgcccagctaatttttgtatttttagtagagacagggtttctccatgttggtcaggctcatctcaaactcctgacctttggtgatcctcccgtctcggcctcacaaagtgctgggattataggcatgagccaccgcgcctggccgaactgcattatttcatctgaagatttgctctcagctagtacatgctaagtaggccagaaagggtagattcatgtggcagtgacatgctggaggagggacaaggttattggtcctatgatttagtctcagtcttttagtgagcctgtacccctgggtttatgaacttcacttggcttttttcttctgccattagttggcataaaaacaagctagagatgagattttccctttccccaagttaaagattagagtggctggggttggcatttttccttcccctaggtaggttaggctctggtaaaatactttactttgagggcaggcttttgttaagaagaacagaccagaactctcaaggttgtccaccctgagcctccaccaattcgtcaattacagttcaagtgaacccacggtactggcgccagccgcagaggactctgctcgcagtacactcttaacctctgtatctgcctatctctgcagttctgaggaccgcagtttatcctgtgatctcaattctctgatgcatcctagaaaagttgtcgattttcatttgtttagcttttttcttggtgtgagcatgggaaaaatgactgccaagctctttatgagttggactagaaactccacgggaggtttaatatttttaatctaagaaggtcaagaagtaattttttaacctcttgccaactcatctcagttttaacttttatttcagtgcttccttttacaaattgttacataataatgacatctttttgtgaaatatgtggtattcccacccacctgggcatggaaaggccctaagaggtcagcaagcagttagagaagctggtgtttaccggaaactcaggagaaccagccaaccacaacccctgggttaccttggcaattgcagaataaatgcattatagttactaaagtaaaaaattagatatgcctgtttgcagattgaactataaaaataccattcaaagacaaatagatctaaaaataaaatggaaaaacataaacactaattctgtaaatattatacttaatgcacaactgaaacaaaatttgccagcttactcaatatcaaaatctatgaacagtttttctattttatataatttccctctcctctctctggatctcgctccccagctcattttttcttttttttgctctgattctttatacacctctgttgcctctgtgataagcagcttcaaagatggttcctaatgctttattggatagaatacaacaaaagcgatgaggtgttgcttccccaattacattacgaagcatccgtggcttccatctccagtgggttcacttgctgtctggctctaagggaatccagataccataatgcgggctgccctatggtgaggtttgcatcactaggaactcatgtctctgggcaacaaccaatgaggtcttgatccctgccgtcagccacatgagggagcttggagctcggaagtgaatcctcctggagtcaagccttgatatagctagccctggcagctgcttgactgcagccttgtgaaagagaccttgggccagaggcaccagctaaactgcccctggattcctgacccagagaaagtgggagatgatgtatttttgctttttgaagctgctgaatttggggataatttgttatatagcaatagaaaatgagtaactcttttgtattcctctttgtcctggcttccccattttgaggaaaataaagtaaatcaaagtgtagagctgaaatattcacatgaaaataataataaagttttaaaattatttgaatgtcttgtgttgacattccaaaatatatgaattccaaaaatttatatgttgaagtcctaactgtcagtatcttagaatgtaacttttttggaaaaggggtcatttcagatctaattagttaagatgaagttatactggagtacagtgggcactaaatcgaattggtcctatgattgagtctcagtctttcagtgagcctgtacccctgggtttatgaccttcagttggcttttttcttctgcccttatttggcataaaaacaaagcaggtggatcacctgaggtcagcaatttgagaccagcctgcccaacacggcgaaaccctatctctactaaaaatacaaaaaattagcctggcgtggtggcgggcgcctgtaatcccagctacttgggaggctgaggcaggagaatcacatgaacccgagaggcggaggttgcagtgagccgagatttcgccactgcactctagcctgggtgacaagagtgaaactccatctcaaacaacaacaacaataaacaaacaacaacgatgacaaaaaaagctagagctgggattttccctttccctgtgttaaagattagagtggtgtcctcacaaaaagggaaaacttggatacaggcacacacatggggagaatagcatatgaagagacacagggagaaggcagccatctatgggtcaaggagagaggcctggaacacatctttccttcaccgccctcaggaggaaccaactctgctgacaccttcatctgggactcccaccctccagaactgcaaagcaataaattttttattttttacaccacccagtttattgtattttgttaggcagccctagcgaactaatgtacatagagttcttgagttaatcttcacaaattactgcaataaggtagggtcttttgttatgtaacaatgctatgaaatcatagcgttttcttaattaacttccgtagtttaaggtactaagttctggacaccacgtgtcttctttctataaataccaggacatgctctgtttttcagcactcattggacttcagcatgactactcagttgccagcttacgtggcaattttgcttttctatgtctcaagagccagctgccaggacactttcactgcagctgtttatgagcatgcagcgatattgcccaatgccaccctaacaccagtgtctcgtgaggaggctttggcattaatgaatcggaatctggacattttggaaggagcgatcacatcagcagcagatcaggtaccatctctaccatctctccagtgtactggattctatgagaaaggagggggtcctaggagacagggccactgtcagggtcagttacacttttagatgatatatgtatcagagtagccaagaacctttattttacagttagaattctactttcctctcaaaattagagcaaggacttccctaaaagtaagaacaaagttaagaaaagaacaatttgctcattatcaagaagcagcagacctttgaggaactggccataaattcaacatctttgttccccttttctggtacagatggaggatggaggataaatgggtcagggactaggtgctattttcagagtattagtggccttcatgtactcatgtgctattaaggctttgcaggttttcgaataaatttataatctgaaaacaaatttaagttttcaattccttgccagcatgcattatatacttcacacttcattctaattacaagataaaagtatatgtaatgcattgtgagtccttaagtttagtgaaggtttcagtttgaagttaatcatacagtataaattgtggtttacacaaatattattttaaaagctattgatcgattaggtgtagaccaggaatacatgaagtgtgataaaagtcatggataaatgtgtattacatatatctataaatatatattcttttgtgttgttgagttaaggtctcactctgtcacccaggatggagtatagtggtgtgatcacgtctcactgcagccttgacttcccgggctcaggtgattctcccactacagtctccagagtagctgggaccacagatgcatgccaccgtgcccagctaagtttt

SEQ ID NO: 11204 - DNA, 6000 bp, Homo sapiens
gacaagagaaccgaggaggacaagtgactaaggaatctattccagattactgttatttcacaacaaggggaaatgtgaagttaggatcacagaaacaaagaagtgtagctaagaataaccgagaattacagctaggaaagatatcaggaaaatggggctggaggtggcacacgaaagggataggaaaacatgctgagacttctaaaattaggaataaaacaaaaccaataataccaataaatgtgacacatattggtatgagtcataggttaagggcagccaccctgagaagaaaactagaatgtataacttttaaaccaacagaaaaaaaaccctcagtatactaaatagaacacagttacggaggggaaatgccagcaataaaaaacacaataaatacatgtgcaccaggcacagtggctcacgcctgtaatccctgcactttgggaggccaaggcaggaggatcgcttgagctcaggagttcaagaccagcctgggcaatataggcagaccccatctctacagacaaatatagaaaattagcccagtgggtggcgcatgcttgtagtcctggctactcggaggctgaggcagtaagatggcctgagcccaggagttagaggctgcagtgagctatgaccacgcggctgcactccaacctgggcaacagaggaagaccccatatcttaaaaaaaataaatagataggctgggcacggtggctcatgcctgtaatcccagcactatgggaggcagaggtgggtggatcacaaggtcaggagattgagaccatcctggctaacaaggtgaaacctcgtctctactaaaaatacaaaaaaaaaaaaaaaaaaaaaaaaaaaaactagctgggcgtggtggcgggcgcctatagtcccagttactcgggaggctgaagcaggagaacggtatgaacccaggaggaggagcttgcatcaagccgagaccgtgccactgcactacagcctgggcgacagagaaaaaataaataaataaaaataaataaataataaataaaaaagatggcagagctaaatcctaaacagtagtaattacaataaaagtgaactactaaacttatcacataaatcactgaaactcccaggttggattttaaaatatcaaataatatacactattttcaaaagacaatgttaaatgtaaagattaaaaataaaacgtgctgtatctgcgaagaaaggctactttttaattttttttgtatttgtttcttttagcgactacaatatgctttattgttcttagaaaggactcagggtttggctttaaatcaggctgcacgcttttcatcagtctcgcatcgctctccccatgccaagctggctctagctagcaatgtcgcattaaatcccagggcaaccttcaggaacttccagaagcctcccctctcctgaccccctgcagtccaagacccccatatttgcccacacccctgcttagggtccagccctagaactcactgccccgccccaacctgccctggaccagcctggcagcaggagcagaggctggaggcaaacacccaacttcgcgccagcacctgtgccactggggaccaggagcccagggtgtgacacacccagaggaagcagagagccgctgcgtgagtcaccctggccctcaaggctgtcacagctccagtagccctgccccgcccacttgcaactccaggccatggggcaggaaatgcttgaatccttgctacctctcagaccccaacccttcttttctcctctttcctcctggcccggttatcttttcccatttccattcccactttcagactcgttctttctttgcttaaaaggcaagtatttcagccatgcgcggtggctcacgcctgtaataccagcactttgggaggccaaggcgggcggatcatgagatcaggagttcgagaccagcctagccaacatagtgaaaccccatctcgactaaaaatacaaaaaactagccgggcatggtggggatgcctgtaatcctagccactcaggaggctgaggcaggaaaatcgcttgaacccgggaggcggaggttgcagcgagcctagatcacaccactgcacaccagcccgggcgatagtatgagacaacgtctcaaaaaaaaaaaaaggcaagaaaaagacaagattttcctggccctggtgcactctaggctcagtcaaaccaactgaagacagcagtttgctgtccgtcatcacactatgttttctagaagattctatcctgatgaagcaccccccagactggttgaaaaccaaagttactcttccttggaaaatctttgtggacacccaggtggagattcaaatttccaagttggggccaggcgaagtggctcacgcctgtaatcccaacactttgggaggccgaggcaggcagatcacctgaggccgggagttcgagatcagcctggccaacacggtgagaccctgtctctattaaaattgcaaaaattagccgggggtggtggcaggtgcctctaatcccagctactcgggaggctgagggaagagaatcgcttgaacccgggtggcagagattgtagtgagctgagatcgtcccattgcactccagtctgggcgacagagtgagactgtctcaaaaacaaacaaaccggaaaacaacaaataaaacccaacaactaaaaaaggcaaaaaaaaaaaaaaattaccaacctcgatgctgccaccttcaggccgctgggggttacaacctccgctccagctcccctctgaacctgtgctattcttctgagtcccattcactcccacaactgtctcattcattcactggttcactcagcttccaaccacccttacatcacgtcaggctcaccaggtgatggagagaaaaatcatcctctgtgggtctgaaaaacatgcctgagtcttgatggtgggtcttgttttcatttcctccccatcacagcgcccccagggccatgaagaggccatggcctgggctcagagatccagctctcctcagggtgggcctggcagttgctgacttcagggagagctggaggcctcacaactgaaataggagacctgccctgggtccttagcatgtgcaaggacagggttccttgtagaatctgctcatttcatctgtgttcatagcatttgtcattttccacatgcagacatccattcctagaaagctgaagaagcttgcacaggaatattcagccacaatatcagctgacttccatatctgaatgcatgatctctagatcccggccattacaataacatttgggccacttctatccccatcctgggcaggcctgagtctgttggccagatgcctgcagcaggggtgagtcaggagggcccaggtgtgcacaaaagcccctcctcctgtcctgcttggggctctcctgccagcctccttctaccttcctcctgttcccccagtcactggcccaggtcacctggcctcggggtggtgctgccagggccttcccagaggcctcctcccaggactaacctgggctcctgcccccagccctgtacatgggaggctcttctcacacacagatcctgggacccgccaagctctgcccctcccaaatctgagaactgcccacccttgtgtgtctgttgtcctccaaactaccctccacatggcccctcctgcacaggggctctagtgcatcaggccagaatcttctaggctcctgtgtccctgctcagtcacagaggtggctgccctcccatgactctgtcctgaagcagaaacaggccctgggctttgtccaggcctcctcctctttcccacagcctcaggaccctcgggattgatgatcaccaggtgcaggtgatcccaacatgaagactgtacggagtgggaggtctgtgccgatttttctcattcaatagggaatgggctgagtggctggggcctgagtggcactcaagatctctgtccactcctcatcccaggctaaagccctcccttgcggccaagggccactgggcccatcacctccctctggcttctgcccacagatctagatgtttccatggtgactgagacgaggatacactcgggttgccgctttgaggatggctgcagtcaccatccagggacagggcagagatgcgcgtgcagccatggatttgcgtgtagctggccacagatgggtgtacagcaaagtgagccccacgcatgcgtagaccctccctcggcttctgctctccatggaaacacaattgatcatttgatcactgatcacggtaggccactagggctttcttttctttcttttttttcccagaagtcataaagggatatagaatatactttattctatatatattctatatattcctcatgcttttagtggagaggcaaagaaggtctgctccggactgggaagcagctgcgccctggacggagaggggcggggactccttggcgcaggctgaaggagggcaggtgtcgctggcggaggcagtgacggggggacacagccgccactggatatccctgtgcaagtttcttcgctttcctgtgcatcagtgcttacattggggtaataataaatggtgtgttaaaaaattaaatgaggcggtcaagaaggaatcgtgtcctggcccgcgcggagcctggggtggagggtaagggttggccagagggggccgctgtcaggccacgagcccggggcgggacgaagcggagccacagcaggcataggctccccgggtcccagcctggggtggggcggggaagggcgggacggggcgggatagggcggagcatccctccaaacgtgggcaggcgtaggctcccctggatcccggggcgggacgggaccggacggggccgagcacactcaatcactagctggcatgcgagggccgaagtgattcatacgctggtctccacatcgactgcgccttgtgtcccgggcgctcctggtctacaatggcagcggccgccagccccgcgatccttccgcgcctcgcgattcttccgtacctgctattcgactggtccgggacggggcgggccggtgagttcggggatggagcctaagcggggcgggggccaaacctggggggctgtggactgcagcgggtttcagaggagggaagccttctagaaggaccggcgcgatctccccggactgcccccacgctcagttccgattcgctgctctttttcgccaggtccgcttcctgcggctgctgcttgccctgcagagcaggaggggggtcaaagaaggcgaaaaaagaaccgcaggagggtggaggggccaaaaagctgcagagggcgaggtggggaggggatccctggtgcaaccccgcagccccactcgtcctcgggaaggagaaaccagagcccccggaacccgagctggggtcaagacatgggtgacgccagcgtcatatagaatagtcactaagcagacaggagtcagcaaaccctttctagaaaggaaaggctgaaggcactttggtccttgctggccgtgagttctctgtctctgtgtcaagtcccgtccctttgtagagcaacagcaggcaatggcaacctgcaagtaaaagagaaacctgaaatggaccctgtcctaggttgcagactccagatgagggcacatgctgtgtcctggcaattgctgccccatcccctagggtgtcatctctaagttgtgtaagttgaagagtcacaagtgtgtcctaccctgcctgtggcttctgggaggtgtggatgtgatgaatgtgagggggagtcccatggttcggggcctactgctcccctcctttgttgctgagtagcattaacggtccccaggggccattcagggaccctccctgaagcctcaggtgtgacctgagggtgggggggtgtagccatgtggtgtcctggggatcagagccaactgcttgtgcagcttcttggttccctgtggccctgctcctgcccatcccaggagacccacctgtgtcttctc

SEQ ID NO: 11205 - DNA, 6000 bp, Homo sapiens
gtggttgtttccacccatctagtcaactctcagatggtaggcaacattttcagtcctagaatactattattacagattctggctcatgcataagggattacacaaaaaactacaaccatgaaagaaagtcaccaaggggttacatttggcttaagcaattaaatgaatagcagaatagccaagttgtcatataaaaattgcccaaatagccattataagaatttatggaagggtcccttttttattgaatatgcttgttttaaaagtgggttctgggaaccttaccctatcatctagtttaaaggagcacccctgcatgcagccatgtgtggtgagctaggcagaggaaacagtgtagtctatcatggcaccatctgtgataggttgggcagaggaaacaacgtggtctatctgttcacttctgaaaagcaacagattctgaaaggcggcaattaggatccaagaagaagcatcagcaaacaataaagaacactttttctaagtttgttattttttcaatccatccttcattcactaagcatatactatgtgtcaaatcttgttctgggcactagagataaaacactgaaaagtgaaagcaaagctcttgagattctttactttagcaggggctgaggagaatgaataagcaaacaaatgaatccaagctgattcagatagtgaagtgttttaaagacaatgaaataaggggatccaacagaaaagaactcgctggggcagattagattgggtggtcagatgaagccttctgaaaagtgatatttccggaggcacttatgtgatattaaggagtctgctatgcaaagatctggtgcacaggattcccaacagaaagaacagcaaatattacaagttagatttcttcaagaaacccaaataagcaggtctacatggctaaaacacactagctatgatctacagaagcgtggtataagataactagttagggacaatactatatagaaccttccaggctgtcttaagaattacaaattgtgtttgaagtgcaatgaaaaaaaaaactcatttgagcgtgttaagaaagggtatgacacaacctgattgtttttatttattttttatttttatattttttgagacagagtctcactcagtcgcccaggctggagtgccgtggcgccatctcggctcactgcaaactccgcctcccgggttcacgccatgttcctgcctcaacctcccgagtagctgcgactataggcgcccgccaccatgcccgcctaattttttgtatgagtagagacagggtttcactgtattagccaggatggtctcgatctcctgacctcgtgatccacctgccttggcctcccaaagtactgggattacaggcgtgagccaccgcgcccggcctctgattgtttttaaaagatccttcagctcttagtgtgtccggaattggtgggttcttggtctcactgacttcaagaatgaagccacggaccctcacggtgagtgttacagctcttaaggtagcgcgtctggagtttgttccttctgatgttcggatgtgttcggagtttcttccttctggggggttcgtggtcttgctggctcaggagtgaagctgcagaccttcgcggtgagtgttacagctcttaagtcagcgcgtctggagttgttcgttcctccgggtgggctcgtggtctcgctggtttcaggagtgaagctgcagaccttcgcggtgagtgttacagctcataaaatcagcgtggacccaaagagtgagcaagtagcaagatttattgcaaagagcaaaagaacaaagcttccacagtgtggaagcagaccggagtggattaccactgctggctccagcagcctgcttttctcctcttatctggccccaccctcatcctgctgattggtagagccgagtggtctgttttgacagggcgctgattggtgcgtttacaatcccttagctagacacaaaggttctccaaggccccaccagagtagctagatacagagtgtcaattggtgcattcacaaaccctgagctagacacagggtgctgattggtgtgtttacaaaccttgagctagatacagagcgccgattggtgtattacaatccctgagctagacataaaggttctccacgtccccagcagactcaggagcccagctggcttcacccagtggatcccgtactggggctgcaggtggagctgcctgccagtcccgcgccctgcgcctacactcctcaacccctgggtggtcgatgggactgggtgccgtggagcagggggtggcgctcgtcggggaggctccggccgcaggggagcccatggagggggtgggaggctcaggcatggcaggctgcagatcccgagccctgccccgcgggaaggcagctaaggcccggtgagaaatcgagcgcagcgccggtgggctggcactgctgggtgacccagtacaccctccgcagccgctggcccgggtgctaaacccctcattgcccggggtcggcagggcctgccggctgctccgagtgcggggcccgccaagcccacgcccacccggaactccagctggcccgcaagcgccgcgcgcagccccggttcccgctcgcgcctccccctccacacctccttgcaagctgagggagccggctctggccttggccagcccagaaaggggctcccacagtgcagcggtgggctgaagggctcctcaagtgccgccaaagcgggagtccaggcagaggaggcgcccagagcgagcgagggctgtgaggactgccggcacgctgtcacctctcattaggagggtgttgttcggggttgtggaggatagaaatgagcagacagaataggggcttttgtggttgcccaggtgagagatgacaatagcttggactaaggttatggcagtagagagggagcaaagtagataccttggaaatatattttggaggtgaagaaaacatgactaattaattgagtgcggggatgaaagaaagcaacaaaacgaggatgacttctaaatttttggaatgaacaacagagtagaacaatttgaggaggaacaggtttggagggggtggatatccggagttccgcttctgagatgcctgttaaccatgataataatagtatctaccttgtagggttgttgtgaacaacgaatacgaaatatgaggagaatttagatctgtacctagcatgtagtaattgttcaataaataccagctacgacaattattcctcaagtggagatgtaaaggtagtgaaggacataagagttctgtgtgaggccaggacaggactgaagacataaatctgaaagttatataggattcaacgctgctcaaatcatttttggtgaagaacttttatctttatccaccgcgaatcaatactgcagtggactagccgtgtttgtctctccaaaattcgtatgttcgcattctaaccctcaagatgatgatataaagaggtggaacccttggaaggtggttaggtcatgagggtggagccctcatgaatgggactagtgtccttataaaagagaccccagagagctcccttgctcacttccaccacgtgaagacacagcaaggagtcagcagttcatgagctcggaattgggccctcaccaaataaggtatctgcctacatcttgatcttggacttcccagtctccagaactgtaagaaatcagtttctgttgtttataagccatccagtctatggtattttgttatagcagcctggaagacaaagacaaatacttctgtgaaatccaacaaaaatgaagacactttgaagagcactagtactcaaagccatgggaggccctggaggaggccctgagacatatttaacccaagtacccgtgagtctatgaggatggaggcacaggagagttcagtaggctgaaataacacaacgcttgcttacatgaacacacaaggaaggggaactcacacagatttacaagtaatctgttttaattaggtgtaagaaaaaaaagcccattcactcctgcaggaactccctcctcttcccacagatgtggtatctgaagagcaagacactgcttctccacttcctccgcacaaacactttagtctaatcattggagatgcaatctagcgctcgggttgcattaagtatcccaagctccttccctaccaagctgggctccacttgggcacagaacgattatcagacctggtaactaccaagctgtcccctaaggatgctctaggccccaagcatcagcacctccgttaataattctccactcttgccttgtcatcggcttttctcactcaaaactctgctccagcgagtggtccgggcgcctgaggcagctggcatgggctaggccagagagcacctgcactgattcttaggagaaaaggtcctctttctgggcgaggaagtcaataaagtaaaggacgcttcataaagtccttcgggaagcaaaacttgcttaacttcacacttccttgaacccccacgcagggaatgcttcctccgggacccggagcaggcaggctgctgtgcctggcaggccggctcctgggtgcaaggctcccgcgcagcccaggacagcagcgcgcgggctacgggcgagtggagttgcaggggcccgggcggagagccgctgtcacccagggaagctctcgggactccgggcctcccgcgaagctccggacgggcgtcaccgaagccgagagtcccggccgagcccctccgcacggtgggcgccgcgcccaggcgagcgcgcgaggtcgggcggggccgggggccgcccggggagggggcggggccgggactctcgcggccgcgcgcaggggctgggaagctgcccctccggccgcgccgggcgaggggctgcgccggcccgcgaggcgcatgcgcgctgccgagcggctctcgctccctccccgcccaccgctccctcctccccctccccctcctctgcatcctcgccgctctccctctctcctcgcccgctgggtgctgaagttgggcggatggcagcaaaccggctccgctagaggaccgagccgcccagccccgctcccccggacccatcggcgcgctgcccacacctccaggcgaccgggtaagacgctgcctccaaaacaagcggtgctaagtaaatgacatcaaaatgtctgctttgcaccaatggatggatttttttcaaggtaggggggaggtgaaggaaggagggggcggagagcgcgaccgcccatgccccggcgggggcggctgcgcggcgctggggtctcagctgtggccgcggcgccctgagcgggagcgggggccgcgccgcgggtccgggaagttgaatcccgcgtcgctgcctggacgcggtccgctcgccgccctcagctgctgcagggaaccgggcgagtgtcctgcccgccggggaacgctcggccaggtcccagagttcccgcggagagcggggcgcctgctgggggcggccgggagggccgggccaggggcgcgggagaccccgcggggacgcgaggtgttgcgggttttgtgcggttggttgggaacgaggagaatgtgccatcaacagtgtccaatcgactgatcaccttgggtgctgtgtttcctcccttatctctctttacctttgggaaaatgcactgctcaggtggggaaggtgttcgaagaagaggttgcgaaaatgaatcctttgaccagcagtaaaataccggaggggtgtgtgtgtgtgtgtgtgtgtgtgtatgtgtatgtatgtatagggggtggggggtctcttttgttccttcccctccccttagtcaaaggaaagggagtcctggcgtgtgcggcgcggggtggattccacagccaccgagggggcgaggacgaggaacgcccaccaaccgcgagtcgctgcccgggtgggcgcatcggagcctcctttgctgtaggtgatggtggtctttccgtgatcgatggaatcatagtttaatctc

SEQ ID NO: 11206 - DNA, 6000 bp, Homo sapiens
cttgttcacactattttcttttataaaagccacctcaatccaccttatctgaaggattctccctggaggctcttacctagatctcttcatgtatcaggagcccccagctgtgcaatttctaccacttgaggatagcctcacctttaaatgattcttcagccattgcacatgtacctgtggcctccccagctgcgttgtaagcttccaaatagagaagccagacctctaatacccgctgtgcctaggattgtgtgatgcaggcagtggactcagagagtatttgtttgagactgtgagagttggataaaggaaagaatcatgccacagatatgggggaaagcttcagtggttaatgtaaactaagtttgtgacgcaagccacttttaaatgatattaagagaatacagtgttttctgaaataaaagcctaatatacttaattcagcaaaggtaaaatactaatttaaattaattaaattttatttaaaaatcagatatatgttaatgtatggatttttttcttttgttcttcttttcctttaaaaatgaaatttaaccaacatataatttatctaatataattacataattatcacaataaacactcctcaaaataaccatgtaaggatctgggattatatgtgtttgcattttttcttttgttgccattaatgttcaccttagtacttaaatgtttataaatgctttaggaaaaggcaaaaacatatttcatgcttaggagagaataattttgcaatgctatttttatacgttatgaattctgctacatccacagggaaactagatcacaggaggcagcaacaaaatatactaggtgatcaatcttgctcttgaagatcaaagtatttatttgttaggtcaactgatcaactgaggaactaaaaataactaaaatataatagagcaaaaccagtcaaggaaagtagcatcgttagtgtagagtttgctttcacatacacaagcaattaacctgctttttgtaaatgtatttgttctgtttccctcctactttttccattatagtaggtttgttactggtgagatttacaagggaaaaagcccacatcatcttttgtggtgagctggaagagtcaacgaatatacccatttaattagaaagccagtagccacctcagaaacaaggcaaatttcacttcatttgttctgagaaaattctgagaaatgaagtgagcactacctattagtgatgaaaacaaataggtgaaaatagatcaaatctgaacatttatattgtttctgtagatttttgtacaattccctttctctttaaacacaaccccattaacttgggaatcatttcttagaaagtgattgagagtcttgatttcaactgtgatctgtacagattccttccatgaagtaaaaactgagattgacctctgggcatgatatgcctcccagaattttcaccaggtaaattaacaaataatgagagcaacctaataccttgtttataaaaactgagtgctcgtgtaaaggagcccgcaggtggaactgagttggacttttgtgtgtgacagaagacacggtatcatgagtcttaggaagtctgatcccaatattgcaaaacaatcattggtgtcatcaggttactcttaaaagtattaataaaaatagaaaagttgaaaaaaattatattcataaattatacaaaactgttgagctctgaatgaatttgaatataatttgaagtccacatatgattattcaatatgaatgaacatcattgcaaattttataaaaataaaatctatgaagaaaaatgcccaagttaaatcatgagctatacttccataatacaattgttaaccatctttgtatactgtaaatgaataatagctacactttaacataacataatgttctttacatattcaaaatgaggaataaagaaatcacatttagaaataaggatggagcatgtaaagattaatatttaaaactaaactttgttttatttttactgtaatactagaaatattctaagcaatgaacaaaaaagtgtgaccatagttttttttttttttgagacggagtctcactctgtcgcccaggctggattgcagtagcgtgatctcggctcactgcaacctctacctcccaggttcaagtgattctcctgcctcagcctcccgagtagctgggattacaggcatgtgccaccaagcccggctaatttttcgtgtgtgtatttttagtagagacggggtttcaccatgttagccaggatggtctcaatctcctgacctcgtgatctgcccgcctcgacctcccaaagtgctgggattacaggtgtgagccacagcgcccggccaaccctacattattattcagcaatataagtctctcctttgtaacactgtgtaaagaacacagaaggcaagaacatttcaactcttcctcacactcattgaatctaaaatagaagagatagtataaaattctagatgtattctctctgagttaatttttataacccaactgaataagacctctaagatatgtaaatcctaaacacttcagaaataacaaatcattttatcatggaagattattggcttaaagaaatgaatataaagactttacatcttttatattgctcacggttaaagaagctactaaagatatcttactaactgcactctaatctcaggtcaatgctgccaaaaatgcctatgctttcatatatttctacagtgaaaaaatccctaaaaaacgatgtctttccaagaagtcaatttactatattttttatgggccagtccaagacttctccaaaagaagcatcgtcttgtttacgtgtgagtgtgtttatgagtgtgtgtatgtattaggcagatgaggagtgaagggggaatgggaatgaccctacaaggtaggtgttattagtcccattaaactaatgtggaaaatgagaatcaaaagaggtaacacatcagagctgggtgacaagtagaaaactcacctgtttgtcaaaatacttaaccaggatgaatgaggaggcagaaggatcaaggggagaacacggggcagagccttctttgtggctttcacgggaagaaaggggcaagtttgtataatcaggggaggaggtttaagattggatagtttgaatagattctgcaggccctcggctacaggtgtggttggtctctcgtccagtacctggctctgaggtgatcaaaggcaggagaaaggttgattctatgtatgagagtttaatgaaagagagggttaggggtttggactgtgtttggtttgcatatcaaagacatgctcccaaaccagttgttttctatcactaggaatgagctaaccctaacttgagcagtttctccccaagactgcaagatcctcagatgtcaatgcaccccaaaatgcagaaaataaaaaacattattaatacaatagaataacatccatttttctgtaattcattggcattatgtagaaatagtgtacttaatcacacatagcaacatgtatttgtaattaaattcccataagttaaatgtcctatttacagcactgcaatttatatctgtatattcagtatgctttggtgcacaggtccatatattaatatttcataaaagagacagtataaggtaatggttagaaatgaagatgttacagtcaaagagaactgaattcaaatcccaaccacctatctactgcaagttatttcatttaagcttgtttccacatttctgtaacggggctcataatatcgacctgacagaatccatgtatgatttaactgacaatacttgaaaagtccttaacctaatagtacctgggtaaataaagataaatgaatattcacaattcttactcttaccaggtttttaacaggagagatttgattttccaaaattgattctcctcctattttcatcttgtctaaaaaatttaaaggaaatatttgggccaaaaccagccagaaaattgcttcagttaggacaattttgcctagcagagtagaattatggtcactatattgaacaactatgacttacacaaaatcagagatagacgaggcttcccgtgcagccactcctggggtgactggagtatgaaaggatatttgcacttgcctcatgggtgcaccaagtgtgattaatgacacgtattacatcagtcccacaaaaaagttcattttttatagtcacacttttagatttatatgagagttttctatcttatgttttttagaatctctttccaccatcttctgaaagacggtttaattcatgttcatttagcccacactctttgtcttctatagagagcttttttgaaagaggggaaaaggaattaaagaagtggaaaaaatatggctggttgcggtggctcacgcctgtaatcccagcactttgggaggtcaaggcaggtggatcacctgaggtcaggagttccagaccagcctggccaacatggcaaaaccccatcactactaaaaatgcaaaaattagccgggcgtgatggtgcacacctgtaatcccaactacccaggaggctgaggcagaagaatccgttaaacccagggggcagaggttgcagtgagcccagatcgtaccacttcactccagcctgggtaaaacagcaagattctgtctcaaaaaaaaaaaaaaaaagtggaaaaaataacaaatagagaaagagctttgctatatgcagccttcagcacttaggttatttctcagatttacataaagacttactatcatcttgactgcaatcatgtagaaaatgaacgggtataaagtacatgaggacaatttaataaaaccagctttcttttcttataaaatctctgacgaaaggaatcattagacagagacttgccttgtatttacccaggtcatgaggcatgtcagtgtggtgatgtgcctttggcaagaagtccttaattagaaattcctcgagagctgctccctgcaggtgcttcctatgacacaaagacaaaataatttactagggaagcccttactaacgacccaacatccagacacaggtgagggagaagaaatttcctgacagccgaagagcaacaagtatcatgatggggtgctggattttgaatgagggtctctccaccatattagtagtaagtatcatttttgttattcaactttaaatatatagattgaatagtctttgatttttaggaaaacttgtataggaacgctaaatagcttgaagtattactctagttaaaagactaaaacttgttagaaaacattcagtagatgtatttaatttccccttatagaatcatgcaaagttgttttccgattgagctcatttttaattatttttaaagtcaagtagtttgtttttgcataatgtatgagtgtttctctaaatcaaatgaagtctttgaattagactatgaaattggaacttttctagagaactctcggagttgtttttaaagatttcttccttcttgacatcattgtcaagcaacgttgattaagaaggttttgtagtttcattaaatcacttaaagttgactcatatgtgtttaaaatctttttaataaaggtaataatgtattaccatcataatcctattaaaaactaatctatgagaaataaatatgtggagtaattctgattaatattgagaagctcttcattccactttaaaagaagaaccccaagtgattttgaatagagaaaaagcttgaaggtagtaatcattggttctctttcctttctactctagctctcatggctgggaataaatttttatctgtttattgacacgttctactggtatgaagaggaggagtctttccattacacacgagttattttgggtgtaagtacagtttatgattaaacattattttttcagaaaacaaaatgcattttattttccctggatccttgttttccctgaatctcttttttatgtctttacatgtggacagtcaacactggcttgggca

SEQ ID NO: 11207 - DNA, 6000 bp, Homo sapiens
atgaataaactgtaaatttcaaaggtatttaaggaaggaagagatgcaagtggactgaagcattcaggtacagttctaaaagtcagtgacattgccgggcgcggtggctcacgcctgtaatcccagcactttgggaggccgaggcgggcggatcacgaggtcaggagatcgagaccatcccggctaaaacggtgaaaccccgtctctactaaaaatacaaaaaattagccgggcgtagtggcgggcgcctgtagtcccagctacttgggaggctgaggcaggagaatggtgtgaacccgggaggcggagcttgcagtgagccgagatcccgccactgcactccagcctgggcgacagagcgagactctgtctcaaaaaaaaaaaaaaaaaaaaagtcagtgacatttaaaaaagatgattatgttagttaagatcagtggtcttatctatttttagttacataaattttatgtggggacaattttatccacaaggtagattattagagacacacacagtggtttgagtggtgtcaggcacctccttcctcttctcaaataccttcttctaacccaccccgacttcaatacctggaatctgagttaaggtacggccatcataaatggtcttttaaaaaagaagatatttccaaaaggctaaacctaccaaacatgatctacccagatgattctgatgaatgaggctgtttgtgtctcaggtcaaacaggccctcaggagaagatctggagaagagaccatagaagccgggatgccatctgatacagcagcctgtggttttgtttagtttggttcagttatccatggtcatctgtagcctgaagatattatatggaacattccataaatacacaattttaaatttcaaactgtgctccattctgagtagggtgatgaaatctcaagccatcctgttccatcctgtccatttgtgaatcatccctttgcccagtatatttatgctgtctaacaagcttgtccagcttggggcctgtgagccacacatagcctaggatgcctttgaatgtggcccaacacaaattcgtaaactttcttaaagtattatgacacttatatatatatatataatttttttttagctcatcagctatcattagtattttatgtgtggcccaagacaattctccttcttccactgtggcccagggaaaccaaaagattggatacccctgcagtccaagctatctgcgtgttgacatcatcggctcctgcgtccaaccatagccatggtaatgactccatgatccagtgtcactgatatggtttggatctgtgtccctacccaaatctcatgttgaattgttatccccagtgctggaggtggggtttggtgggaggtaattggagcatgagggcagtttcacatggtttggcaccatcctcccttggtgctgtcctgcgatagtgagttttcgtgagatctggttgtttaaaagtgtgtggcccctccctcctccccttgctcctgccacttaagatgcctcactctccctttgccttccaccatgattgaaagctccctgaggcctcactggaagcagaagccgctatgcttcctgtacagcctgtagaaccatgagacaattaaacatcatttctttataaattacccagtcttgggcatttgtttatagcaatgcaagaacaaactgataaaatcactcaaagcaggtgacttgtcttctgacataatcatcagaagatgaatagtagcctgacacgccatcacaatgcctacgtcattcacctcagctcattaaatcccacaggcattttatcatctcacatcaccacaagaagaagaagggcaagtatactacaatgagatattttaagagagggagaaggactacatttacataacttttacaacagtatattgttataattgttctattttattattaattgttatcactgatctcttactgtacttaatttataaattaaacataataggtacatatgtataggaaaaaaaatactgtatagaagcctcaatacgaatctgtggtttcaggaatccattgggggtctttgaacgtatccttcgtggatacggggggactactgtactgtataagctttatagaatgttgaggtcctgggtcacctcctctgttgagattctagcaaagccccttacataaaagagttcataaaaagttttatttcatataaacaaaggtaaaagagcagtagaatcattctaaccataggttaaatagggaaaaaaggatttttcccctgagtctactgtgttatcagcccttgagttcagccttcgctgttgcaattggagtgtaatccatggggacaaactcagtacagaggaggtggctcagaatgcaaggacaagggcacaaggtggaagaagagaccagaatacttttagcaatgacaaggaaggagacatcaactcaaaagaaatatgcaggacaaaggagatgacgggagaaattttgaggtagaggggagaaaagttgaaggagtagaagttaacacagttatcagcctccttgtctggcacatcatgagatcatgggctaaggagaaaggcaggtttgggctggaatctcaaggggaactgaaaagatttagaaaagcccagctactgtcctcttctttccaattccactattttctgacctaatcctgtacaagaaaatgttatcaacaaatacgtagtcagtgatcttcatgtgtctggcctgagaaaatagcaattaaccaaacagacctaatccccattttcctggaatgtataggtccaattggaaaatatggacaataagtatcaaagagttgtgaggaagaagtgttcactgggggctagcccttttggggagacatcatatagcagacagatgctatgacagggctagttaagggaagagttcaggcttcaagttgaggctcgttactttcccctccagactagctagttatttcttagtggatttccctgcctcctatctctttccagtcctatataccaccaccaaactaaccattgctatcatgattatgctcaaaaatggtcaatagtcccccagtgcctactacttaggcttcaaacattttaggctgagattgaaggcctctaccagccagggcctaaccttccttccatacctggcttccacagccctccaatccagctaaactcacagactgtccttcatacatgccatcctttattacctctccacttttgtccctgcccatcatcttgagggtttttcctccacaatccactcttaatgtctcatttccgcatgaagactcaactttcatgtccatcagaaagtgttctctaatccccagtctagaagcaaccttcctttcttctgaacatccatggaaatttgttcatacttcttttagaatgttttttacgacattcctagaactgtggttatttttatactcttcacatcttcctactatattatcaacctaaagacaggatttgtggctcatccactcttagactccataatactttatactccaataaaaaacagatgtagctaaggaaatactgtgctaatgtttgttgaagttagtgctaaaaaaaagtcatatgaatggatgcttggaacttccctgtgatcctgcacacattgattcttatggatatatattttttctgcatttctggaacacaaatgttctaaatgcatacatacttcatccatccatccattcattcattatttaatacaaacatattgaatgcccgccatatgcaaggtatccacaggatagggagggtgctggctctggctttatgcaatgtacgcactcattgatcaatgtttatgtcattttgtttcccttctttccagacaaagggaagcaaagactcactgcacctcattactgtcagcagagagcaatgtgtaattggaatgacctttgtataagtgctgacctatggggtcagaataagccttataatgtacagaaccaacttatgtgcaattttaacatcgacagagaatattggcctttaagaaattcatctcatatttattgtttggagattttactttcagaagatatcagttacatttcccctctttttttctcttttctgcaattattttcctggcattcattcaataaagagcttcaagtcacttttttagactgaaataaactttgatgaaaattgaaaatcaatgctttccttctaatgacgttaagagaaaagcctccaattttgcaattataatcaatatataaaggggaagtggccacaaatatgctgcacatcttaagaagccaagtgggtttggttactttaatttttaaataatcaggacatttaaaaagttgctgtttataaaatactttttaaaaatgtcatcacacgcactatgagtgcactcagtcttgatgtctcgctaaagcattagctgtctagctccttctcctcccagagcctttatcctcatattgggtctggggacacacatgccgtctcttgattcctaaggatccattacccatttctctgcacagatcttcgggtatccaacctatctgtgcctccttcagccaggagcctccggatctttccagacttctttgcaatactgcctcatgcactgaatccatttctcgcatagcctggcgcttggcaggcaggctggcgttccctggctctgccttccccatctccctgtcttttctcccacggcccatctgcccctcctttcctccacccccttctcctctctgctcccctttatttccactccccacccgcgtggctttgctctccctctcccccctcagctcgtctgtatttggagctccggaagctgccggcgactctcccctggagcagcgtgactgacaccggctcctattcagctgggaggagggagaggggaggagaaggggagggccgcgggaggagggtacgagtggccgaccacggatttgcattgccgaggacgggaccccagggcagcgaagcaggtaatcctgcagcggtcggggcccggcgaggcggggaggggtcggggtgcaggtgcggggggcgcctggcggcgggcgctggcaagttgagcccgatgggtggggtagggaagcggccgggacgctgcggctgtggcagcagcgcgaggggaataaaggcggcgcgggcgcgggggccggggcgcggcgacccgggcgcggggcgcgggcgcgggcggactcccatctgggtcagcggagcggcgcgccctgcccccgcctccccagctccggcgtcctggccgctcggaaggcggggtgcgggcaggagctgcccggggttggcgggcggccgcggcctccccaccccagcgccgccgcccgcccggccgctctaactttggggggtctcgtccaccgggctgtgagtcttccaggggggtgggggtgggagtcattgcgccggctctgaccagagccacctcgatcagaaagtgctggaaagaaacagacctggcttcccctctgcagaacctgacttgaggcgatgagtcacttctaaaaaatgcagaggcaactgagactgggggaacggctcggaaaaacggcacccgccgctggctctctgactgctttgggtagaggggtgttcgtggaagtagccgccgtatcatcacttttagggccaaaaatcaacctgcagatggccttttctttattctcatcagagtggtgttcgctgcaagttgtagcaatatttgaatggatgcattcttaaaaatgagtatgtatgggtgactgcatttaggaagttgaaccgggactaggtccaaacagccagagtggagatgaacacttggtaaaaacatctaggacctttggttttatagttatggaaatgcagaagcttctgggacttgagcactgtagtttactgagtactcctatttccttactgcttctgtagatttcattgaagctatgttcctt

SEQ ID NO: 11208 - DNA, 6000 bp, Homo sapiens
aaggaggttctgctagtatgtaacggacgggaaaagagactgagaaatcaaatggaaagcccagacacaaaaaggacaaactctgccagcgtgaggatataaatgtccttcttaatcaaagtaggaaaagcaaaggcctggcagctctaataaatcaaaaacaaaaaggaattcttgggaccctctgtcctgtcatgcaaacacaacccctcccacctcaggtttctcctcaatcattctggaccaataagtactttcatttgttgcttacagactcattactgtttttgctgcccaactatttccttttaggaagtttggtgtgtgcgtggttttgtaacctcacacaatagccacaatagcatgttataaatctcaaagtactttcacacagatcactttctttgaagatttcagtcctagcacccaatggaaacaaagacaaacaggaaagaccaacagtctgcaagggggctgaatctgctaaggattttaaatagttctgcaggctccacagagttggagaaatgaagacagaaatgctaagatttgttgattgactcgtccaaggttacaaggcaacaaggcccagaccagagcccaaggctgtttttattaaacactgcacaatatttgcacagtgaagatgctgctttagccactaataagctacatggataaaataaatgttccacatgcagggcaagtacaccttctcctttggcaaggctgcaacataatcttcaaaaaactcaggaaacaaaaagccatctcttcaataaatatctgcactacactcaggacagcctcggaccaaagctaaagctgattttgagtggtctgccaaggtgtgagttctcacagcagcactatcaataagtaaagtatccctcaatagcatgatcagctgtttccaccacagctaccacttagaaaaccccatttctcaaccccatttcacaaagggaaaacatgtctagggttcttgtcctatatttgtttatataacttatgccccaccttgttgcaaaagtatttaaattagggcgtggtggttcacacctgtaattacaccactttgggaggctgagggaggaggaacactggagctcaggggttggggattgcagtgagccataatttcagcacaacactacagcctgggtgacagagcgagaccctgcctcaaaaaaaaagtaagcagtagtacttagatagatctgacaattctcaattattcaagatggtttttcaatgtgtagatttgtatattttatctactccagttttgctccccctcccatccctacctcacaagtgtacaaacatctataatccagatataaatttgtaatattcttcatctggtcaaactcaggaaaaactgcacaagtcaaagtaaaattctactgaatcatatacataattcccttcctattagtacctccattgggccaggtttaggtgggctccaggtttattaagatgtcagataggcaggagagtagtgtgaaaaagttaaagaatgggggtgggagggtgctgctgatggaaagcatatatctctttcactccatcctccccttctctcacaccaagtctgtggccctggaatcacctgtctgggtctcaacgactctctgtcaagcagagatcatattgggaaaagcaaagaggtctggaaatggaagtgctttagcttcactcatgtaagggatcattttaatgtggacaatccttctctgaattatccagtacagactagatctgcaggatagtttgtttaccagatcctggccaggaagagcaagctcgttccctgattctcagggcagcaccataggtgcctctttaagatcatagccctgaaagtgttttcagtttagagtggacatggtaaattacttcctctcttttctaagacataaaagattttttgagtttttaacagagggctctcctactctgagtggtttcactggtgaatggtaagctactttactatgacctttttaaatattcagcatattacctgacccagaacaacatttctgagatctgaactgcagtcttctcttgcatactagttgtcactgtaaatacacatgtaaaatcacaccagggtaagctacaacccagacaaaccatgagcctataaaatagaaggctaaaccataacctgcttttcgagaccccccctacagccctaagaactatccaagtaacctgacagtaggaaaatccaccttaggtgtgcccaggcatgataatcccaaagacataaatggagcaaaataggttttaaagaattcttgcaacactgaagactaggagctaagaagagtctaaataaccatgctcagtgcccaaccacctgaaaagtggactccagggaaattttgttgttgttatccaccccgccccaagggaaacattttatctttaatattcaggagcaataataaaatattttggccactgttcttcaaggattccacaaggcacttaattctcatgtcaggctttctgaaatgcttgccctggaaagtgtcacttgatggctcacacactccttgaggattaggtgctgaccctaattaggcacaggcagaaatagttcaggaatccacatgctcagattcataactatactttttgtaaaaaataaaaacatataaaaaatgccttctggctggacaaggtggctcacgcctgtaatcccagcactttgagaggctgagttgcgtagatcgattgaggtcaggggctggagaccagcctgggcaacatggtgaaaccctatctctactaaaaatacaaaaattagccaggagtggtggctcgcgcctgcagtcccagctactcgggaggctgaggcataagaattgctagatcccaggagaagctgcagtgagctgagatcgcactgctgcacccagatctccccagcctgggcaagagagactgtctcaaaaaaaaaaaaaaaaaaaaaaaaaaaggccttctagtgatcctcagaaatccaaaaaccagacaactatggcttccacttccatttttcagatatccattataatactatttgacctcaaagtgaattttattgttccacacaagcaacagattacaccaatttcacaactcccagaatccaaacctacaaagacccttcccaccaagcactttaccaaaaacgggcttcatctccatcttcctttctttcacagttgaaaaactgcccttcctaattaagccaaccaacttcttacctcaataaaatccttgtttttcagtagcacgtacagtatttccagtgatgaacagtgaactgtctttcgtctcacacagtaacctccgtgaagaagatccaccttgttctttactgtatattcctggcatgctaactgcatcctcagacaattttaagtgactgaaaactcaggcaaagaaaggcaagagggcaaatagaagggcacaggagacaacgcttttcaaatttttctcactgcgacctacagaaacacactgtagaacacctcctagtacactcacacgtgtgtgtacacctgaagtgtcaagaaacaataccctaagtgcaacaccctctgatattttctatttcaagtggccgtgatctactaaactgatttccaactcaccaataggattcagtttgaaaaacactgcaataaatcaaaccttacagttgcattccacaagctactaatgaactcttgaaaatccagcatacagcagagacgctgaccaactacaagatccaaaccccccaggtgggcagtgtccttctgttcagcagtggcagttccccaccaccaccagccctgagagttaattatctcccaaactcccagagtttcccaagtagcctgaggtgtctgtcatatgcccttttaacctctttataaattcagtcccgtccgtctcttacggtggcaaagttcatttatcgtcggctgtggaaagcaatacttcctttttgtcccctccaggaaccagaaattaaatgaccaggttggtgcccgttgtgcctttatgatctatttgtgtgggtgatatatagaaagagtctcagtctctcccttcatctttccagtcttaatcactggtagatgcagtctctggtgaaataagaaaccagggaaccccctggcctgggggagggcgcactcatcagcgttgacagagtgaaagcaaaaactcaatcctcacaccacagaggcgtctggctaactcatctccagacctaagttgggaaaggggaggggagcgcggaaagcggagaagccggaggagacgctccggagtgaccagcgacggctgaacgcagcccgccctccccaagtcgacgccgcaacccggggaaagcaggtgagcgccggccacggacttgggggtcgcagaagcagcccacggagagcggaagggaggaggatccgggtaaggggcctcccctccccgtcgggacccccctccccgtcgggacccccccctccccgtcgggacccctcccactgacgctctgcctcccactctggcctctcctcactcaccccggggagtgggcctcccctactgcagagaaaggaagaggagaaggagggaatgaggacttaacgcccacccctgccccccaccataccgctctcgccgcccgggaaaatcccgccgcgggccccaccagccaagcgccgccttcgccccacgcggcctcttcctagcgcctgcgcgccaggcccagcccggcggacgcgatctgagagtgcgcgcgcaccttgcgtgcgccggcgtgcggggcgggacctgcggggctccgccccctccccctccctccccccgctccccctcccccatacactgccgcggccgccgcaggagcccggagctcgagccgcccagcgactccccctccccctcccccagccccgccccgccccaacccggggctccgagccggagccgagtctgcgcctgggggtgagtacgcgacccctacccagccctcgctcttttcttcgaagatcccaccaccacccaaagaaaaaacctggactcagctgcgcgtcccctcccttcaacctcctgcgggacccagaggtgcccgggcccgcgggacccaggggtggcgcgcgctgcccccaaccccgcaccatcccgagccaaatgtgagtcctccaacccctgccggaggtccagatacgcgccgccggctctccccagccccggggagatcccaaagggtgggacccccgcccccggcccccgagtgccactcttctcccacctgcccggtgcaggtgcgcgtcccctgcgcgaccctcgggggtgccagctgcgccccgcctgtccgccgccgtttggggaactagccgcccccgcccccgagttttggaccccggggtcgccaagtccgatgccttctgtgccttttattttttctgctgctcccgggggcgagtacacccgaagccggtccggggtaagggctcgggctcgggcaagggcagggttcgcaggtgctggcacgaggccggccgctgcccccggctctggggactgactggtcggcgggctggagaggcggccggccccgggagcgtgtcctctccttgcgccccacacagtgcagttcattcatgagccgcccgggcctgcgttggagggtgcggtggggaaaagattcagacgcgaaaccgagagtggggcaaaggccctgttgtggggagggggcgccgctttgtccctcctggctgtcttgaccgcctaaggcggacagtcccaaagcttggcaccttgttccccagaaaaggaaaggacgcttgggaagtggggaggagaggtcagaggggctggctgcccttggggcgctgtgctgccccctgcctgggtcccctgggcagaggtctggccgctcggggcaagcctgagcactccaccgccctggggggctggggcttgcctacccattaccagtctgcagca

SEQ ID NO: 11209 - DNA, 6000 bp, Homo sapiens
gggatctgagtgcttcttctctgagagagggctttgggattcatatacaaattgacctatctttctattatccagatttgtatatcattaagatttaatttgctatttgacctgttatctaaatacctcaaataatctcttacaggacaaaaagtcatcctctctagatcaagaaaaaaaaagctgtatcacactacaatagtactatgatttataagttccttgatagctgcctttctttcagtaagactgaaagccctgtcttgttcttttttgtctctccagcaaattaacccagtgcctggcatgtagtgaacaagtaaatatttattgagcaactaatacaacatgatccctaaccctagatgtaatttgcaacttgttggatacattcacctgtatactttttaatttttagaattaattttagtgatatatatatcttatgtaatagtttcttattttaactatacagtctgatgaaaaaagtatatacccacataactacaccacaatcaagatatataatatttccatcgcccacttcccctacaaattctctgtttttcatcatcaatctttatcaccacaatccctcctacaacccaactaacaggttctagaccactgatttaggttgtgtcactttatattagtttgcattttccagaattttatatacatgggatcatatagtatgtactcatttgtgtttgccttgtacacaacatagtttttgcgatttatgcacattgctacatgtattagtagcttgctccttttagttgaatgctagtccattgtttcactatactacactgtatccgtctgttgatgaatatttggattgtttccagtttggggctattattaacaaaactgctatgcacatttgtaaacaatccttgcttggacatatgttttcactttttcttgtgcagatacctaggagtagaatgggtagatcattaaggtaggcatatgattacaataaactgccaaattgttttacaaagtggttttaccattttacacttccaccagcagtgtatgaattccagttgttccatttttttatttgtttgagacagtgtcctatgctgttgtccaggctgagtgcagtgcccagctcactgcggcctcaaactaactaggaggctcaagtgatccttccaccttagccttctgagtagctgggactacaggcatatgccactatgccaggctaattttttattttttgtagaggtgggtgtctccctatgttgcccaggctggtcttgaactcctggcctcaagcgatccctccaccccattccgcctgggcctccctaagtgttggaatcaggtgtcagccactctgccgggccaagttgctctatatcttcagtaacatttgggattgtctttttttttttttctttaattttaagtcattctagtggttaggcggtggtatgtcacattaaaattcacatgcccaaacctctgaatccccatttacaagaatccctatcttacacgctaacactttggattttcacttaaaaaaattaatgatatcatgctcaaaaaattaatgataaagcaacaacagaccactaagtatttatcattctcctaacttcagagagtaagcttcatgaggctaagacctatcttgtttttcttacatttctagtatctagcacaatgcctggtgcatagtatgtacctttattagttatttgttgctgtgtaataaattactccaaatcttagcagcttaaagcaacaaacatttactgtctcacataatttctgaggggcaagagtggggagcagcttagctgagtggtcctgagtctgaggctatcatgaggttttagtcaagctatcagctggtgctgcagtcacttgaaggcttgacaagggctggagaactggcttccaagatggctcactcacatgactactgccaagaatcgtcagtcccttgctagttgttgtcagcagtctgcaattctttggcatgtggagctctagatttgctcaacatggcagctggcttccccaaagtgagtgattcgagaaagaaaaagttggttacatagaccaaccaggagatggtggatgttgtccctaacttcctggaggctggctaataaagtgcataattaatatttattgattaaagtaatgtgtgtctgatactgtactaagcattttacatatgtcatttcatttaatccagataacaatcccatgaatcatcctcatttgagatatgataaaactgaggcttatacaagttaagtaaactgtcaatttctacgaagctagtggcataacaagagttcaaacacagatctctttagctcaaaggctgtgaaaacatggttcacagtacaaatgaataaaagaattacattattctaagaataaagtgatttaggtggtctttttaaactttgtttaaattgagtcaaactcatttgtatgtggcggaagaaactagatgttttatcaggcgggaaaccctaaaattcttcaggtgagtaaaaagttaattgcttccctattctgtagttgacaaggtgttgtttcattttttctctcttactacgctgtttcaaattcttggcagattattggaaacaaggaaagtcaagaattctcccagtgactacccatagaattaaatcaacaaaaactgttgatcattgactgtgcatatggcactgtggcagcttcccagatctacaaagcaagtgagacagtatctgttgtttaagaggtcataatctctttcggattaaggtgatacaaaaataataacacagagaagctgaagcatcatggagaggcacacaaggaatgcttattgaggtctgaatttttaaaagactggacacgtctttaaaatacatttggtgttcgttaaaataatctagtgtgataacctctggaaatcacattattttaaatggagggaactagccttctttaattttttttttaaaaagcagttggaaaacttgaagacagggacttacttacctttccacatgtctctgtcaggaaccagttttctaggaagggtggcagaaatgagcttcatatgtttctggaatgcaagaatgtagaaaggggggtggaggttcaaagtccaggtagccctctgtgagaacgcaggaatcaaatcaggacaaacaaaagaagggtgaagtgggtagggcaacggagtttcgggattgactggaatgagagttaaggtgataatgctggggtggaaatgaaagtcagacccctccttacggactgggaagaaaggagccctcctagtaaagttgaaaagaccaagtgtcctcttctccatttcaccggggaaacgctcctgtgcctagtcgtaaggtacaggagagtctatggagcccatggagagtctaatgcaaaaactagtttccgaccaaactttgccttggccactgagcatgctcagctttgtcttctatagaaaagtgaactccgtggctccagattttagctatagcagctggagggcgggagtgagtgtgggagagccagcgtggcagcggccgcaggtggaaacctggagtttgagtatgcttgaaagggaaagtgtggaacgaaggggcggccgggtggggaatcagagaagcccccaaggaaatgattcatcattgtgattgaccttgactttagcaacccttcattaaaggagaaaatttggttattcggagatggggactgtgttgcaaacagttacaggcaaagaggggcagttcaggattccggccgtggtccgcaggaatgagtcggggcgagggaatggttgttataacccaatagtgagcctccccggtcatccgggctggacgggactggggttgtagcagaaaagcaggagctgtatggaggatgctcacctggcagcctcgatctgcccctcttccctcgctcctccctccgcaccagccacagctagttgtcaggggccaacatctgggccgggctggaactggctcagaaactcgcgtttgcctgcttatttctgcagctgggctccttgccaggtgcaaccacatctatgagaatctcgcagactctcagactcctatgcctttgctggtacagggaggaggatttactatcactcactgcataaaccatgatcaccagagatgtgctcccaagttacaaagcctgcaggcggtgcccgaggaccagagggccgggcgcggccagctcacacttctggggcagccgtgagcagcgggcacacgggcagccacgaaagcagcagcgagggtggtgcaaacacctcaaaactacaccgaatccagtagcgcctggcgcccccggcgcgcaaggtacgctttggggcggtcctgtgtgaccccggaagagaaagttgttttggggaaggggagcaaggagaggagtgcgagttaaataaaactaaatatcaaagttgttctgctctgctcaggccgcctctactccgcctcatctttgtcccaagtcctttcacagtctgccttcctcaaacggcccgatgcgcccccgtctttgccggagtaagcagaccgccagcagccggcccgcaggtcagtcgaccctctctggatgcaggtcgccgggaaaacccggagcggagcatccctcgggccgggaaacgccctcggcgcgcacccactggcgcgcatgctcagtccgcgcggcggctgcgagtaggaagctccgcgcggcggcgggggcggcgacggcgactggcgggtgggagtggaggcaccggctggcgggcgggggtacagggacggggcaggggctcccgctccaggttccttgaagcacttccgaccgcgaagcccggcgcgagaagcgagctaacccaagagccaacaacgagcgcggagagggcagcggactgagcggagccgccggccagagcgggctcggagcccgggtctccgccgctcgggacccggctaggcggcggcgggggcggcgatgttccactgcatccccctgtggcggtgcaaccgtcatgtggagagcatcgacaagcgccactgctcgctggtctacgtccccgaggagatctaccgctatgcccggagcctggaggagctgctgctggacgccaaccagctccgcgagctgcccgaggtaagggtccggcctcacctgagcgctctgcccgctcgtctgctgtcccttccgctcccatcctctctcgtcccctcttccatctccgggtccggcgtgaaggaaccttccctcttttatgcattcacctgcttctttctccccctgtctctttacttccatcctttcccagtaaaagttccttttcattttattcaaagtgaccggatattttgcgcgtagtcactggggctcgtgctattggagaagcgttctggactgttaagtaacttagatccatgctaggtactgacacctggcacttgtgcccggtcaggtgagaagccgggtgattcgggctgtttccatctggaagctacagagcactgcatcctccccccctccactccccggggtcgttcccccaccaagggccgggcgcgcctctcctttagtcaaggcatgtcccggaggaccttgtgacctgggcagcgctcaagcgggccgcactatctcggcatcttgggaggaatgaggaatgtgctccgtgctttatcgcgggtgggcttggccggctggcctgcggtggctgcgggggtggacgcgagatgggcgcaggggagagctgggcctggagcgctaggggcaggtgcccagatgccggccgcccgggccttgcctacgtggacctgttgcgtggtgggagctgcggtgaacgtcagcggaggctctgcccgcgggccagccttgcagccgcctttcccggagcgggcacagtcgtcctgctgactttctctccttgcagtgatgcgttatctcttcagagttgtttatgtaaattgatcactc

SEQ ID NO: 11210 - DNA, 6000 bp, Homo sapiens
tgctactacaagttcagtttagttgaaattagacgtatgtgtgtttatttctgtatcccatttaaaacaaccttgaaagctttgtttttggtatacaggaattgctttaattgctggtcatttctttgagaagaataagaagaaagaatattaaggaagaggtaatggacagcagagatatttttgcaacaagccttagaaagataaaagaaacatgcagaaaaacactgaattgcacaattgcattgtccaaaaagaaagaaagatttttgtaagaggggctatggtgatgttagtggttggcaaggatacaggagaagatatctcagaatcatacaaaaagtatagaatatttgcagggaggaaggaggaaaaaatattttgttttcataaattataacctattataaactcctaccttaaggaaggaagatcctgggaaatttccagcaagtcttgtctggtcaggaactctatgtgaggttgtacatgctgtgtcctgcatgaagagttcagttaaggtggtgggagggaactccagttcaggccctgctcactaagccctggagcaaaggtgtcttattctcaagaacacaaagttctcatgggtgctagcagaggcccttggctacagtcaatggaaaataatattacagcatgttactactaatttcagatgtttctttagagagccatctttattatttttaatttttaaaataatactatttttttttcctccaaagatttcaggttcctgtgaggtactgaggagttaactcctgaggttggggaaaatggcccttgatctgccctttccttttatttgaaagactctcaaattatgtaataataaacctttgttaatgtccctaaaacaggattgactataaaagacaattcaagatatgccagatacatttgggtttcatccaaaaaagtttagttcctgaagcaccagtttctttgtcctttgtaaaatggcctcacccttaaaggatttcataacgaagttgaaaacagagttatattgaagcatggctatagcatctgcttaatttagagcagattctatttacagggagtcagaaactatattatagtccattgtgataatagtttctccttgttccatacatgtgtatattactgttgaattatatgttctttaaagacatattgaatgaatcatcattacagctaacatatattgataaattaatagatgcctggcactgagctaagtgatgatttttatatgaagcaaaggtacccttctttactgttgatgcaggaatgttaaatactctgcaaggcagggataatgaaaaaagtttaggtattcgagaaggataattcctgtgtatagaagcttgggatgacagaacttcagcattaacttgtaaaaataacacatagattgggcacaatgtggtcgtgcttattgctctaaacttaaaattgattaaatattatataaggttggtgttacgcttcatgtaaaattatgttctttagaaaatatattgcaaaatctggcatatcatctatggtcctataaaaattgacacatttttcaaaaggtggtgtaaaagggaaggatttaattgcagtagttacttaaatgtttatatgcacaaacacagatacttctcaccattccatcatctactgatgtataacaaactactacaaaatttagtgacctaaagcaacagccattttattgcatttcactcttctgtgggtcagaaatctgagcagggctttgctgggtagtccctttattccaagtagggtcgatggaggtcactgaaaggtattcagatggtggatgggttggtctggaggattcaataaaaaaaaaaaaacaaaaacgtggaatccagcaggggatactggaaggtaggcctcagctggtaccatgaccagaggatgaccagaggccacacacaagtggcctttctaggagtatggcagtctcaagctagctgaactttttacatggcagcatggggctaacagagagaatattccaagagacccagtggaaaatgcaaggttccttatggcttaacttagaaaatcctggactatcacttctttcatattctatagttaagcaagtcactgaggccagctccttcaagagtaaggaataagactacttctcaatgggaagagagcaaagaacatgtggccaactttaatctacatacacctaaaccaacagatggagcgcctgggacacaacaactatccttagactttccacatcaacaatctcggaacacttaaggctggatggacaatatctacttctgcaatgtgttccggtcttctaccaacggaaaatcgaattcccagctttgagcagttggattcctgtggtatgtggctgccccacatcttcttctgctaagccattataatcaaaaagtattttttttggcggggggtgggggcaatggagtctcactctgtcgcccaggctggagtgcagtggcctgatctcagctcactgcaacctccacctcccgcgttcaagtgattctcgtgcctcagcctcccaagtagctgggattacaggcgcccgccaccaagccaggctaatttttatatttttttgtggagatgaggtttcgtcatgttggccaggctggtcttgaacatctgacctcaggtgatctgcccgcctcggcctcccaaagttctgggattacaggcgtgagccaccgcacccggccccaaaagtctttttgtgcaccccgtgtctatttcttattagtttcagagcttttcccagtcataggatcacagaaggtcagagctggaagggctcccagagatctggtttcattttacaaatgaggaagtttaggttcatgtgacctacttaaagtcagaaactgattagtgacagagctacagcctagatgtcttgttgcagtgcatgaagagcttaggtaatcctgatttatccatggaataggcagctggtttacctgattcttcccttagaaacagtccatctaacatgatttggcttcctacttcatcatgaaacatttgaaaagaaactattcattccaagttcaacagtttaatcttcaaatatctagctcatctttcttagtccatatttaacaaatgtttactgagcatccaccaagttgacagcactgtaaatacagacacactttcagacgggggctgcctgcaaagaggcttcccttctagttagaaagccagaagacacattttacaacagtcacttttctctgggtcacatatttgataatactaccttatctttacgtacttctataggcttatgcctgtaatcccagctattgggaggctgaggcaggagaattgcttgaaaccaggaggcggaggttgcagtgagccgagatcgcgcctctgcactgcagcctgggcaacagagggagactctgtctcaaaaagaaagaaaagaaagaacagaacaacagaacagaacagaacagaacagaacagaacagaacagaacagaacagaacagaacagaaaaaagaaagaacttccctaacacagttctccctcctcctttcatttgcagaacagaccacagggccgaggcttcttccattagaaacagcccatctgttctactgattctgagatttttgcctacacggagcaccaatttgtagtgggtgtaaggttacccgcaaatcaatgtgatggtccagttgttactgttccttttgtttcacgagcgattgctcattagatgaggtgactgatagctctgactttttctagaccacaaggactctaggtggctgccctaagtacagttgtggcagctgggatttcctgtttatatggtgcccggcaccatcagcttttgtcctctgctgcagctaaagtgtcttcctcctggaccagggagagggggagggggtgtggacaggacccgcctgctgacggtgacacctcttcgacaccacgtccacgccagtcctcagctccaggagctgggcgggatccctcatcccgctcagctgggagatgccccgggagggcgtcccccggctccgggcggcgagggtagtagccgaccccaatccactccgggggccgccgggggccgcgtgaaggcaggtgttccggggagaaacgtggaagggaggcgcggcctggggccggtggcgctcggctgggggccgcagttggctcccctgggggctctgggcggcggcagctcccgcctgtggggaggagaaggagccggatgggcgggttcaggcgcgcgcggcggcggtcccggggccgccggctcctccccgcgagggtgcctgtccgccgctcgccgcgctgaggcagtgcggggcgggcgcgcctaggctgccgcccagcgccctcgccgcggccatgcccgggccctagagcgcctgccgcagcttgcgccccgcagccccgcagccccgcgcccgccgccgcctcttcaatgggcaacctgctcggcggggtcagcttccgcgagcccaccaccgtggaggactgcgactccacctggcagaccgactcggagcccgagcccgaagaaccagggccgggcggcggcagcgagggcccggggcaggagtccgagcagcccgcgcagcccccggagcaagccggcgggcggcccggcgccagccccgcgccggacgaggacgccgaggcggcgggcgccgagcaggtacgcggcccagcggtggcctcgggtcgggctggggcgccccgacaccccagaggggcaagtgccaagccgccctcgcgctcggaggccaggggcgccaggtggctgctcgccgctgcgacccgacccctccgcgccgcggctgacctgtctcccggtggagcccgggggcctgcaggagcccaaagcgccggaccctcccactgccggcctggggcctggccgagggcacggcgaggaagtccctcaaggcagaacccaacttgaatgggtgttttctttgcctctgcagagcagctggattatgcgaaggtggggtgggaggaacctgtctaaaaatagaggattttgacaacccctctagtgtgtgttattggtaaaaaaaaaaaaaaaaaaaaaaaaaaaaaaaattactcagaataaggtggggctacaagtgcaagcagccagcgctctcccctacagtggggtctaagccgtcagaagtgtaggccctcatctgaagttcatacgtcactgttctgcccaactcaggcctttcaacctaggattcagggcattcttcacgaatcttatttcaccagaagacttgttgatccaactgtgtttgaactgtttgactaatacagcttggaggagaggttagtcaagagataagccccttaacctctgatggactgaaaataatcaggaactttaaaaaggaggaaatatgtagccgaccccctgaagaagtgtgcatcctggaggtggttcaggtttgccgctccacattaggcccttctctttatcagctaggggcgatggagattgggaaaatggagcccaaagtccaatgtgaccacagggttttgggggaatcataacctaaatattacagctaacaccgcctcagccatcttgatgatcaattctatttaggtaaggaggaaatcataaagtcttagtgcaggctctgtgttaaacgtgttatttaaatgaactacaattttggggtgggtgtttgctgtgtggtctccattttagagaaaactgaggcttagagagaaaggaaaacttgcccaagatcactgagggagaggatgatgcaaacccaagtctatctatcactgatatcagcgccttggacctgtggaattctgaatttccatctgcccctgtgtctggtttgccgctgttgttttgcattgctaattcaatcttattaaattattagatgctgcattctcatgtttttcccttacgtttgtctcccaattaagtaacctcct

SEQ ID NO: 11211 - DNA, 6000 bp, Homo sapiens
acaaaaactagttctagatgaatggcagatgttcacctaagacatgaaactatgaaagtctcagaagaaagcagagcagtaaatttttgtgaccccggatttggctaatgcttcttaagtactgtatgccagtagcataaatgacaaaataaaaggtagtttaatttcatttcatgcaaatgtaaaacttttgtgcttcaaaaaggactccatttaggttaaaaaaatccttatagaatgagagaaagcatttgaaaatcgtatatctagtaagggactggtatcctgaatacataaagaactcttgcaacccaacattataaagcaaaataacccaatttaaatatatgcaaagaattcaaaaagatgtttctccaaagtgagacaggtataatacagtgtggtcacaaaagaagaaaaaaactttaggcagcagtttcaggtgactagcaaaaggaatctgttgaaatatctgcagaggctctgggctgataagaccctaaaagacagggtatggaccaggctggctaagaatgagtggacccaacatggccctgggtttggcctcggtttcacctaggaccctattatacactaattgacatactaaacgcacacacaccagcgtcttggcaattcagagaacaccaatatttggtgtaaaaatgggtggcaccacagttctgagcagtctccaccttcttttaggaattttcatgaatattccaccccttgttaaagaaacccagaaaggtggcagccctaaacccccttgcacctgcctctctcttgagttcccctgcattccctttacatgagtgtgtactttcccttttacaaaaaaatctccgtcctttctctattttcctactggtcctagaattcatttccccaggcggtgtcaagagcccgacaccggctggggtcgaggtctcatcagagtttggggaccaccggttgcccactggcatcggaagaagaatgcaaatggcagtgagcccaggaaaaggtgctcagtgtccacagacctcagggaaatgccaacagcacccacaaggggacgcctcaccccgctggaatgggtgaccccaaacactgtgaggctggagggggtggggcctgcgttccttacaaggcagagagcaggagactgagagttggtggagtgtagggctgttcctgtgtcatcctcttcccattttcctggcggaggtttctctttgttctctggccctacctgcttccttcctctccctttctctggttctccctcccgtccttcatttccaaccatcccaaggttttctctgcctcaagacgtccatgctcggggcccccagcccagtggagaaaccaggagccctggaccgcgagcggcggggtcggggaggcgacaacgggaagcccctgttggatcctgggcactcaggacctagtgcgccatgggcgccctcccgcagcagccccagggcaaggaggatgggggtcctcgtgggggccacactgtcggatccccagggatccgagcgggactgtgacgtctccacactgagccggtggcaaagtcgccgcgaggatgaaggaggaacctcgtgctcttcaccccaccaggccccgcatttcctgtctcctgccacggttccttgtcgcgaccggcgagtcctcccaggtcttcgaaaggccgttttgtccggaggctgtggacccggaggcccgggagcatcggcgggcagcgtggcacccactcggcggtctcaaccgggcaggacccgggtccggagctcgggcgaagcgggcgtcctgggaggagcgcgcagaacccggagaggacgcagcagggtgaaaactgaaaccgcatatgcgaactgtctccgaaagtcatctgcggttgaaatcagaaatcacctataatatcccctttgtgacaacaccgttgggtaaatatctagaaccggtgcctcgtcactgcagcagccccgcacgcagctgcccgggttcccctccccggaccctagtggcccccaacagatcaggcgggcccaccgtgtgaccgtccctgggactctcggccccactcttacttactacttcacctccacattttcacctgtttcagaatcaaaaccctgaaaagtcatgtgtgaaaggctcccccgcccctgcctgcgtccactctcattggccacacgccagggaggaaagtttatttgattcttctcatctttccagggagtctttatgccgtttcaaacgaatataaatacatattctcaattcagacgcggatatttttgacccttgatgaaccctgtcaccctgtccttcaggaagcctgtaccagtttcccctccctctacggtggatgtttcaccatcctctgcccaagctgggtcatcacaatcacagacaagagtgtcgccagcattgccatcctatgacatgagatgctttaaaggtgcattacttcgcacagcaattctgtgtctggaaatctattctacacaatgaaattgtgattcatgcaagcacagtttctgcagcatttcgcttctctaaaagtcactggagaccgtctggatcttcagacacagacactggttacttttgttgtgatgcagtcattctatgtaatgtgcagagataaaaaggaaaaaatctgtatgtgcaggtattgcaagatcttcaaagtgtgttattttgagatagaatctgtgttcagcagagtgcctatgggtttatatttgttttaaaaaccagaattgatacataaacacgtatctactgttagtaaggaaaacagtatttccataacttattgccagtctctttatccattttaggaaaaatcgatatacttgaaaagccacggtggcaggaattggtcatcacccaccaggattctacactgccctacaggtgatcccaactgaggttgccagaggaacaggatgtggaatgcagtcgcgtttcagagaggaacctaaagtcagaatggaccaggggtcttgccctgacctctgcctcttcacccaacccccacctggtcaggcagtgaccctggaggggctgggatgatcctgggagagcagtgaaatggggagccaatggtgggagcatggtgaacatggagagcccagaccccacaccatctggggaggagctcatgtgatgctgggagcactgggaagacagggagcctggacacagcactcactgctcctcccatctgggacaggattggggtgggtgatgagaaaagtttcctgagtaacacagttcccaatcctggcagaataactcaccccagttgcactcacagccaagacccactcagcccctggaccagtctaacacagggcttggtaaatccaggagtgaatactactgaggcatctgccagggcataggaaacagtaacaagaggacggctcagctagtggctcagactatcttgccccacactctccaatattgagtagggagtaagccttgagcccaggaggttgaggattcagtgaattatgatcgtgccactgcactccagactggtgacagagtaagagtctgtcacacatgcttacacacacaaattaaattgtgtgagcagttgtcacacagggagatctggatgcactcactgtggacccaggtctcagcgagcaggagggtgttctgtattgtgggaacatgagggacacgcatgggaccgggcatttgtgcctagctttgaagggtggctggccctttgcccagggcgaagaggccagcagaatgcactaacagtggggaaccaccaggaactttcacttgaacctgctctgctgagccccctgtgccatccgtggacctgggcgagggaggctgctgaactgggagctcagggcccatctctctgaggagctttctaaatcagcaagtgtgtcacaggttgagattttaggaacggggtcctccatgttgtcctcgattttaataagtagactcttttggccaatctgcattgggcagagcaggaacaagacataattttttaatatatatttttaaagctgtttaattttggtaaaaacatagaagataaaatttaccatcttgaccagttgtttagtgcacaatatgttgttttaaacctctggaaccctgcctgctgctcctgtaataaaacctagcccgggccaggcgcggtggctaacgcctgtaatcccagcactttgggaggccgagacgggtggatcacctaaggtcatgagtttgagaccagcctggccaacaagatgaaaccccatctctaccaaaaatacaaacaattcgccgggcgtggtggagggcgtctgtaatcccagctactccggaagctgaggccagagaatcccttgaacccgggaagcggcgattgcggtgagccgagatcacgccactgcactccagcctgggcaacaagagcgaaactccgtctctaaataaataaataaataaataaataaataataaaacctagcccggactgtaatcacgtccactgggaactggcgcagtagtggaggggacgcgatcaggcccgtggctgcgcccagagcatgataagccagggacctcgcggcgcaggcggagggagggagagcgtcgcggacccaggcggggacagggagacgccgccgccgctgaatattcctctgcaagtttcttcaccttcaataaaaaaatgttgtgatgattaaatgagtctgtcgtggaaggaaccgtgtcttggcaggagccgggcggacacccagacaccaacccgaagggggttgggacaaaggggagggacgcccgggaaggggagggacaccgtcagggcagccaatcatatttctagccgcgtgacgctatgacccgcttgacgctatgacagcgggaaacggggggcgcgcccgtacatagggaggctttaaaaccttgaggtgattcatcttccaggctctccttccatcaagtctctcatccctagcgctctgggtccttaatggcagcagccgccgctaccaagatccttctgtgcctcccgcttctgctcctgctgtccggctggtcccgggctgggcgagccggtgagttcgtggatggagcctaagccgggcggggaccaagcctggagggctgtgaactgccgcgggtttcagaggaggggaggcttctagaaggacgggggagatctcccctaactgcgcccccgttcagttccggtcggcggctccttcctgctgggtgcagtccccgaggctgcttcttgcccgggaagaggcgaaaaggagcggggtggaaaggaggctggcaggagggtggaggggccggagggctgcagagagcgaggtggggcggggatccctggtgcagcctggcagtcccacccgccctcgggaaggaaaaaccagagcccccggaaccggagctggggacaggacaggggtgaagcgggattccacagggacgcgatcacagacacccccaccagccacaggcctgctctgctctcacccgctctccaccacacaaaccctccagcgcccccagggctgcgtgcccttgaatttttccctgcactttcctgtagacactcacctgcacccaggggctcagcagacaaccgccacccctcccctcaccatccactgccaccacccaggtcacgtcctcttactgcccacctcagcccagctggtcaccccagaggtctccccatccatgaaggggacctcaccacctcctacaccacgtcgcaccttctgcctcttgcctgaggacacaccccagcaaacacaccccaagctcccctcagaacctgtgcaggggggatgggaagcaccatttcctccaggatgaccctgggaactctggtgagtagaggcacccacttctgcccttggggcccagaccgcctgttcttcctacgggggtgtcagcgtcatagagaatagtcactgtgtagacaggggtcagcaaactctttctagaaaggga

SEQ ID NO: 11212 - DNA, 6000 bp, Homo sapiens
caggtagtatctttacagcagtgtgagaacagactaatacaatgggtaagtgtatgtgtgtggatatatatatgggtcatgacataaaatgtatttattgtggtttgtagttaaaaaaatgtttgaaaaacattgggcttgagtactatttactgtgctggccacccagcacagtaacattactgtactgtaattacagtacagtaattactgtaatgttttgttttctcatgaattgctgtagctatgtactgatatactttaaatataaagataattgtggagtgcattggcactgtatgtggtatgctgcagatctaaagctctggccgtagatctgcttgaggtaatgatttgaggggtctgtggcaggtaggtgggagtcaaagctgcaggaagttggagctctagcaaaagcacctggggaggctgtgaatgagtaaggaaagagcccagggcagaacttgggaaccacctaccttgagggcaggggtgtaggaaaaagagcccacaaaaaacactcactgtaatgcaatagataaagaggtaggaggaaaatcaggagggtgttggtacctggagccaagacaggagagagtttgaatagtgaggaaaggttcaagattgttaaatgtggcagaaggtcaagttatataagcgctgaaacgcgcacctgtgcttgagcaacacagagctggctggtgacctcagtgagggcgcagggctccacgatgagatgggaagacctagagacgtgggggaagggacacttcctccagaatgtttggtggtaaaagcgaggagcacaagaggccattggctagaagggaggataatttgctcctctagaaacaaatttgaacctagtttttcagaaggagacaatataccccacatgttaggcttactgaaatgggcagaggtatgtaatttttgtttaaagggatggacaaagctatggtttttttttcacccatttttcatcatgtctgaacagtgaggtgagaacttacgttagtttttgagacaaaattttagacttgcaacaatgattgctgttgctttttttttttttaatgcaagcaacggccaaattattttggaattacgatcctaaattgatcccagcctgatacaatcaaaggtccagaattagaaggagaaaaagtggagagtgaaacagtagccaaaagaaaaacttcactgatatactgtcaacagctgtgctgttatcactctgtaaagaacaatgaaatattggaatgaaaatggaaaatgctgtgggtaaccaatggaatcctgaaagacagattaagtttcttcaacatttataatgaaaaccagactgaaaataatttttaatttgtctttttgcttcatcaaatcttggagaggattcggatataggcatcttatcatttgacatttattactcaagataagaagattatgttcaggtttgtgggtctccaggatgcaattataacattgtcaaagtagattaccaggtgttgcataattattgtgccgtttaaggaaatttgcatctgagtataaacatgtgtatttaattattttcctggggggtgacaaaagttccaggactcctgattaagtcatccatcctgtctaacaacctttgggcataaagatcatattcagagataaaggacctatataattcctaaacaaacaaacaaaaaactttgtccaatttgggaagcaagtaaaacataaccaagctaagaaaacacaaaactacgaagaaaaagattcaaatgaaacatccttaggctgccctctcatagcagggagtaattgccttcaggtaaaagttgattccggaccattcaattcactgaaagctattcactgtcttagattaaccagcacctaaaaacacttgactaaataggctagaaataaaaatgttttccttgaataaatgtatatattattggttttgtagatgagaaataccactggttttgccgaatttaaatagtcagctatgtaaagggtctctggactaggaaaaattcctttattcctaaatattttggcttcaatatttgaaatctgcaaaagcagtatttctatctgtcaaaatgaggccattaagttttgattattcaaacctggaatgaagtgtgtgtgtctgggggtagaggagatgatatggacttcactttgaatataaattacgtactgggtggagcaaatggatttaaagaaagaggaaccctggttcaattctatttgccagtcaaggtgactcacttgaacatctgaaggccagcgtacctgtggaaagagactatttcctggattttcttctgtgagtcaagatgcttaaaacccatgtcttttagtatctgtcattttggagttgtaagggaaaattgagttttaagcataaaggaaaaagcatcttatgctgtgagaaaaaaattgacatcagaatttctcagaaagaacttagtgaattttttaaaattatttgacgttatccttgaatgactgatttcgttgtccaaagacttaaagaaaggagttggaattccccagactttgccaaactgtgggatggcacaataggtattgtcaggtcccagggccagaatgaggtagagattttatgtagtttctcctttgttaataacatttaagctgttttcgttctgatttgcattctcctgattagtgcagttggtcaaagctggtgctagcggacttggccagatgtctggagccatataagctgattctgtgtgggagatgctggggctggttcctgccctcctttcccttcctccttgcagacagagttccattttgaggtggtcactctcttggctgtgtgttcggggtttacagtgacccaccctaaaggcagaggggcagaggtggtgcagagactggtcatcggtctctaggggcaatcaaggtaattcatctcccttgtccctgataggctcggtgcaaaacccatcttctaaagggcagctggcctcttctagcggggcagagatcgttcagctttgacccctttgtaattatggcaggagtccagggccccacaccagccaccctatttcaatctccgcagatccttccccttcacattgtgaggcttgacatgtccctgtgaagagccgcaggcatggaacactttgggaaaatccctattcaggctctcactggaaaaccccagactgagggtacaaaggcaatggatcctaagcctgggtagagcagagctgggcgctggtggatcgcagagcctgaagcgccaggagaaacctgctggttacttttattttgtctttgtagtgtcagtctagaaccccacacaggatcttctccatcataggaaagtgttccgaggaatttgacttggtatctattttatctctgagaaacttctttgagtagctgccagtaacctttagggctcttttatttaaaaacaacaacaacaacaaacaaacaaaaaaagttcatggccaggcgcggtggctcacacctgtaatcccagcactttgggaggcccaggcgggcggatcatgaggtcaggagttcgagaccagaatgaccaacatggtgaaaccctgtctctactaaaaatacaaaaattagcttggtgtggtggcgaaagcctgtaatcccagctcttcaggagggtgaggcaggagaatcgcttgaaccccgaagtcagaggttgcagtgagccgagatctcgccactgctccccagcctgggcaacagagagactccgtctcaaaaaacaaaacaaaacaaaaccgttactaaaagccgcttacttgtattcattcggacgtctctgtggtttctatcagttcctgaacaggaatgtattgttgtgtacaagaagaatatgttagtgtctccctaattttacacatgcagttttctgtttacaacttccctccccaccttattgtcctaacccttctgagaagctccttcatgtgtaactactaggctgtgatgttttgcagtagagtcaggcagtgctgttgccctcctgggtggaaggggctgtttggaatgggatggagagaaagctggcagtgcacgggacgcaacactagaaatgtgaaaccaggaccctgtcgccgaccctcttagagaaatgtttactgtctggatgcccccagacgccttgcctgagcgccgtcacgctttctgccctttggatacgaagatatccgaatgctgtgcccatgattaagcagacgcttagtaaggaaagaaaacattggtctggaaataatttctcaagcgccgtgactgccttattgcacaaacatcgcctcttcgatgtttctcacaatccagagaggaagtggcatccatcgtggcatgaataggaatgtgtgtttggagccgtggggcggggctggaggggaggggacgctacccagccaacagaggagacggtggggctaggaaaacctcctgggggagcctgcggcgcggtcctttcctgtgtccccttcgctgcgggtcctgcccggggccgcgccaggtggaggccccgagaggcggcgcgtttcctgcgctccgggattgcgggagaagcgtgagtccctgtctccgagactagaggccacggacacccgcgcaggagcatcccctggcaccccgccccacgcccgtccttccggagtctacacatcggcgacctcccgtgtctaggcgcacacatttcccgccccgcggagactcccacgccccgggccctctctgccgcaggcgccagatcccgcctctgggggctggaccgagagggtcctcggcggcttctttaaggctgcggtccccgccccgtcgtcctccccgccctcctccctctcgccgcggctcctcccgccctcccagagcagccgggcggctgggcgcgcgcggcgcagagcaggtgccggggagcccttcgcatgcggctgccgggccggaggtggtagcggcgccgggcgcgctccgcccgcccctcctccgggccgcactgaggctcgggcgcgcggggacatgtcggtggcgacgggcagcagcgagacggccggcggggccagcggcggcggcgcacgggttttcttccaaagcccccggggtggcgccggtggcagccccggctccagcagcggctcaggctcctcccgggaggactcggcgcccgtggccacggcggccgctgcagggcaggttcagcagcaacagcagcggcgacaccagcagggaaaagtgacagtgaaatacgatcgtaaggagcttcggaagcggctggtgctggaggaatggatcgtggagcagctgggtcagctctacggctgcgaggtacctgggcgcggggctgggagggtcggggacctctctagctcctctgtgcccgcgcagtaattttcccgggctccagctccggggcgcgcatgtccctgactcccggggaccaagtgccaggagcgaggcgcggcgccttctctcccccgcggtgccctctggcgtcgggctcagcggttgggacgcccctgtctgggttcggctgccggtgcccggggatctgcgggcccccttggtggccgtggggagggttgggtcccgcggagcacagtgcttttctccgagctccgggcgcctctgggctccagctgcagctgcgcaaagcggggctcggaggggctcactccagctgcgcctcagcagcggttggggatacagcagccaaagagagcagcgctcactgctgggatccgggcagccctgatttttgtggagaacgagcagggaaggaaggaagctgcctcgtggaaaggagaggttctggggatctcagaggcccccttggttcttgaaattccccgtgaaaatcctgagatggaacgctttccgctttccagccagccccgacggtgtctccataattccgccctgcattatcagagctgcacacgttgtgctttgttgaagccgtagtttttc

SEQ ID NO: 11213 - DNA, 6000 bp, Homo sapiens
gtgaagctcacaggagttgcaggaaattatacagtttgtcagaaagatctctgctgtcatttaagctacaaaatgtctgagaacataccaaatgaagtgtacgctctaggggcatttgacggactgcacactgtggaagggcgctattatctacaggtaatattttgatgtcagaagagttactggataaaataaagacactcagttaaatatacagtttagataaataatgaatgattttttagtataagcatatcacacttttggggatttatgtatgctaaaaattttgttgtttatttgaaattcaactttagctgggaagcctacaaatacaggctaaatttatttgctaaatcttttttttttttttttgagacagagtctcactctgtagcccaagctggagtgcagtggtgcatcagctcactgcaagctctgcctcctcggccaagcaattctcacgcctcagcctcccaagtagctgggactacaggcgagtgccaccatgcctggctaatttttttgttgttgttgtattttagtagagacagagtttcaccatattggccagggtggtctcaaactccccgagctcaggtgatccgcccacctcagcctcccaaagtgttgagattataggcatgagccaccgtgccctgcctatttgctaaaccttgaaaccttagatgtcagttcaattttaagctgattgggaaaaggcaggacatttacttgcagtagcagtattaaaaataaatattcaaattacagatcattataacaggagttcattgaaaacccattttatttcctgcctgaacaaattaagccattttccttatatgttcacaaatgcctatcttgctttataaagagtttgacactaagtatatcctggatatgaatggggttgaccaccaagatagttcaatggaatggtttattgctgcaaagatccaatctctcattgctcgcaagtggcctccatggtcctctcattcttctcttctcttccttggtctggcccccatcttatctcacttaacagggcttcctattgacagtctgacaatctcagctccatccagtcagttctccatattgtagttacagaaatcacaaaaagctgtttttgattataatactgtctggcttaaaattcttcactgacttctaattgacaaatcaaatttcttaacatgaaagacacacaaagtctagatgtgtggtcccttcctattctctatcctctaatctcacttctacttacaaatatcctgggcttctgcaatattgaaatattttcccatctcctatttgctagcatatgcagaacctcaaggtgtttgcacagattgtttggtcctttatccgtggcgagccccacctactaatctttcatagcacttttctggtgttatcgtcaccaagaggggttcctggatatttcccacagagctactcctacctctccagatgagttaagtacatcctttatgtgctcccaggacaccctatgcttagctttatcaaagacatattatgtcatagtattcacttacttatttgagactgagaaccccttgagtgctgaaattatgccaactgcacagtattttgtttgctctatgataactaccctaacaatactttttcgttttagcaaatgaaggcctactatatgccaggtatttatttagtgttaatgatatgaagataaataagcatagatcctcctcttgaagaattcagtctttagtaatggagaaagacatttgaacagataatttcagcataggttggcatgtgattgtccgtagaatgcacattttgctggaggagtactaaagagctctacttagattaatttgggaatgcagggaagtttctggagctgatgctattatccaggtgaaaaagagtaggaggggattctttgtggtgtgaagagcatgaacaagggtgtggatgcaggcaggagcagggtctgcagggaacagcaacaggtcagtgctactaaggcaactgaggcatggcttgcgaagctgggtttggtgggaaataagcctggaagcaacatcctgtcctgcaggatcttacctagcacacttaagattcagcctttattctgtgggtgatggtcagctggtggaagtggtccagtgaaggaatgatgtggtcagatctacctttgaatatatcatttttactactctgtagatgatggagcaaagacccaaaagactagattattaaaatagtcttattaagggtctggaccaagactgtgtttgttggaataaaagcagggcatggagtctagacatatttagaaaatggaactcagtggccaatttgatgtggaacaggaaaacggaatggagagtccagaatgtggcagatttctggcaagaatggctgggtgggtgagatgcatctgacagatcaggaggcaagagaggagcagactcactgacagtgggtagaggctgagttcagttatagatgtgctggttttgaagtagttatgagacattcagctggacccagccagttgtctgttgaatactttggtctgatgcttaagggagatactagaattagaaatattgtttcaaaaatcagcaagatacaaggggcaattaagcaaacaacagtgaatgatacgacaaaggagactgtactgacagtaaagaactattgacaaagtagaacctttgggagcttcggtatttggggcaggaaaggacagaggacaagaaacctgcaaatacaattaagaaataaaggaaaatttaaaaagagaacatctggtagatgccaaggaagtagagactcttggaggaaagaaatcatgaggtgtattaacacaatacgttgaccattattagcatttttgagtataattttggcagaattttctgagctcataatgataggatgatgggcagattatattgggttgaaaagtcaaagggaagtgaatgcacttttttccccaagaaatcttatctgagacaagaagaagagaagcaagacaatggtttaacagagactcatggtcaggagaaatgtgtgtgtatgtgtgtatgtgtgtgtgtgtgtttctcaacaaacgagagagccttgattgcctttgtaggtctaagagaaagagctacaaaaggaaaaaatacataaaatatgagaggaatcaggtccagtgcagtggcctgtaatcccagcactttgggaggtcaaggcgggcagatcatctgagatcaggagtttgtgacccctgtccaacatggtgaaacctgtctctactaaaaatacaaaaattagccaggcatggtggcaggcgcctgcaatcccagctacttggaaggctgagacaggagaattgcttgatcctgggagatagaggttgcagtgagctgaaattgtgccactgcactccagcctaggcaacagagtgagactctgtctcaaaataaaataaaatatacaaggaatcattactcctactcagtgttccaaggtgctggaggaaagagggaaaaatagtatcatgaacacaggtacaaaatgtccaacaactggaaattaaatgaatcatattgtagaagaacatttattgccataaaattattaccatataccatatgttatattaacatatatagccttatatatgtgacattcatatggtattatattgctatataaatttttaaaattaaaatataaattgtgatgtattatttttaagttaaaaaaagttggtcacaaaacaagagagtaatctcttagctcttcttccctccttttccttcctgcctcctcaatcttttcctacctttttacctcctccagagtcttggctctacctaaagagagttgtgggaagttctttcttagtgttgtgaggtaggttagctttgtcaagtaaaaccaagctttctgtttatcttgctagacggtgatatttcatctaaacgattggtaccagatatgttttggaatcttcctatttaaagataataatacatattacttgatattaccagcagagtctgggaaaatacccagaatcaaacatattaatatatctattggaaaacatgggattattcaccttaaatagcttgaataaaaatgttatagccttatgttaattcaagttaggtcttaatgccaatgtgccagtgggttacaaaaatcctttattttcagaagattttggatttttgtattgaagataaggaattttggtataatattatatttataatttttcatagtctaactgtgatgatatattatgcttgaaaaatctcgattatcaccaaaagctacctccaaaccaagggaagagacacaaagagaggtaaaagtgaaataaacccctatcttgccacacagattttccaagcattttatagcaaatatgcataattttgtttatatcagtatgtcattgcaaacatcactcagagttttgcttttatagtttttctttgtttttcctaaagttattaattgccttatttttttaaatttcgttaattttctttgactttttgttaaaaccccatatcttccaacagcatctcagaataatttttccacaatatcattttcataagtttatcttgagctaaaaataataacctttctctgcactggtttccctctagtcattctgcacagttgtcatattgagatttcctttactgtcatcctaggaatgctctcttagctatttccttgttttaggttctctgtttttctccttctacctttatttgctcctttgttctgttgtagtcaacgctgtctagtcacattgctctaatctgaactggctgctctccatgccttgtatacgataggagtcatcctggaatctccctttatcctcatggtgaagatttttctttaccacttccctgtgtggatttcctgttttctgttccccgtcttccttgttttgggcttgtgccctctttcttgttgttaacagtttccggaaagagagtgatcgggatgcaagatttttgagactcactggtctgaaactgcctttcctcttaaatttagttaagtatttccctgggcatggaattcaaaggtggttatgacttttcttcaggattgtgaatgtatttatatcctcccatcttacgttgctattgagaattctgaagttcttctgattcctgattctttgtatgtgtattcctcattccacaccttccccagaatgcatgcagaatttcttcctttctattttcttttctctttttctgaaactcttattattgggatcttctgcctcttggattagggctctaattttccgacattttctctgctattttttactactttatttttctcctctactttctgagagatttcctcctcttgatcttccaaatcttgtactgaatcttttatttttgttaacatgttcttaatttccaagaactcttttttcttgtcttcggagtttcaacacttattgttgttttgtgcatgtattattttttcttctctctctgaggctatttaggaaattttttattgaagctcctcccccctgcttccttcaagttgcttttatctgcttttttatttgctttttcatgcaataagtttttctcacatgtctggtaactcttggggattaccaaaaactcatagaaaattctgaccatgtgagtaacacttgccaattttgagcttcatgatagaatgatctagctggaccttttgctgcggggaaatcggaggtaagtgtctttggagacttcctcttgggatggtcaggtctcccaggtttcaagattcttctaatttccttcttgaatcagttgcctaatttaggaaataaaaatacaggatctccaggtaaatttgaagttcagataaactttgttttttttgagagagtctctttctgttgccaaggctggagtgcagtggcatgatttccgctcactgcaacctctg

SEQ ID NO: 11214 - DNA, 6000 bp, Homo sapiens
ttggtggtttttcctgtgcccttcacccaggctcccagtgacttgggagagcctcataggcacagagagctcttcccccccctcttttttttttggagacggagtcctgctctgtcgccctggctggagtacagtgacgccatctcagctcactgcaagctctgcctcccgggttcacaccattctcctgcctcagcctcccaagtagctgggactacaggcgcctgccaccaaccccagctaattttttgtattttcagtagagacgggggtttcactgtgttagccaggatggtctcgatctcctgacctcgtgatccgcctgcctcggcctcccaaagtgctgggattacaggcatgagccaccgcgccctgccagagagctcatttttagctactctgagttggaagggcagacacaaagaacctgtacctctgatgctttgtggaaagctggaaagtaccattactttaagttttgaggatcagcaaaatataattagtatcacagatctatatataattacacattgtttctacctaaacaatttcaatctttaggtgcctggccggttacattttaaagacctttcaaggaaaatggcctctaagtagtacttagatatgatagaaaaaggagaaaacaaaaagttcagcacaatcacaaatgagcctttaaaggaggttctgctagtatgtaacggacgggaaaagagactgagaaatcaaatggaaagcccagacacaaaaaggacaaactctgccagcgtgaggatataaatgtccttcttaatcaaagtaggaaaagcaaaggcctggcagctctaataaatcaaaaacaaaaaggaattcttgggaccctctgtcctgtcatgcaaacacaacccctcccacctcaggtttctcctcaatcattctggaccaataagtactttcatttgttgcttacagactcattactgtttttgctgcccaactatttccttttaggaagtttggtgtgtgcgtggttttgtaacctcacacaatagccacaatagcatgttataaatctcaaagtactttcacacagatcactttctttgaagatttcagtcctagcacccaatggaaacaaagacaaacaggaaagaccaacagtctgcaagggggctgaatctgctaaggattttaaatagttctgcaggctccacagagttggagaaatgaagacagaaatgctaagatttgttgattgactcgtccaaggttacaaggcaacaaggcccagaccagagcccaaggctgtttttattaaacactgcacaatatttgcacagtgaagatgctgctttagccactaataagctacatggataaaataaatgttccacatgcagggcaagtacaccttctcctttggcaaggctgcaacataatcttcaaaaaactcaggaaacaaaaagccatctcttcaataaatatctgcactacactcaggacagcctcggaccaaagctaaagctgattttgagtggtctgccaaggtgtgagttctcacagcagcactatcaataagtaaagtatccctcaatagcatgatcagctgtttccaccacagctaccacttagaaaaccccatttctcaaccccatttcacaaagggaaaacatgtctagggttcttgtcctatatttgtttatataacttatgccccaccttgttgcaaaagtatttaaattagggcgtggtggttcacacctgtaattacaccactttgggaggctgagggaggaggaacactggagctcaggggttggggattgcagtgagccataatttcagcacaacactacagcctgggtgacagagcgagaccctgcctcaaaaaaaaagtaagcagtagtacttagatagatctgacaattctcaattattcaagatggtttttcaatgtgtagatttgtatattttatctactccagttttgctccccctcccatccctacctcacaagtgtacaaacatctataatccagatataaatttgtaatattcttcatctggtcaaactcaggaaaaactgcacaagtcaaagtaaaattctactgaatcatatacataattcccttcctattagtacctccattgggccaggtttaggtgggctccaggtttattaagatgtcagataggcaggagagtagtgtgaaaaagttaaagaatgggggtgggagggtgctgctgatggaaagcatatatctctttcactccatcctccccttctctcacaccaagtctgtggccctggaatcacctgtctgggtctcaacgactctctgtcaagcagagatcatattgggaaaagcaaagaggtctggaaatggaagtgctttagcttcactcatgtaagggatcattttaatgtggacaatccttctctgaattatccagtacagactagatctgcaggatagtttgtttaccagatcctggccaggaagagcaagctcgttccctgattctcagggcagcaccataggtgcctctttaagatcatagccctgaaagtgttttcagtttagagtggacatggtaaattacttcctctcttttctaagacataaaagattttttgagtttttaacagagggctctcctactctgagtggtttcactggtgaatggtaagctactttactatgacctttttaaatattcagcatattacctgacccagaacaacatttctgagatctgaactgcagtcttctcttgcatactagttgtcactgtaaatacacatgtaaaatcacaccagggtaagctacaacccagacaaaccatgagcctataaaatagaaggctaaaccataacctgcttttcgagaccccccctacagccctaagaactatccaagtaacctgacagtaggaaaatccaccttaggtgtgcccaggcatgataatcccaaagacataaatggagcaaaataggttttaaagaattcttgcaacactgaagactaggagctaagaagagtctaaataaccatgctcagtgcccaaccacctgaaaagtggactccagggaaattttgttgttgttatccaccccgccccaagggaaacattttatctttaatattcaggagcaataataaaatattttggccactgttcttcaaggattccacaaggcacttaattctcatgtcaggctttctgaaatgcttgccctggaaagtgtcacttgatggctcacacactccttgaggattaggtgctgaccctaattaggcacaggcagaaatagttcaggaatccacatgctcagattcataactatactttttgtaaaaaataaaaacatataaaaaatgccttctggctggacaaggtggctcacgcctgtaatcccagcactttgagaggctgagttgcgtagatcgattgaggtcaggggctggagaccagcctgggcaacatggtgaaaccctatctctactaaaaatacaaaaattagccaggagtggtggctcgcgcctgcagtcccagctactcgggaggctgaggcataagaattgctagatcccaggagaagctgcagtgagctgagatcgcactgctgcacccagatctccccagcctgggcaagagagactgtctcaaaaaaaaaaaaaaaaaaaaaaaaaaaggccttctagtgatcctcagaaatccaaaaaccagacaactatggcttccacttccatttttcagatatccattataatactatttgacctcaaagtgaattttattgttccacacaagcaacagattacaccaatttcacaactcccagaatccaaacctacaaagacccttcccaccaagcactttaccaaaaacgggcttcatctccatcttcctttctttcacagttgaaaaactgcccttcctaattaagccaaccaacttcttacctcaataaaatccttgtttttcagtagcacgtacagtatttccagtgatgaacagtgaactgtctttcgtctcacacagtaacctccgtgaagaagatccaccttgttctttactgtatattcctggcatgctaactgcatcctcagacaattttaagtgactgaaaactcaggcaaagaaaggcaagagggcaaatagaagggcacaggagacaacgcttttcaaatttttctcactgcgacctacagaaacacactgtagaacacctcctagtacactcacacgtgtgtgtacacctgaagtgtcaagaaacaataccctaagtgcaacaccctctgatattttctatttcaagtggccgtgatctactaaactgatttccaactcaccaataggattcagtttgaaaaacactgcaataaatcaaaccttacagttgcattccacaagctactaatgaactcttgaaaatccagcatacagcagagacgctgaccaactacaagatccaaaccccccaggtgggcagtgtccttctgttcagcagtggcagttccccaccaccaccagccctgagagttaattatctcccaaactcccagagtttcccaagtagcctgaggtgtctgtcatatgcccttttaacctctttataaattcagtcccgtccgtctcttacggtggcaaagttcatttatcgtcggctgtggaaagcaatacttcctttttgtcccctccaggaaccagaaattaaatgaccaggttggtgcccgttgtgcctttatgatctatttgtgtgggtgatatatagaaagagtctcagtctctcccttcatctttccagtcttaatcactggtagatgcagtctctggtgaaataagaaaccagggaaccccctggcctgggggagggcgcactcatcagcgttgacagagtgaaagcaaaaactcaatcctcacaccacagaggcgtctggctaactcatctccagacctaagttgggaaaggggaggggagcgcggaaagcggagaagccggaggagacgctccggagtgaccagcgacggctgaacgcagcccgccctccccaagtcgacgccgcaacccggggaaagcaggtgagcgccggccacggacttgggggtcgcagaagcagcccacggagagcggaagggaggaggatccgggtaaggggcctcccctccccgtcgggacccccctccccgtcgggacccccccctccccgtcgggacccctcccactgacgctctgcctcccactctggcctctcctcactcaccccggggagtgggcctcccctactgcagagaaaggaagaggagaaggagggaatgaggacttaacgcccacccctgccccccaccataccgctctcgccgcccgggaaaatcccgccgcgggccccaccagccaagcgccgccttcgccccacgcggcctcttcctagcgcctgcgcgccaggcccagcccggcggacgcgatctgagagtgcgcgcgcaccttgcgtgcgccggcgtgcggggcgggacctgcggggctccgccccctccccctccctccccccgctccccctcccccatacactgccgcggccgccgcaggagcccggagctcgagccgcccagcgactccccctccccctcccccagccccgccccgccccaacccggggctccgagccggagccgagtctgcgcctgggggtgagtacgcgacccctacccagccctcgctcttttcttcgaagatcccaccaccacccaaagaaaaaacctggactcagctgcgcgtcccctcccttcaacctcctgcgggacccagaggtgcccgggcccgcgggacccaggggtggcgcgcgctgcccccaaccccgcaccatcccgagccaaatgtgagtcctccaacccctgccggaggtccagatacgcgccgccggctctccccagccccggggagatcccaaagggtgggacccccgcccccggcccccgagtgccactcttctcccacctgcccggtgcaggtgcgcg

SEQ ID NO: 11215 - DNA, 6000 bp, Homo sapiens
tgaagagacatgacatgagacaggaatgaagagcactggaaataaacgtgtgagtaaatataaaagacaattttttcctcttatttctttaaaatactaaagaattttaaaagaaaatatgaaaaattttgtgtggggtttataacatataaatgtaatctgcataaaaattgtaacataaagcaccagatagttgacaaacggacctagataattgcaggaatcatatgcaagggtttatatgaattggtatatttactctaactggactgtgaaaatttaaggatgcatattatattccctagagcaatcacgatagctagaaagccaatagataaagtgagattataaaatatatttatttacttaaaagatgtcaaaaaaggaggaacagaggaacaaaaatcagatggtacacatggaaaacaaataataaaataatagatttaagtccaaatcatctgataattatatgaaatgtaaatggactaaacatttcaaccaaaaagcaagggatggggacagaatttcaacttaaatagtaatatgaatcaaagagattttagggtaattactttggttctgatcataaacattgctgacttctaaactaatgtatccatgtaattctgcaggctctcaggtttctcaaatggtttgagtgtagccttcccttatagcacagatacataatcttcaggaaatatccataaactcaaccttggagaatcatgagttgggatctgagtgcttcttctctgagagagggctttgggattcatatacaaattgacctatctttctattatccagatttgtatatcattaagatttaatttgctatttgacctgttatctaaatacctcaaataatctcttacaggacaaaaagtcatcctctctagatcaagaaaaaaaaagctgtatcacactacaatagtactatgatttataagttccttgatagctgcctttctttcagtaagactgaaagccctgtcttgttcttttttgtctctccagcaaattaacccagtgcctggcatgtagtgaacaagtaaatatttattgagcaactaatacaacatgatccctaaccctagatgtaatttgcaacttgttggatacattcacctgtatactttttaatttttagaattaattttagtgatatatatatcttatgtaatagtttcttattttaactatacagtctgatgaaaaaagtatatacccacataactacaccacaatcaagatatataatatttccatcgcccacttcccctacaaattctctgtttttcatcatcaatctttatcaccacaatccctcctacaacccaactaacaggttctagaccactgatttaggttgtgtcactttatattagtttgcattttccagaattttatatacatgggatcatatagtatgtactcatttgtgtttgccttgtacacaacatagtttttgcgatttatgcacattgctacatgtattagtagcttgctccttttagttgaatgctagtccattgtttcactatactacactgtatccgtctgttgatgaatatttggattgtttccagtttggggctattattaacaaaactgctatgcacatttgtaaacaatccttgcttggacatatgttttcactttttcttgtgcagatacctaggagtagaatgggtagatcattaaggtaggcatatgattacaataaactgccaaattgttttacaaagtggttttaccattttacacttccaccagcagtgtatgaattccagttgttccatttttttatttgtttgagacagtgtcctatgctgttgtccaggctgagtgcagtgcccagctcactgcggcctcaaactaactaggaggctcaagtgatccttccaccttagccttctgagtagctgggactacaggcatatgccactatgccaggctaattttttattttttgtagaggtgggtgtctccctatgttgcccaggctggtcttgaactcctggcctcaagcgatccctccaccccattccgcctgggcctccctaagtgttggaatcaggtgtcagccactctgccgggccaagttgctctatatcttcagtaacatttgggattgtctttttttttttttctttaattttaagtcattctagtggttaggcggtggtatgtcacattaaaattcacatgcccaaacctctgaatccccatttacaagaatccctatcttacacgctaacactttggattttcacttaaaaaaattaatgatatcatgctcaaaaaattaatgataaagcaacaacagaccactaagtatttatcattctcctaacttcagagagtaagcttcatgaggctaagacctatcttgtttttcttacatttctagtatctagcacaatgcctggtgcatagtatgtacctttattagttatttgttgctgtgtaataaattactccaaatcttagcagcttaaagcaacaaacatttactgtctcacataatttctgaggggcaagagtggggagcagcttagctgagtggtcctgagtctgaggctatcatgaggttttagtcaagctatcagctggtgctgcagtcacttgaaggcttgacaagggctggagaactggcttccaagatggctcactcacatgactactgccaagaatcgtcagtcccttgctagttgttgtcagcagtctgcaattctttggcatgtggagctctagatttgctcaacatggcagctggcttccccaaagtgagtgattcgagaaagaaaaagttggttacatagaccaaccaggagatggtggatgttgtccctaacttcctggaggctggctaataaagtgcataattaatatttattgattaaagtaatgtgtgtctgatactgtactaagcattttacatatgtcatttcatttaatccagataacaatcccatgaatcatcctcatttgagatatgataaaactgaggcttatacaagttaagtaaactgtcaatttctacgaagctagtggcataacaagagttcaaacacagatctctttagctcaaaggctgtgaaaacatggttcacagtacaaatgaataaaagaattacattattctaagaataaagtgatttaggtggtctttttaaactttgtttaaattgagtcaaactcatttgtatgtggcggaagaaactagatgttttatcaggcgggaaaccctaaaattcttcaggtgagtaaaaagttaattgcttccctattctgtagttgacaaggtgttgtttcattttttctctcttactacgctgtttcaaattcttggcagattattggaaacaaggaaagtcaagaattctcccagtgactacccatagaattaaatcaacaaaaactgttgatcattgactgtgcatatggcactgtggcagcttcccagatctacaaagcaagtgagacagtatctgttgtttaagaggtcataatctctttcggattaaggtgatacaaaaataataacacagagaagctgaagcatcatggagaggcacacaaggaatgcttattgaggtctgaatttttaaaagactggacacgtctttaaaatacatttggtgttcgttaaaataatctagtgtgataacctctggaaatcacattattttaaatggagggaactagccttctttaattttttttttaaaaagcagttggaaaacttgaagacagggacttacttacctttccacatgtctctgtcaggaaccagttttctaggaagggtggcagaaatgagcttcatatgtttctggaatgcaagaatgtagaaaggggggtggaggttcaaagtccaggtagccctctgtgagaacgcaggaatcaaatcaggacaaacaaaagaagggtgaagtgggtagggcaacggagtttcgggattgactggaatgagagttaaggtgataatgctggggtggaaatgaaagtcagacccctccttacggactgggaagaaaggagccctcctagtaaagttgaaaagaccaagtgtcctcttctccatttcaccggggaaacgctcctgtgcctagtcgtaaggtacaggagagtctatggagcccatggagagtctaatgcaaaaactagtttccgaccaaactttgccttggccactgagcatgctcagctttgtcttctatagaaaagtgaactccgtggctccagattttagctatagcagctggagggcgggagtgagtgtgggagagccagcgtggcagcggccgcaggtggaaacctggagtttgagtatgcttgaaagggaaagtgtggaacgaaggggcggccgggtggggaatcagagaagcccccaaggaaatgattcatcattgtgattgaccttgactttagcaacccttcattaaaggagaaaatttggttattcggagatggggactgtgttgcaaacagttacaggcaaagaggggcagttcaggattccggccgtggtccgcaggaatgagtcggggcgagggaatggttgttataacccaatagtgagcctccccggtcatccgggctggacgggactggggttgtagcagaaaagcaggagctgtatggaggatgctcacctggcagcctcgatctgcccctcttccctcgctcctccctccgcaccagccacagctagttgtcaggggccaacatctgggccgggctggaactggctcagaaactcgcgtttgcctgcttatttctgcagctgggctccttgccaggtgcaaccacatctatgagaatctcgcagactctcagactcctatgcctttgctggtacagggaggaggatttactatcactcactgcataaaccatgatcaccagagatgtgctcccaagttacaaagcctgcaggcggtgcccgaggaccagagggccgggcgcggccagctcacacttctggggcagccgtgagcagcgggcacacgggcagccacgaaagcagcagcgagggtggtgcaaacacctcaaaactacaccgaatccagtagcgcctggcgcccccggcgcgcaaggtacgctttggggcggtcctgtgtgaccccggaagagaaagttgttttggggaaggggagcaaggagaggagtgcgagttaaataaaactaaatatcaaagttgttctgctctgctcaggccgcctctactccgcctcatctttgtcccaagtcctttcacagtctgccttcctcaaacggcccgatgcgcccccgtctttgccggagtaagcagaccgccagcagccggcccgcaggtcagtcgaccctctctggatgcaggtcgccgggaaaacccggagcggagcatccctcgggccgggaaacgccctcggcgcgcacccactggcgcgcatgctcagtccgcgcggcggctgcgagtaggaagctccgcgcggcggcgggggcggcgacggcgactggcgggtgggagtggaggcaccggctggcgggcgggggtacagggacggggcaggggctcccgctccaggttccttgaagcacttccgaccgcgaagcccggcgcgagaagcgagctaacccaagagccaacaacgagcgcggagagggcagcggactgagcggagccgccggccagagcgggctcggagcccgggtctccgccgctcgggacccggctaggcggcggcgggggcggcgatgttccactgcatccccctgtggcggtgcaaccgtcatgtggagagcatcgacaagcgccactgctcgctggtctacgtccccgaggagatctaccgctatgcccggagcctggaggagctgctgctggacgccaaccagctccgcgagctgcccgaggtaagggtccggcctcacctgagcgctctgcccgctcgtctgctgtcccttccgctcccatcctctctcgtcccctcttccatctccggg

SEQ ID NO: 11216 - DNA, 6000 bp, Homo sapiens
ttttaaatagtatctagtacttatcgagttctatatacccagcatgtgtatcatctcatttgattcttacaacagtcctgtaagttgtgggcacttttccccattttacagatgaggatattgagacatagagaaacatagtttcacttagctgctaagttacagagccagggtgtgaactcaggtctgactccaaagcccatgctcttaactgttaaactaagctctgctaaataagtcagttttgtgtcctttgtcagaactgttttagcaaagtagagtagtttttgccgccatccttatgagttggcttacgtggtggattttgcttatcagctggcactataaattgtaccagtcagctgttagctaatgtgtttatgtttagcaatggttacctctgatgagtacagtacattgatgttggtgcaaataaatgctctgttagatcattcatcttcagtgtattttcagtaataagcaacaatttgacagtggtaataaatttaaacctaaatatttttctaatatgaagaactcaacagacaagggaagtttattttatacatttgactttcacatagattgacattacattgtggcctaaggatttaataccctctggtttattcttaatggtatcaaatatggcattaggaagtcattacacagcatatttccatggcttacatttccataaaaaatattttcccaatagttttcattctcctgccttcctacacctgatttcccccactcattttattcaatcctctcttccaggtcccagcacaactatttaagaatcactcgtattcttaaaagccttggtgagcttggatatgaaagttttaaatctcctcttgtaaaatttattcttcatgaagctcttgtggagaatactattcccaatattaagcagagtgctctagagtattttgtttatacaattagagacagaagagaaaggagaaagctcctgcggttcgcccagaaacactacacgccttcagagaactttatctggggaccgcctcgaaaagaacagtcggagggaagcaaagcccagaaaatgtcttcccctctcgcctccagtcataacagtcaaacttctatgcacaaaaaagccaaggactccaaaaattcctcctcagctgttcatttaaatagcaaaacagctgaagacaaaaaagtggcaccaaaagagcctgtggaagagacagacaggcccagcccagagcccagcaatgaagctgccaagccaagaaatacagagaaggacagtaatgctgagaacatgaattctcaacctgagaaaacagttactactcccacagaaaaaaaggagagtgtatctcctgagaataacgaagaaggtggaaatgataaccaagacaatgaaaatcctggaaatacaaattgccatgatgttgtactagtacagtgaattatcagaaaacccagaagccagtttaggctagagaggaaaaaactactgtatcatttatcctaaagaacagagatgaggtcaatttcaaattttagccatctgtttgtgatttctgtcataagcattttgttgtttgtttttttattttggatgacaatgaattgaatatctaataaggagatttaagataagacccaataaatgaatgtattctgtaatgcttttaggatgtgaattttcaaattttgtatataataattactttgagaatattttcagagtatctagaaattaccatgtagtatttggtatacaaaatacattcttttgagacattatagtctacatgaaggaaatcaagaggataatttcattggattgctacacttttacctgatttatggctttattttactttattttattttattattattttttgagacggagtctctgttgcccaggctggagtgcagtggcatgatctcggctcactgcaacctctgcctcctggactcaaacgattctcctgcctcagcctcctgagtagctgggattacaggcgtgtgccaccacgcctggctaatttttgtatttttagtagagacggggtttcaccatgttggtcaggctggtctcaaactcctgacctcatgatccacccgcctcggcctcccaaagtgctgggattacaggcatgagccaccatgtctggctgattaattttttttttaactgtaagagtttgatcttttcaaatgtgttcagaaactaatttggattctttgattctagtatctcaacgtgtttatttttagattctgataagtgaaatggatgtccttgtggagctctggcctccccagcttatctatcagtcctgctgtcctcacctccttgcctctttccatgcttacccttaagccaccatctttctcagctagcgtgtgtgtttctagtgtagttggccctccatattcaggggtccagcatctgtggattcaaccaaccgcagattgaaaatatttgttggaaaaaatggatggttacatctctactaaatatgtgcagtccttttatttgtcattattctctaaacaatacagtataacaactattgacatagcatttatattgtatgtattaggtattgtaagtaatttagagatgatttaaagtattttacataagggacttgagcattcctagattttggtaactgcagagggtcctggaaccaaccccctacagatatcaagggaccactatacacattaggatgatctatattgaaatctacatggaacagagtgggacttctaattgtatgacttcaagattttgctttgtttaaattaataactgttttcagaattaagtgcttaaaaacaaatttgattgaaaagttcaagacaagaattttgctctctatggctgttccatataaatttgatggttgattctgaatgtaaatgactgaagaattaaaaaataagaaattcctttttaaaaggcatgcctcttgcactgtgaacaagacagtagtcccttaaaccatgaatatgtcagtgttctatggattacgaaattagtaatgttgcttagcccaaacgtgttttttaaaaagtatagttttgtacatctctaagttatcaaacttcaaaattgagaacaaatttaaaagtccatatatgcaactctagtaagcacttaataggttacatagcactggttaagaacaattaattttgtttctatattattactaattattattacaaatcaaaaaacactgtgataagaacttcaaagcatatatacaaatatagttaaagcaatgaatagatgaaacatgtctactttatttcatttagaaaggaattaacttttttgttaggcttttaagaaaagttctattcattttaatcccctagggaatttgtaatatgtcctacttcatatcatcttctgttgcctctattgatccacattttctgcagtggatttcttgaaaagaatcacacttatagtatgcctctagaaatatgattttactgctttgaagtttacatgaaacatgccagttgcttaactctaattttttatatgaatctcagtagcacttttgttgtacattgtgttccaataagtatagtatggaacactttctcatttttagttcccataatatgccagtttttgctttcctagtgttctgtgagtattaggatttggcaatctgcttttgcatttcaatttctgttttacatgcaagaaaaacatggacactcttacgtggtgcttgtagctgtgtctccgtagagctcagtaaatagttctacagggtttagaggatgagaagcgattgtcaaattaggctgaattgtagaacacaaataatttaattcaaaataacttaccaattttatatacatgataaagtattcagacaactttctaaatgcataatagtaaaagattgtgaccagatattatgatattaataaagttaccagatactaaaatcaatgaatgtaatttgaattacttagaaattgtatattagagcccttatgagtaaaaacatttcatttagcaacttaacttttagaatattcttcctacttagggattttgattagattgtaacattaaattcgagaatatttagtctcaagagaaacacttcctggcatccatcttaaatagtggccttttcccactatggtgtttttaaatgcatattcatatataatagtatgtttcttacatttaatccctaaataacttagataatcattcagtggagaacaagtaaaaggatatcattccttttggagataaacattgagtgtctagaatttttttctattaatgctttgtatattagttttttaaataagatctatagatatgtatttatgtgtgtcttatatatgaaacagtgctctgggtttgactcctatgttttgtaattttaaaaactacgatatgcttgcagaaattcattgagaagctgttataaaaaatgcagtgaagcatgaccaaatagctaaaaatattactgaatctttacaaatatataatctttattgttgtactgtggagtgcaaggatactaaatattggctattgataaaatactaacttgcatttcatggcaaatagatgttatatcgcttgattagtctagaacatttctaatattttgtgctttcatatatcaaaggagattatgtgaaactatttttaaatactgtaaagtgacatatagttataagatatatttctgtacagtagagaaagagtttataacatgaagaatattgtaccattatacattttcattctcgatctcataagaaattcaaaagaataatgatagaggtgaaaatatgtttactttctctaaatcaagcctagttgtcaactcaaaaattatgttgcatagttttattttgaatttaggttttgggactacttttttccagcttcaatgagaaaataaaatctacaactcaggagttactagagaagttctaagtatttttttgctaagtagtaaaaatataaacatatgaaaatgccataatgcctgtcatagtcattgtttcatattttgtcatataaaatcacctaccctgcttctagttttatactttaatctgagtgaaagtatgatgtggtggaaagaaaaaacagtacagtattacatctgagttagtctttgaaaaatcatagtagtaaatgaacctcaacactgagtggtcaaaaattgggttaaccaatggggggagaatatttggttaattgttttaatattaaattttcaagtttataatagagttatggttgagtagtcatccatactgagtaatcacgcattttttaaactataattgaggctcttctaaagctttgttttctaatctaagatacaaaggatattcttgatcttgcttgattgtaactacatctaccagtctttaatgtctgtttggggtgagtggcgatcctctgttgtaggaatgtttttgaagatttctattttgttttccacttaggaaattcccctctctcatttggggtatatgcgttgagtataaggtaggctgtatttagacacactagaatcattaaatgtaggtgaagttgtagagaaaaatggcctgggtcaatgtaggatctagaaaattaggagtgtacatttgctggcttctttttgagttttgtactgtttattacaggaacatatttgtgtggctaatctctagggtgacagtgagtactaccctgctccttctgcattctagttatccaacacacccagcagattgtgttcagggacagaatgtgtttttagaaatcccttattattgaaatgaataataatatagctataaatatgaatgtctggaggtatccagatgtgccttaacaaatgtaaatggttttcattcagaagtttacatttttattacattataaaatctcatcattgggaactttctaaaccatgaatatcagttcttttaatgaaatttaggtgg

SEQ ID NO: 11217 - DNA, 6000 bp, Homo sapiens
agctacaagcaagaggaaaggcaagcaggtagaaatagggtatggcatttctccagtgtggtaactgactgcctccggctccctggtggaagtggctcttgtttgcagataactctgcaaagtgcagtggttaagagcatacactcgagccaggcagcctgggtccttatctgggtctaccacagactggctgtgtgaccttgagcagctcatatactctctctgtatctcagtgtcctcctggggttgtgatggggagcaaatgagttacatttgtaaagtgcttagaacagtgcttggcacaaaagaagagttaaataaacatttaatactattattttactacttttttttctttttctgtttttcttttttctttcctttttttttttagacacggtctctgtctgtcgcccaggatggagtgcagtggcatgatcttggttcactgcagcctggaactccctgggctcaggtgatcttcgcacctcagcttccggagtagctgggactacagacatgcaccagcatgcccagctaaattttggtggtggggggtatcttttgtagagacggggttttgctatgttgcccaagctggtctcgaactcctgggctgacgtgattctcccaccacagcctcccaaagtgctgggattacaggtgtgagccaccatgcctggcttttttttttttttcccctcgagacaaggttttgctctcttgcccaggctggagtgcagtggcatgatcatggctgactgcagcctccaactcctaggctcaaggtatcttccccacttggccttcaaaagtgctgagattacaggggtgagccaccccaccctgcctactactacttttttttttgagatggagtctcactctgtcgcccaggctggagtgcagtggcatgatctaaggtcactgcaacctctgcctcctgggttcaagtgattctcctgcctcagcctcccgagtagctgggactacagacgcatgccaccacacccagctaatttttgtatttttttagtagagacggggtttcactgtgttggccaggctggtctcgaactcctgaccctgtgatctgcccagctcggcctcccaaaatgctgggattacaggtgtgagccaccgtgcctggcacctactactacttttatgctcacttgtggatatattcttgcctttctctctgaagtgggtaggggtagagtaaggatatttgtatctctttgttacagattggaagactgagactcaggtttcgtagtaacagagctcgcttccatcttcccctcctcccctcagaccacatggccttgctttgatccaaagccctaacttaaatcttgcccagtaactccactgaaaaagcttatatcactcctgtaatcccagcactttgggaggccgaggtgggcagatcatgaggtcaagagatcgagaccatcctggccaacatggtgaaaccctgtctctactgaaaatacaaaaattagctgggcgtggtggcatgtgtctgtagtcccagctactcaggaggctgaggcaggagaatcccttgaacccaggaggcagaggttgcagtgagccaagatcgcgccactgcactccactctggtgacagagcgagactccgtctcaaaaaaatacacaacaacccccccaaaaaaaagcttataagttatagctctccaacccccaccatgcacacactccttaatggtaaaattaaaaagttagctagaagtaaaatgctccatcactctctggacacacctcaaccaaaacctcaatatcagactagagaaactgggatatagctggtgcaggcacctcgtggagtggaagaactgccacctcccatccccaaggtattctgcctcaatgtcttccctcttctcagttgctcagcccagtgctggctttgagagcagctgcccttgatgaaactcaacccagcaaccccacccccacaattaaaagcttggagcagccctgtcaactggcagagctgccagcccaggctccaccccttacctgtcctgtcactgtgcaagttgcttcccctactgggttcctgcttcctccctgtaaaatggggatagtgatctgagtgtgccctgccttcctcccatgcaggtgggaagattaatgctgttgtggaggggagagtactttgtgaccccaaggaggcggacagcagaggagcatggtgatttcagttactaaccatctagctagatcctgtccaccctgctggggccacttcatgtagaagcttccaaaatgctctacctttctttggtgtggagaagacaggagttgataggaatggtactctggggcttgttctcatttcattctgatctgatggagccttggaattcagagagagaaacaggcaaggggtgggaatagagtgttgagattgctggagtacattggagttgagaattgagaaagggggactagttagagtccccccaacccaagatacctatacctacctttaacctcccatagtgccccagggttctgtgcatcttatgtttacatacccgggctcccagacacacccatgttcacacccccacttcgaagccaacaactcccttcatttccgtggactgccatgcagtcacctagctcctcctggacacaggtccacacatcaacacacatttacatacctggacacacacatttccacagcacccacaggttctctggcctgagaacatttaatgagcatttataaagcttccatggtctgccgagtcctgttctaggaacatcagaaaagcaccgtggtgccctgaaaatcattctagctttagaaagaaggtgagctaggtttgagtcctaggtccctcattttattagcagtgtgaccttgggaaagttacttaacctctgaggccctgtgcccccaccctaaaatgtcagtgacactcaattcaggatcgtcgaggattaaatgaaatcatgtaatatattattcttgaaactgagggcactggacaaatggtacccaatacaattactaaattagtgtgtttttaaaggcagcttggactggaaaaggaagaggcataacacaccagcacacactcctttagtcttcctaatccaggctttgcagagactccctgggaccaagtgaaacacataaacaactccatcctcccctccatctgagggcttctgcctcttgccctgtggttgaagtgttaggaagaggcaggagaaaccctctgagtccccctgggggctaagggatgctgctcccgaagttgcagtcactgtttctagttttgttgttctctttggttttcctttttcttccctgaggacctcctcccctgctccacagcccgcccccgaggcagagcttcagtgttgtcagcagaagggtcccccagggaccccccagtaaaatgggtggggcagtgctgcatctgttgaggccacacttctccgctatcctgggatcctccccagggccccactctgctctgtccccaagcactttgagaacccaggcactcaggctggctgtcccttttctcctcctgcccaccccatccactctgagcatcaatgcagccggccagttgcaggcaaccaggcagcaccctggctgcccaggcaggctaagaggcccccacccactcccccctcctttgccagtggaaaagcttgccgtagggcatagctttcccagccttccctgcttcagaggcaggagcatggcactctgggagttgtagtgctcataacactcaggcgatccctgtgcaaataactggagagaggactatggtatggggaagagaaatgagaataagcaggagtggctggggccaggcaggtaactcaaacccagaagtcctactatttacttgacttcctactctgacccatcgtcgaacctaagccagttatattgagttcaaaactctaaccaaatgaaatcatgccattttttctaataggcatagaaagaaaagatcaggatgaggcagctggctcctgacccattctcccctgacgtggagacccctcatcttacccttgagtcctcaggcctaagacccctccctgtcttcccaggctcagctccgccccctgccctaagacagagagaatgagagtgtgggggtggcggcggcaggggggatttagatagatgttagaaaatcacagataccttccagcttaatgaaaccagcctccccagtccaggcctggcatctagactgagttccccagacccagggtggggtcatagccagagagccagtgaaggtaaatccatgtgactcaactctcccctccctaggcccttatctccagaggccagagcttccatccacccaggcagcctggtgatctgtcctcactgccccctccccacgcccaccctactgggccatgaaggggatgggggcaagcccagctgactgctccaccctctgcccaggaggaccatgcggcagtagcagccatgctgccctttctgctggccacactgggcaccacagccctcaacaacagcaaccccaaggactactgctacagcgcccgcatccgcagcactgtcctgcagggcctgccctttgggggcgtccccaccgtgctggctctcgacttcatgtgcttccttgtaagtgcctgctgccaccccttaccttggcatccatgccctgtacacacctggcaaacacttccagctctaaccactctcccacctgccccggtttcccaggcttaagcaggaggagtccccatcatccagcccaagcctcgcctttgaccattcacccaagccagggtcatccccttctaagacaagattttggaccctctgcttctgccccctagtccagcaggtggacagacagcctctgcacttgccaactgccccctcttccctcaggcactgctgttcttattctctatcctccggaaggtggcctgggactatgggcggctggccttggtgacagatgcagacaggtaagggtctgggaccctccctctagctctccacacacacatcttgttccacactcctcaggaataggaaggagccagccctctctcattcccctttgctggggggatgagaagggactagccccaatgtgggcatgggggcatgagggccctaagttgggcccctgttcctcacctgtccccagggactctcccccgcccctgctaaccctgtctgttctctgtccccaggcttcggcggcaggagagggaccgagtggaacaggaatagtatgtggggcaccagccccctcattcccactaaaccagctttcccttttcttctctcacgcttctcttctcttcctgccaagttgctggtttctttttgcagttttctcctctgcaggctcatgtttcggattaacgcaggcggtgtgctttgcagagcagggggctccccagcttgtctctgcctcacctccccttcatctctccctctggctccctgcctgggagaagtccctccctgtgtgcccctgcctatgcagcccttgttggctggaggggaggggctgtcctccaggaaatcctcagcacaatcacgtagagacaagattgggtgtcaccagcagcttcttgtccgctaacagctagttcttcatattccagggttccctgctcacctcttctggaggcctgggaggagggctgcccaaggagccccccagtctgggcttttttgtcactttgtcatctctgtctataggattggagttggagttgtaacagctgttggagtcagggaagagggaggggagcggagggtagggtcccacccaggagaccttccagtctccccagcccttccaggttctcctggtccatcctttcctccacctcctcattgctctttgcataatgttggctccgttgcccgcccccggcccctgccagtcaactctggaactgcagggccctctggcattc

SEQ ID NO: 11218 - DNA, 6000 bp, Homo sapiens
gcacaattgttgtgttgttttggtcctctttagaaagtgtttttttttgttgttgctgttgttgttttttgagattcattatttattcttgataatgttttctttgttaaatttgtttttttaaattatactttaagttctagggtacatgtgcacaacgtgcagttttgttacatatgtatacatgtgccatgttggtttgctgcacccattaattcgtcatttacattaggtatttctcctagtgctatccctcccccatccccccaccccacgacaggccccagtgtgtgatgttccctgccctgtgtccaaatgttctcattgttcaattcccaactatgagtgagaacatgcggtatttggttttctgtccttgtgatagtttgctgagaatgatggtttccagcttcatccatgtccctacaaaggacatgaactcatccttttttatggctgcatagtattccatcgtgtatatgtgtcattttttcttaatccagtctatcattgatggacatttgggttggttccaagtctttgctatggtgaatagtgctgcaataaacatacatgtgcatgtgtctttatcgtagcatgatttataatcctttgggtatatacccagtaatgggatggctgggtcaaatggtatttctagttctagatccttgaggaatcaccacagtgtcttccacaatggttgacctagtttacactcccaccaacagtgtaaaaacgtaactattcctccacatcctctccagcacctgttgtttcctcttgaatgcaggtctccattaactttggagattgttacatgagaatagaggaaaaactttcagaactcatggagagctaaaatgctcatgaatatcaagcagaataggaattaactaaggggactgaactaatctttttgactttttgcttaaacattgctgatcttttgctttgtttttcagagccttgaaacttttcttttgagctattgacagcttttaacaatttagtatactccaatcaacaaaatttggagcatatttgtttctctctacctgatttctccagaatttgtaaactatttgtgagtattcttaacttgtgccaatacagttatttgcataagtgcagtaagaatctgttttcatttgtaacaggacacagttggagaaactgattattttaccaaggctttgagtggaaaggtgtactttcctttaagtaatcaaacctgacttatggagccaataaaagcccttgggaaaactggcctcacactttacaaagtccctgtacagggtttctgatatgtgctaagtaaagaatgtcattttctgacaggtccaggagcccctggtttatcatggaacatcaaaaagaggaaattcaccctactcataggtatttgatggtacaaatccatggctgagcttggctttaaaaagaatcttatctgagattccttctatggaacaaagttccttcaaagccaattttaaaaagcctatgtgaaaaataattattcttgctacactttatataaataatctggtcaaatataataaagcaaatcagtcctaccatgatttgtctttagtaaaaatggaaaactggagagagaaaaattgtttcaaaacttacagtccacttgttgttagatactagtcttgcctaattttttcaatttttattattttctacagtttaggctgaattctaatttttcctggctacaagtctccaaaataatatttttaatttttttcttttcttttccttttttttcctaattaggagtcactgaaaacagctgtgcttttgtaaagccctgcaaactgaagctagacaacttaaacttcagaagaaaataacagcaacctatttacacgcataagccactttcatacctgcctactgatgtatggacttcagaataacgtggcctatgtatattttccaggattgttcttttgtttgttgtttttcacccttcctccccctattttctcttcacaagacatgggagttcacagccttctaaaaattagctttcctaataacttgggacttacctgtctaggaataaaccatcctagcatgagcgatcagatgaaatctgggaccaaagactcatttttcttctaaaatgctttctccaaaaaaaaattttttttaaaaaaaagaaaagggggcaaatgtaaaggaaaatatcttgggcccccaaatcactaagttaaaaggaaaattcaagctaggaactacttaagacaaacttgcctcccattctattcaaagtcatccctctgctcattgagataaatgtgtatctgactgcctccttaggaaaggtaaatcagaaactcaaaagaatgcaaccatttgtctcccacctacccgtgacctggaagcccccttcccgcttcaagttgtcccgcctttccgaacccaaccagtgttcattttacatatattgattgatgtcttatatgtccctaaaacgcataaaaccaagctgtgctctgaccaccttgggcacatgttgtcaggacctcctgaggctgtgtcactgcgtgcgcatcctcaaccttggcaaaataaactttctaaattaactgatacctgtctcaaatttttggggttcacaaggtttagttataaatgcttcttatggagcatgattttcttacaagcgaggcaggagaatcggatctggaggcagggaacctagggctgtttcacgctgacttcctagaactaaattgaaagtaaaaccctaacttcccacaccaagtaacaaaagaaccagaggcttctccctttccaaacccccaccttttctgtgtggcagatgggaaattgaaagtacctctgattggttgcaaaaagcaaaattacgctaagaagtaagttatcccttaaaaaaaattattctttctgcaaccaatcagatcttcccataggagtgtaactatgtaacttcaccatctgattgcacgccacgtcttcgtttgcatataagggcaactttgtaacttcactttagcctttcattggttgcttttcacagccaattgtgggtcaccacttcatttacatgagatgagtaccaagtggccaataggagacttcaatggggtattagggcccctgagctgctgctccacaccccaaacacaggagtgtcctttcattttcagtaaatccctgcttttggcggggcatggtggctcatgcctgtaatcccagcacttcgggaggccaaggcaggtggatcacctgaggtcagcagtttgagaccagcctgaccaacatgatgaaaccctgtctctaataaaaataaagaattagccaggcttggtggcgcatgcctgtaatcatcccagctacttggaaggctgaggcatgagaatcacttgaacccaggaggcggaggttgcagtgagccgagatcgtgtcactgcactcccgcatgggcaacagagcaagactccatctcaaaacaacaacaacaacaaacaccttcaaggtctggcgtggcggctcacaccagtaatcccagcactttgggaggcggaggcaggcgtttcacctgaggtcgggagttcgagagcagcctgaccaacatggagaaaccctgtctctactaaaagtacaatattagctgggcatggtggcgcatgcctgtaatcccagccactcgggaggctgagtgaggcaggagaattgtttgaaccagggaggtggaggttgcagtgagccgagatcgcgccattgcactccagcctaggcaacaagggcgaaacctcatcctaaaaaaacaaaaacaaacaaacaccttcgggctttgtgagtgctggtctcagaaaagcactcagtcttcctccaagggctaacttacttcttcaggagttgggtgcctttgagaaatttcccaaaccactacagaggaacaacttctcccttcgttcaccactctaccaagcacttggcttttgtaccttattgcaattatttatcttctaatcttctagagcctagagaattagactgtaatgtgccttaaatgcagaggtttctcttactcttctctggagcaatgcagacgtttgttggttgaaggatcaaactccaaagtccctcccagccttggaactgtctccacgagtcataaccatacttatctatgtttagatagagaacttacgcgttcgacccagcatatttaggggctccattaaagtaataatcattattactaaggtgaatttacaggcgtactagaacacaacctaacaagagataattattcaaagctcacaacggcaccaagcacggtgctttcttttccttcattagaagccacggcttctcccctacctttcccatacctttcccaaaactctctcaaaattgcgagccttggtcatggcctttatcacctcccgcagagactgagtcatgctggtcatcgtggacggttttccagcctttgggctttgcgcaagaacgaacttcggaagagctggaaagtccagaagttagtgaaagaaggaggacacaaagggcgaagagcccgcacccttctccgcccctaggagcgcaagaggccgggagtcaggcgagctggcagccccggtggtccgcgatttgctcactgactttcctcgcacccttgtgacgaagcgcgcatgcgcgcttcgcacccaccgccccggcggctcccttgcggcgcagctgcaccagttttccgagagcagcgcatttccccgccgggcggttgatgcgggagcgccatgacacaggcgcctgcgcagagccgcgcgttggcctcctgttccgcttaaaggggcggtgcagaggcggcaggaagatggagttggggagttgcctggagggcgggagggaggcggcggaggaagagggcgagcctgaggtgaaaaagcggcgacttctgtgtgtggagtttgcctcggtcgcaagctgcgatgccgcagtggctcagtgcttcctggccgagaacgactgggagatggaagtacgctttcgctgtcctcgcttccggctccattacctaggtcggtggagcgcacaaacctcatcccttgtgcctttgtttttcagagggctctgaactcctacttcgagcctccggtggaggagagcgccttggaacgccgacctgaaaccatctctgagcccaagacctagtaagtgatgaggggagcgggagccagtccgcacggaggcagtttgataccaggtagccctgcgcgtcctgggacctgccgtggagctgggcggacgatgctgaggcagatctccaagctgcgtagccagaggagcagggcttgcgttgctgctgctgcgcggagttgcgccccagcagcggatctaacactgcaccagactgtcgcttcgaacgtgatttggggtccagggaggaaaagatggaaatgtaatgtttaactcaaatgaaaggaaataagtaagcgagaggtttgaaacaaatgaacgaaggctaaaccttctatcgaaaaatggcaacttggaagtctccttgcttcctgtattgtttatttattctaggccctaggctgaccggccagaataacaggtttgttgttgttgttatttttttttaatgcacacctactcctgttatttcagtgcccctctccagttcctgcacttaaaaagtgtagctgccttacaaggccctctactatttggctccataacttagaacctgcctttccaggttccaggcctatcaaacttttacttttttccaacgggtcattttctcctgtctttgaaacttcgtaaagatctttattacctgtgcctggaatttttttcttttcccttccttgctaatatttgtcttaaagccccaagctgagacatgatttatctctaggaagcttttcctgatgtcctaagtctgggtaagagtccccttttaggtactcttatagcatcctgcatgacccctgt

SEQ ID NO: 11219 - DNA, 6000 bp, Homo sapiens
cagagctttttatttatggaaataaggttttcaagtaatgatgatattgaatcactttacgctcttaatggctttttatataactcctttgatcagatccgatttgcagagggtgactattttcctctgaaattcttttttttttttttttttttgagacgaagtctcactctttcgcccaggccagactgcagtggcactatctcggctcactgcaagctccgcctcccgggttcctgccattctcctgcctcagcctcccgagtagctgggactacaggcgcccgccaccacgcccggctaattttttgtatttttagtagagacggggtttcaccatgttagccaggatggtctcgatctcctgacctcgtgatccgcccgcctcggcctcccaaggtgctgggattacaggcgtgagccaccgcgcccggcctaaaattcttaaacagaatataaaacaatgtaaacaaaaatgttacaaaacagaaataaaaacagcatttgtgttggattaccaagtgttcattttaccaagaggataatccctttacctaattgaaataaggaagaaacaaaggtgggtgtgaaccttttatggagagatcctggaagcatgaccttggccaaaacaactgatggctcagccaatctctggagatgagacctgcagaagtttcattatttgttgctgtcaaggtgaagctcaactccatcctgtggatgaagagtcaaactctgtagagtatttgaagagatttattctgagccaaatatgagtgaccatggcccatgacacagccccaggagatcttgagaacatgtgtccagcgttatcagagtacagcttgtttttatacattttaggttataggtgaattcgaagattttctgattggtagctggttgagtttatctaaagacctgaaatccgtaggaggaaatgtctgggttaagataaggggttgtaaagacaaggttcttattatgcaggtgaagccttcaggtagcaggcttcagagagaatagattataaatgttcgttatccaacttacaaaggtgccagacgaccccgggagcgcagggagcgctcctgcaggagcatttcaaaataggccaaatgaatatattttggggtaaaatacttcgatttctctcagggcctgctgtcatgattcttattgctacaaagagtctgtactgtcagtcttaaggtctctgttttttgggtttttgttttttttttttattgagatggagtctctatcatccaggctggagtgcaatggtgccatctcggctcactgcaacctctgcctcccgggttcaagcaattctaatgcctcagcctgctgagtagctgcgattacagacataagccactacgcccagctaatttttgtagttttagtagagacagggtttcaccatgttggccaggttgtgccttaaggtctctgttttaatattaatgctggtcagctgtgcctgaattccaaagggaggaagttataaggaggcatgtcggctgggcgctttggatcacacctgtaatcccagtgctatgggaggccaaggtgggcagatcagttgatgtcaggagtttgaggccagcctggccagcatggtgaaaccccatctctattaaatatacaaaaaattagccgggcgtggtggctcatgcctgtagtcccagctacttgggaggccgagacatgagaattgcttgaacccaggaggcagaggttgcagtgggttgagattgtgccactgcactccagcctgggtgacagagtgcgacgccctctcaaaaaaaaaaaaaggagccatgtccaaccacccattccatcatggcctgaactagtgttttgtgtttacttgagaatgcccttggtcaagaggaagggtccatttgcttgcttgggaggggcctagaattttattgttggtttacattcctcagagctgattgccttccaaaaggttgcactctgaaattattatcaaccctgatcaataatcataatactaagaactacacgtatgctattggaatggatttatttatcagccctgtaggaaaatatatatctcacatcacctcattcccatttacccacttttcccttttccaatcttaaggctcgtgttgtctaaatattcgatagtttcagcacagtttacattttataaaagcccccactggctgctgtgcagagagcaggtgtgtgcccctgatctacagaaggtcaagttgatccaactatctggctggggcaggggagttggagaggggagtggggagatggggaggggaggggaagttgggggaggggaagcacattcaactgggatggagacaaaggagagaggcaggaggagggagaatgaagagctggggaaggagctttggaaaaatacaggaaagcaaaggatgcggcgacagaaggagaggatgaggagtcagtcagcaccacatggagagcaagaaggaagaaggggacaggaaatgcagaaacagagtggaaggacaaagaaactacaacatacagaggcctcgaataaaaatcaattcatctcaaagtgttcagcattttcatgaggctgtgagaccgaaataggaagaggccctttattttcttaggaagagaacacagaccggaggtgggagaggaatggtagggaattttccaaacaaagagagggcctgtggcctctcaaactgcccccaccccatgctcactgaagcgttcacactgcagccctgaactcttcacaaacagggtgaactccatccagagaggggggatccggaacccatgcttggtttccatcccagctggagggctggagaatgagactgcagagctagggttcaggccacagcctgggggacagggtaggcaggaggtcagcaaggcttagagaagatggatatgttgggttgggtgagaggcctggtgctgggagtgggttgtctacagagaagcacccccagggccttgtccaggatgatccttggccaggggggtcctgaggggactggcactgcacacctcagggatgcagtatcaggaaatctggggctccccagcttcctgctctggtcttcttctctggacacgctcatgttgccataaggagagacagaaacatcagcaaaatcagatcaatgcttccaactgtatccctaacccctccattccagccagatttggagatagtacagatacccccctccccaagtaaagtgtctcttgacaccttggggttcaggccacagcctgggtacagggtgggtaggaggtgagaaatgactccccttcttctcgatggaaagaaaaggccttggccaggggacagtgctcagggactctggccactccagtacctgcccctacagaggccagagaagggcagggccagcccctggtacagagcactgaaaggaggttccccctccaacttctgactggtgctggttgaaagactgaacaaactaacccactgagcttttttcctcactgcaaagtgggtcgaatgacagggcctgcttatgatgcatggaagggattcagtacttcctggggtttacaagagctcagagaatggcagcaaggcgagttagaaacatcctgggcacctgtttttaacaaattcattcactccttcattgcacacatggttattgagtgtctgctatgtatgtaacaagcactgtggatacatcattacacaagacagattctccatctccccagcagacatttccgtgtgtgtgtgtgtgtgtgtgtgtgtgtgtgtgtgtctgtgtgtgtgtggcggggagagggcacaatacagagtaaacaataaataaagttatataatatagcagagggaatttagtactaggaaggacataaagccaacgagggagataaggtggcgggggtggaattttaaatcagctggagcatatgtatgaaagtgggccgggcgcggtggctcacgcctgtaatcccagcactttgggaggctgaggcgggcggatcacctgaggtcaggaattgagaccagcctggccaacacggtgaaaccccgtctctactaaaaatacaaaaattagctgggcgtgatggcgtgcgcctgtagtcccagcttcttgagaggctgaggcagaagaactgcttgaactcgggaggcgggggttgcagtgagccgagatagtgccactgcactccagcctggcgacagagtgagactccgtctgaaagaaaagaggaaaggagaggaaaggagaagagaaaagaaaagagaaaagaaaaaaagaaaagaggccaagtgtttcccgtagagatactgtgtattgggggggcgcacaggggtgccacgaattgagctgcccactccttccagatgcagggttctcacccgggtaggtgagaacggggtgagggggaggaatcacgcgtgggtggctggattagttcctgatgtcctctgattccctacagcttcttcagccccgttctaacccccttcctcaggcttacaagaaagtgtgtggaagagagacacggagagactgagcattagacttttttggaagaaacatcagtaaatgaaaatggaattacaataaaaataacaaaagcaataaactcctgacctcagtcacaatcattttagttaacacgccagtcctaataacaaacacgagtccctgagaccgcaacccctcgggcaccgcagggcgtgcaggtctgggcgggcggcgcagcctcccctggcggctgaccctgggagcgcggggagcgccaagcctcttctagcgctcacctcgcgctcactcctgcgctcgccgggctgcttgtgcggggaaggggcggggcccgcctgggctcctccccggtcggagcccggagcaagggggcagagcgcgccgggcgctggttaaagaggcgtgcggaggcgggcgcggcgcatactgctagtggcgcgcggaggagcgacgcgtggagaagcggcccacgtgtctgcccagagtcaagtcctgtgttcttcccgctccttacgcatccgcggtccagggcgccctttcagccccgctggtgttcgcccaccccgggccgcgtgagtggggccccacgcagctccccgcactccgtgggccaacttggccaagcaactctgtccggggagcggtgcttgcggggggtgagtaccgggcactgcgcatgcggagctccaaattcaaacagctgttttcagaggctggagggcgggcggactggtagcagctggggctaggagaggctttctctaggaggcggccgctcgggagccatggtggaccggggccctctgctcacctcggccatcatcttctacctggccatcggggcggcgatcttcgaagtgctggaggagccacactggaaggaggccaagaaaaactactacacacagaagctgcatctgctcaaggagttcccgtgcctgggtcaggagggcctggacaagatcctagaggtcagtcgccgcctgtacccccatatacatctgaagctggcttgagctttagggggcgctgaaaggaagaccccttcacagctttgggtgaccctcagtccctgtggaaggtccagggggtgatgagagagcgtgtctcatcatgggtcaggcttcgaggatctgtcgctcacccgagggacacaggggtcccccaggcgcggagactctttggaacttagtttggccggagacaaattggagttgattcccgggtgaactaggctccacggtgtttcagtgtgggtgtgacggtacctccctccttgggaagaggctgtgggacggataaaggcgtttatctttccctggagacgctcccggagtctgggagccaagcctggtgccatcccctcgtgtctccacctccccgctccagggccagtgccacgcctgccaggcttttcttaaggaacgtgaacccggcagagtggcgggagggtccc

SEQ ID NO: 11220 - DNA, 6000 bp, Homo sapiens
gtggaacagacagtggaacagacactggagttggagtccagtcaccttgcacaggtcacttagccactctgagtcttcatttcctttttccatgaaatgggaacaatatcatctaagagtatcattagatgagatgacacaaaagcatgctgccaaaagcatggcaacaactggtgcccagtaaccatcagctccttcttcctcccctgccatgccaccccctacaggtcatcatggaagcctgggtgaaaggtgtgaaccccaaaggcaactctaccaaccccagcaactgggactttggcagcagtttcttctttgcaggcacagtcgtcactaccataggtaaagggctggggtagagaagagcttccccaaggcccctgtcttagtttgggctccccaaaagcagatgctgagacaaggatgtggtttgtctaggagattattcaggaagcccagggagggagtgggtaagtgaaacagtagggagaaggtggcaatgaaatttgcattaattagcagattactggcttgggtgactgagctcacttctccttgggaccctctgagaggctagatagagcccttcctcagaacggtccagcgagggacaagaatgaggggccatttagctaccaactcctgccctcaaaggttgagagctggtcccgagtatattagttccccagcattttgaaacttcccatagaccaagcatactcctttggccagaagaatctctcaggtagagagagatgtgcagaaactgggagcgggggttgatttgtatacaggaactgtccaccaaagcttcaggtggtatctcatgtgttctgagggaacagggcactgacagcagctgctacaccccctcggccagaaaactcactccatcccaccccaaggaaaccatcagatccaggtctaccccatccattcagttaagtccaattccacatactttccttgaactcaggtgacattccaggcagagtgatggagttgggggtgagagatacaaacttggatcagacccaggctcagcctgcaaggaacttccagtccaacaaagaggaacatgataaatacacaaaaaaaagtaatagaaaacaaagtcgataattacatagcaatgacataaaacactatggggaaccacacccagaagggagaaggaaatcggcagtcaggagggcttcatggaggcagagtcatttgagatgggccttcaaagatgagcaggagtcctataaataaaaatcattccagcagagttcatgggaacaggggagcttccccttctcacccccagaggtggtgacagacaaacctcagctagagtctggggaagaggagcagagggcgttctagagtctccatatttgcacacgccccccttcccttgcaggatatgggaacctggcacccagcacagaggcaggtcaggtcttctgtgtcttctatgccctgttgggcatcccgcttaacgtgatcttcctcaaccacctgggcacagggctgcgtgcccatctggccgccattgaaagatgggaggaccgtcccaggcgctcccaggtatgccccctaactcccttacaggcctgctgtgacagatctgttgcaagtggagttccccagaagccgatgctgagatggagtttggcatgcatggtgttaggggtagatgcctgtgaaagaggaagggtgaaggcagggttgggcagagtggggagttggatctctatgcatgctctacaaaggcttggccccaaggagctctacagcatgtgagagctgtcagagttgtcccacagtgggcggaaccagccaggttttcatacctgcctcaatcaggcactgggtgtggccttcccaggaagggtatgcccctaggccaggaggttctctgcagctgaacaccctgaaggagctggcagctggcccaccgtcctcctttaagtgagggatctctgtagcacatcttcaaggtcatcacagaactccaacatccttttgtgcagtagcaaacaagctctgcaggctgcccagcatgccctcagtgcccacccttggccagccacttgcaaggccagaaatacgcagacagttcaatgatacttttctgttccagatctgagtccccagggagcctgttcaagtgtgatccccaagtccaaaggggtctccaaatcgcttcttgacccactaacgcaatccctctgccgaaatctttccctgggtgggacaaggtcatgcacacatagatacaacctccacctcgagggtctgcagtgcaggaaagggtcctagctatggcccagtcccattcccatgtttaccccagactccccccaacctcatacaatcctggagactttcaagtggactcagaggccaactccctccctcctaggtactgcaagtcctgggcctggctctgttcctgaccctggggacgctggtcattctcatcttcccacccatggtcttcagccatgtggagggctggagcttcagcgagggcttctactttgctttcatcactctcagcaccattggctttggggactatgttgttggtgagaacaaaacagtcacattatctcagggtgggggtgcccactgggatttgggggatggagagatgtcagctgaggacaactattgaggataagatagcccttggtcattcaagggagccaaaccaatgatttctgggactactgtggattctaagcaacattctcagaagtttctggtctaggacccatcaccaccctgcagagacctacctcaactgctgttccttgttatgaggaagagggagagagcatcctggctggtgagggtccctatggaaactggaggtggctatgccctgagacccctggcattgatgccattcccttccctggcaggcacagaccccagcaagcattatatctcagtgtatcggagcctggcagccatctggatcctcctgggcctggcgtggctggcgctgatcctcccactgggccccctgcttctgcacagatgctgccagctctggctgctcagtaggggcctcggcgtcaaggatggggcagcctctgaccccagtgggctccccaggcctcagaagatccccatctctgcatgaggcccccggggggggcccagaaacccctttcatcctccccagtcccaccctatctgctctctggatttccagccctgctttctcctctcccaaccccctcacttctcagccagggctggtctcaggagctctcccaagagagaaaggagacaggtatatccaagaaagtaacagagaggagacgtgagataggattaaagacatgtgtggatggggaggtgtacccttgtcccagagcccctgccacagccttccacccaaaggtagtggccagatctccactgccctccccatgcccccttccaggagaccttacacaaacaaaggatgactttacttttgcctcatttgatatgtgcacagtgcatttgccaagcccctactatgtgccaggtgctgtgccagggtctgtgccagggtctggggatacagcagtggaagtgcctgcccttgatgtgcctttagttgctaggcaagcaaagaggcagccccaacacagtgcccaaaatgctatgatgggaatagccccagggttgatgagagcccatgggaatggctggcagggagcatcaaagagaggggagacctgggcagagactttggaacaatcttagtgaaaagaggatctctgccctcaggaagctctcagccgaggggcaggcgagctgcctctcaaagctcgccagctccccttgcctagaagtccagggctgtctgtgaacaaagcttaggacctcttgggtgtcctacccactttcctgaacatggcctcccctgaccctcacaggccacccccttaacttcatcactccctctgggctcctgccttctcaagagcctttccaaacaccccatgggaagccagagagccagcagatcccaggatccttccagaaagtgagctccatgaacgtctggcctctctcaggaatgcattctccaggtctggcctttcccctgccagactgcaacatccctgaccaggagagatttagaccactccatcccggggcctggaaattttggcctttgcctctcccatcatccaacagcaagtgggctcctatgtggctgggttcctctgcacaggtctgaggcaaggctgtggagccaaggcggctccaggcaggagacccaggagaggctctacagcagcaagaggagtccaagtcacaccccaggacttccccatatccaagaaaggactgggaagctgaggacccacggactcttcacacagcctagacgcttcctccactccaggtagagggatttcgggggccttctcagaagcaaggagtggacaagcctcttggttaaggctcctcttacctcccaagctcatggacaagtggcaatcagctggggtccctcttttggggtacaaaggaaaggacagaggtgtgggagacccaaggtggtcttgagattgacagacagcaagtccttggagatagcccccgagtccaagaacttaggcaggggccccaagacaataaagttggtctctactatctcctacctctgagtgcggtttccagaagtccctcccattgttcatttcaggaaatgtgagggggctctgggccccttccctcagcgcctgcggtcacccagcagcttcctccttctccctggcctaggcctagcaggtgggcaccccgcacacatttgaggcggggccagatgcccacagttcagagcctctttttgtcccggggattggatcccagggctgggtggggccaggctgtcccattccccaacactcctcctccccggcgaaaccgggcaccagcaggcgtttgcgagaggagatacgagctggacgcctggcccttccctcccaccgggtcctagtccaccgctcccggcgccggctccccgcctctcccgctatgtaccgaccgcgagcccgggcggctcccgagggcagggtccggggctgcgcggtgcccagcaccgtgctcctgctgctcgcctacctggcttacctggcgctgggcaccggcgtgttctggacgctggagggccgcgcggcgcaggactccagccgcagcttccagcgcgacaagtgggagctgttgcagaacttcacgtgtctggaccgcccggcgctggactcgctgatccgggtcaggggcgagcggcgtcggcctgggcgcggcgggatggggtagcgggccgcggggtgtacgggccgagggcgagggggcctattcaggccctggtcaggtgtttcctgttcagggaaacgtcgggaacgcagacgcgggcacaacgggggtgggcgttcctgcgcggggaccagagggttgggggacctcggaggaaaagaccctcgccctagcgagaggactgcgagaagccgggctgagtcctacttgggggcgagagggcatgctggcccggtgaggaggcagatgcctggggacacatccaaatttgggggcgaggacgactacggcagggggcgcgcgcgtaaccggccccgcccggcctgacccgggaaagggcgcgtttgagcctgcttgggggttggtcgcacccgcacccgtggcaaagagctaaacgccacacctggccgcttccagagggggaacccgggcgcacgtttgcgaactgggagctgggacggcaggggcgccgggtctaaggatgcgcaggagcgagggcgcggccgtaggagcctgggggaaggcgcgtttgtcccggagggtgggtggattgggcccgaggcgtgctggtcggggccaccctcaacgcagagagggggctcgacgtgcgcagacccgggttcgagaggagggcggacgcagggccgctctctggctgaacccgctttactccgagtcttc

SEQ ID NO: 11221 - DNA, 6000 bp, Homo sapiens
agtttttctcctaatcttgaccaagcgctgacctcacaagaccacagtggactaggaagagtagctgaatcaggtcccagaacatggagggcgctcagtcagtgtgtgtagaatgagttaaggcaggaagcgagggaggcaggatgggaacatcctctctggtgcagagagcttttatcttctacaagctctctctctctctctctctttctctctctcgctctccctctctctctcgcagtctctcttttgttctctcctccttattacaaaaacaattgttgcttgtcctggacagaaaggccaccgtatctgccacggcgagtgccttccaggtggtacctatatgtgtgatgcccccatcccctgggctggggcaggtcagctgagggggctgtttgatccaaggctgggccatcctcagcccaccagacacctgtagagtagccaccatgaaaaggcactcttgggcacttagtccatccataaaggatttaagccaagagataccaagataaagaagcagagggcaacgggcatggatctgaccagatgccaggaggtcagccaggagtggagccccaaggcagagaaacggcagacgggaagcacctggggcgagtagagagtggtcaggccaggctactggtggaaagctaggaggctccagaaacctggctgctccccagttcctacagcacagtctgtgggcctcttgagctgagatctcccccaaagtccaccattatgttgccctttctgtggcttttgtggccctagggttttcagaagtcccccattaaactgaacatgcttctgagaaagactctatcctaaaccccagccaggtgaagtcttattgggcttgggtggtttgtgaaaaactgatgtaagagggagatgtgagggtgtgaccagaagagagtagagaggcagcagtggagagaaagagccaggaaaggcaggaggaagctgtgctggctgactttcccagaacatggtagagtctcaacagatagccccagcgcacagtaggttcccaacagatcattcataaatgaatggagtgtctgcccacagtgagcctggtacacttcctgcccaggacctgagggagggagggcaccttgatggctgattcatccctccctctaccccagcccatctcagacgtccctgtggcccactacgttcatccccttctcccatgcagatagtccattctcttttccttcgtttccgtcccccttagaacaaccgtcattacctgtggactgtgtccagactgctcaaagatactcagtgctacagagttactcagtcctgcctgaagccctgcagacatccacggatgagctttctaagtgatacacgagagagctctccatgtattgagtttctccagggcaatcgaatagggtttgactctcacgctgcctttcagatttaattctaactcttgcttaagccaggagctggtgcatctgtagcagaaatgagtgccagcactctgttgccccactgattccagatgcttccttctccctccaagacaagcccacatcccaacaaggtgccgtctgggaaagctcccggaccatgtgaagtggggcttgcacagaaccacttcagagatccccagatggcctcagaggattccagaagcagcagaattccagagaaggtgggctccatcacaccacccccagacagggccgtgcctaagccacagggtggacaaaagcctgcaggtttgtcactgcgtcgggacattcttaatgaacagcccacacaatgtgggctccacctccgctcactgtgatttgttgttgtttggtttttagcagaaccctatgttactaccaatctcttgatcacccacatacctgaaaaataatgtctccctcttgcttttatcttctacaaggtctctctctctctctcgctctccctctctctctcgcactctctcttttgttctctcctccttattacaaaaacaattgttgcttgtcctggacagaaaggccaccgtatctgccatgacaagtgccttccaggtggtgcctacatgtgtgatgtccccatcccctgggctggggcaggtcagctgagaaggccgcttcatccaaggctgggccatcctcagcccaccagacacctgtagagtagccaccatgaaaaggcactcttgggcatttagcccatccataaaggatttaagccaagagataccaagataaagcagcagagggcaatgggcatggatctgaccagatgccaggaggtcagccaggagtggagccccaaggcagagaaacggcggatgggaggcacctggggcgagtagagagtggtcaggccacgctgctggtggaaagctaggaggctccagaaccctggctgctccccagttcctacagcacacagtctaattaccagaaatacctggagtgtgttctgatcccttccaactcaaataagccttgaacagttttttaaaaagaactcaggccgggctcagtggcttacccctataatcccagcactttgggaggccgaggcgagtggattgcctgagctcaggagttcaagaccactctgggcaacatggtgaaaccctgtctctactaaaatacaaaaaattagccacgcatggtggtgcgcaactgtagtcccagctactcaggaggctgaggcaggagaattgcttgaacccaggaggtggaggttgcagtgagctgagatcatgccactgcactccagcctgggctacagagtgagactccatctcaaaaaaacaaagaaacaaacaaagaacaacaacaaaaactcataataacaattgggaagtaacataatacctaatggtggctgaaacaaggtttatgttttcaatataaaaagaaatctagagaggagtgtgcaggaattggtccagtgtctttgcagtgcccatgacctttccctcagggacacaagatggctcagcaggtccagacagaaagaggcagaaatgcggggccagctgcagctgaacccttggtcaacagacaacaattttgcccaaacctcctcagccaactctgcccaatcatggctggacctgggcacgtggccagccccagctgcaagggagcttgggaaagtgggtgcaggggacgcttcgaccctggggtctcctccccaggctttaatgtgtttttctcccagtggcctagcctgcacctggagctctccttcaggggtctctccacaagctcctggagccatctttcctgcacgtgcgcaaagccagaaatgcatgagtgacggactaatgtggggatatgaaggcccaggtcccctgctgggactcactggggtgcacttcacctgccagagctcccaggaaccaggctgaggctgggactgtggtgccttgtttggctttctcctcagcctggccctcttgcccactgtcttatgggtcttcagtgacttcactgctctcaggggctgagacagaggggagcaagattagcactatgacttagaccaattatgctcaattacctggggttaacacttacaaagccggggttctgctagctggggaggagggaaaggatactcagcaggcaactcacagtgtctgcagccacagctcattaaaggaaacagcagaaaacacagcagagatattggaatcctcgccctgggctagtgagaatataaaatggttcagccactttggaaaatagcctggcagttcctcaaaaagttcaatacagagtggccagatagtccagaaattctactcctaggtatgtacctgtgagtaatgcaaacacatgtccacaaaaaaaactcatacacagaggttcatagctgctttgttcttaatagaaggaaacagggacaacccaaatgtccatcaactagaaatcaaatggataaacaaatgtgttatagccacacaatgaaatattactcagccagaaagaaggaagaagtactgttacatgttgcaacagggctggatcttgaagaccctgtgaatatactaaaacccactgaattgcacactttaaatgtgtggacgatacagcatgtgaattatatctgtataaagctgttatacatgtacataaacaagcatgtgtacacacacacacacaggcaaagagaaaggaaagcactctcaattccatccactcagagacagcccctcttaccatcccaggatcaggatatacttatagtttctttttaattcacacatatatttcaccgacatatcctctgaaggtaacccactagagggcttcatgcaagacaaattagcaagagttataaaaccaatgaatccaacttatcagcagaatcaaccctgatactcttaccatcaggctgagtgagacaatcacctgtctatttactttgccctgatttgtcacgcagtttactcatcctgaggttcccccaataggcagttcaattatcctgccccattttgtagccaaggcaactgagtagaaggtttattcatacccattctgacctcttcccagctcctaagctggggtcttacagccttcaagggtgaagacgctgggggcggccgagagagcccactggggcctggacagagtgagcacacctatccgatttagcccagaaacatctatccaacttggagacagagagagagacatgaagcactcaggagaacctggtaggtctctttgaagggtccctgacactgacttgctgctgtccatggaaacaaaggccgggtgggggtggccggcctgtttgcactcacagcatagcacttagtgcagccaagctgagccgcactgttcaaacagtctccccagcctccagacacctgtgccgaggaggagggcagggcaggcggcagcctgggcacaggcccctaggtgcttactcctcacctgtttcccacctctcccccatagccagccccacggccctggcagggtcctggccacagcatgcccagtgctgggctctgcagctgctggggtggccgggtgctgcccctgctgctggcctatgtctgctacctgctgctcggtgccactatcttccagctgctagagaggcaggcggaggctcagtccagggaccagtttcagttggagaagctgcgcttcctggagaactacacctgcctggaccagtgggccatggagcagtttgtgcaggtgaaggggagcgatgtgggattgggatggagaggcttgggaaggttggtggaatggggttcctgtggcagatccacagtcctcacccaggagctgatgccccatttggaagaagagtgtggtgggaacagagagcctggtgagatctaatcctggattctggccccaggtctacaactggattgatgtgtgaccttgaacaggtcacttaacctctctggacccaaacagcctcatctataaggcaacaagaataaccatatcggtactgcagacatttgacagcagattaaaagcactctctaagctgtcacttgctggatgaatgggaactatatgtcagcgttatcaacgctatccaaatttcctcctcccacactttcatacttccccttccccaactccagggctgcagctccttctgccctctcccagctcatatccctgggcagacggctgcgggtgggagacacagataaatgccaggagcagccaccaccaagctgtcctttcctggcctgtttgcacctggagttgggtttggtgggcaatggccaaggtgactgagcttgccagcactgcacccaaatggggctctctcttggtaacagagtgggtcaccccctgcctgggtcctttctggtttcctctttcccagaaacaagacaaaaccaggtgttgtggagggaggtgaatgcatctgaaataggcactggagcgagtgacaacatcccctgcaaaggaacagaccaagtgccaaatcaccttgataactggcatttactga

SEQ ID NO: 11222 - DNA, 6000 bp, Homo sapiens
actgctacttgactcttgggatgggaagaaaaattggagagttcagcacattgctgactgttcccccaaatttattttttgttttcatcatgatataattttatccaggtataagatgactcattgagagaccacatttcttggactccttacagttaggagtgactatcaggccaagtttcttgccagtgaaatgtgaattgaagtgatgagtgcagctcctatgtcacttgcctaaacagaaattgcttgcttttcatgtcttctctgcctactggcagcccaactttaaccaggtacacaaagaccataccctgagaaagggcaacaagacgaaaggcacttcgtcctggagcagattcccttcagtctggaccactcacctctaagctgttccatgacaaagaaatgctattctttttattgatctttccatggctcgattacagcagcagcttaaatagtaggcttgacgatacagtgagtaaagaagcagctgcatcaggaactgaaaaatggctcttcgggtcattgtttcatcaaattcctttcctttgcctttttatttgtcccttatcccctacctggaaagggccagtccaatgctgggagattatgtttaggcattgagctcagagccaaattggtgcacgtgtacagtcatccctcggtaccaaggggattggttccaggaccccaaggattccaaaatccatggatgcttaagtcccttcataaaatggggtagtatttgcatataacctacacacattctcctgtatactttaaatcatctcagattacttctaatatctaatacaatgtaaatactagcaagtagttgttatactacattagttttttgaatttgtgttctttgtttttctatccccagatatttttgatctgcacttggttgaatctacagatgtaaaacccacggatgcagagggctgactgtggctagaaaatgtgctgcagggagcacgtggaaacagctgatgagcacctgcagcccctgtttgggagcagctggggtgtgctgcctgccgttcacccatcagtcagtgagtgccttgtgtgtggtgttgggttggctctgagggcttggggcagggagacttttgatggccatgagaagataagctggagttaagcattgcctggtccctcttctgctgaagaaattattgccctggagaccctgcattgctgtagggaaggccatgatggctgaggaataaaaaggagagtgagaagagagagaaggctggcatactcaataaaggaaaagaagagttttgtcaaaaaatagtgtttttggccaggcgcggtggctcatgcctgtaaccccagcactttgggaggctgaggtaggcggatcacctgaaattgggagttggagaccagcttgaccaacatggagaaaccccgtctctactaaaaatacaaaattagctgggtgtagtggcgaatgcgtgtaatcccagctactcgggaggctgaggcaggagaatcacttgaacctgggaggcagaggttgtggtgagctgagatcatgccattgcactccagcctgggcaacaagaacgaaactccgtctcaaaaaaaaaagcatttttaaaacttggtctggaagtgttatagttcagtaagtcagtctggatccttaatatgctctgatgctggccctaactggttctctcaggcctctttacaactcccttctacatccttgtcctataaagagggcacagatactctccgcattagagccacgtggtgttagtgggaaataaagttgattaagaacatttacaagcaacaaagtagtgaaatgccatgactttctaagttctcatgacagcagtaagagggatgcatggttggctcaagcccaaagcagaaagggctctaagacagggcccctcccctcaaggttctgccataggaacttctggatggaggaagtggccttgttgcaaaggctcagcagctggtaccgcctgtcctgccatcaaactaactggggacctgctgaaccagctctccttagctaagagagggtaggaaatgcgtgtttgaggccttccggtttgctctctttggttatgcccaggctcctggcccctggagctagtccaggatcctctaaacaagaaagaaaggtattttccaatctgggcattaggagccatttaatgtcctttctacctccccaatttaatgccttattgtcctgttcattttgatgtactcagctccagaatatctccctttagacaatttggtctttaaatcagcaagtcactacaacttaagtatccaaccatgcttagcttacattgacctcgggagacatcacatattctgcctttatttctatatgttgaatgtttttgacatctattaattgaaagcacgttaaaggatgatttatataagaggatataatcatgactctcacataactataaaatgaacagacattgaagattttatttaactcattatttagttaagggaccagtaagatgttacaactggttcaaataagggcttgatttatagagatttatactctccacagcacaaaaggaataatttgcatagctatggacaggaaagctatgcgttactatcagtttgctacgtgttaacatctactattacagaattgtaaaatagcctaaagacaatcaaagtcatacatccctataggatcagacaatccctggaggacccgctggacaaggcttagaattctattgaaagaacacccagtaatctattttgctcatttcaaagtttgacgatttttcctgaccatcttccttctccttgttattatatataattctaaagattattcttgatcacagaaaaaagctgggctccttaggtttggctggttacttctacagtgcatcatagatgcctcctttgaagtttgcgttgcaaaacctagagccatacggtgttgaatgattccaaattagctcctgcctagaagttatcataaggaatcttagcttggacttctaaaagtgtctgttattttcttttctttttttgggacggagtttcattccttattgcccaggttggagtgcagtggtgcgatctcggctcactacaacttccacctcccaggttcaagcgattctcctgtctcagcctcccaagtagctgagattacaggtgcccgccaccacaccgaggtaatttttgtatttttagtagggacagggtttcaccatgttggccaggctggtctctaactcctgacctcaggtgatcctcccaccttggcctcccaaagtgctgggattacaggcgtgagccaccgtgccccgccatgtctattattttctatcctgctaagattaggagaccaagcccaagaaactccaccaaattttacctgcagtacctatagatttgagtgaattcctttcttctagaggtttcagaaaaatacctccaagtacttgcctagaagtgactttccttactaactgtaagactggacactataaactggacctacgtcaggtttcctgagaggacattataggcattggttccgtaagtacagccaacctttattccttaaaatggcttgtcacacctcgttaaatgaacattattctcaaatagggcattcaaggcaaggctttcattgcataattgatgcttccagttgtattttggcaaaagggaggacagattcttactaaacctatgcaaacaactatattgccaagaaatgtagagagactgggtaagagtttctgaattcaaataagaagaatcgtgttagtgagaatcatatataatttaagaatacttcattctggtttataaaagcagaatttaaaagcttattgtgaattacagatagcacaagaagagaaagaaaaggcttcttacgatctgggaacagaaccttaaaacaactgcatttcaaataacccgaaaaaaatttctctcatcaattttttttcagtcttgtgtaattaattctcattctattggatcttgggttagcagttgtgtgaaaccgcttttcagctatagagttatgggaatcctgactcagtttaccggtacagtctgaaagttaccaaaaccatgtcagctcagctttgaagagtcaatagtttggagtacctaatgcggtctcttccacgaggctctgagactgtcttttgatgaagacacaagatccggcctgtagattatagcagagtcttaaagtaagcatcaaagcaaaagaaaaactgtctacaaataacacagacttgaggctacagttaatttattactggtatttttcaaatgtggacagtgcagcaaggttcatgataagaacaatgcaactgacaaggaaatttacttgtttctgcgccaaacaaagacaaaaaaacctcttccccagttgccctcccaatctcagccatatagacagcccacgcaggtaccgagccctggggtttcagggattcagccacaggaagtgggggcaggaagctgtccaaatccagccctcagctaaagcaaataataatggccgtaagcttaaaatagatccagggaggagctcattaacgtgaacatagaaagcagttccgcacctctggccttactcctcttggaaattgctttggtccatttttacttccttttattcgacgcaccagaaaataagacttttaccaacatttttactgcatttgacgatgaactaatttagaccggctaaaataattgttccactgggacacaggaattcaacctcagttcagaaaatccctgacatctgacgtaggaggatttataggtttagtggaaattgctttctcctgctctccagattgcatcctgtgggttgattttttttttgcatgagtaaacatccttctaataatgaacagaccaataatgtcttaagagagaaaaagaacaatcttttcctttttgctgtttctggagagagctgtttgaatttggaaacccatgttggctgtcccaaatatgagatttggcatctttcttttgtggtggggatgggttttggccactgaaagcagaatgcactggcccggaagagaagtccacgagatgtctaagaaaggcaggtgagtggacatttagggatagaggatttaggaaaagaggatgcacaaagtgagcttacagtgttcttctagaaactgagcatcatttccagcgtatggtgttttgtgtggatgcctttttcttccccttccctttgttctcctgctgctccccttttagaaagttagaattacgttttcttttaaaatgatgctagattagatcattttatcagtgcatttttaaaattccttatgaattgtcctgggtgaaaggtagattctggaaaatagaatatatgcacatttaaaaaaaatatcaagggcaattgtttgctgtctgtgtcctagggttagaacaactctgtgaattctcaaattaccaatgggacctgtatttcatgagaatgattctgctctaattatttctgttagatttgtgaatcattttttaatattttaaaagaaagcagctttctccaagctgtgtgactagaaggatcattattagatggttccctacctataaattgggagggccagggacggagcctcctgcaggcaagtgcttgcctgtggtcaacaccaaaggtgcatggtgccctgtctgccagcacttgcagagggagcttacacaggaaaccaggttccccaccagccccttagcactcggcctcacctgggccattctgacggcagcactggcaatgtctatctgggatgcacacctgcttgcccggcatcagtcaataatacaggagacttggagacaacctaatccagtgctctctgtactgatgaggaaatggagacagtagggcgttgttgattcttggtcctttcttagccttagcttcaaattgaacttcacctttctttt

SEQ ID NO: 11223 - DNA, 6000 bp, Homo sapiens
tacagactaaggatatttaagggtttaggaagaggggagcttattgtaggttcagagtgtttctatgtgaggaaaaggttactgtggggttgaaatgtctctggttagagaggaagctatctccgggttggcatgtttctggttggagcgggtttatcttaggggttggaatgtttctggttattctgacgttagccattaggctgatgttttggggctggatttaggcagttttgttttgttttttaatcaagggaaatttaaaatggtggtgtttgtccaagatggtgaagctcctgctctgttacatatgagtgcagtattttttgatatcttttgggtatatacctagtagtggaactgctgaattgaatagttgttctatttttagttctttgagaactatccattctgttttccatagaggttgtacaaattcacattcccaccaacagtgtataagtattcccttttctctgcattctcgtgaacatcttttgtttttagactttataataatagccattctgactagtgcaaaatggtacctcattgtggttttaatttgcatttctatgatggttagtgatgttgagcattttattttatatgcttgttgctgcttgtgtgtcttcatttgaaaaatgttcttgtcctttgcccactttttaatggagttacttgtttttgttgttgttgttgttgagttctttgtagattctggatattagccctttgatgcatagtttgcaaatattttttcttactctatgggttgtctgtgtactctgttgattgtttcttttgctgtgcaggaagcttttgagtttagttaggccccgtttgtctatttttggttttgttgcactggcttttgaggacttggtcataaattatttgcccaggccgtaggtatgtggctttatttctggattgtatattctgttccattgatctatgtgttgatttttatatcagtattatgctgctttggttactacagccttgtagcataattgaagtcaggtaaaacctctagctttgttctttttgcttaggattggtttggctattcaggctcttttggattctatgtgaattttagaattttttttttctaattctgtgaaaaatgattttgataatttgatagggaatgcattgaatctgtagattgctttgggcagtatggccatttcaatgatattgatcctgccaatccttgagcatgggatgttttttcatttttgtttgtgtcatctaggatttctttcataagtgttttgtagttcttaaagagatctttcacctccttggttaaatatattcctaggtattttattttatttttgtagctattgtaaaagagattgccttcttaatttggtccttggctagatctttactggtgtgtgggaacactactgatttctgtacattaattttgtattgtgaaactttacaaaattcatttatcaaatctaagagggcttttatggagtcttttttaatttttcatcatcctccatggttggattttgtggagtttttagggttttctagaaacaagatcatatcatcagcaaacacggataatttgactttctcttttccaatttagaagttttttatttctttctcttgcctgattggtctggtgaggacttccagtactatattaaataagagtggtgaaagtgggcatccttgtcttcttccacttcttagaatgttttcaactttcccccattaagtatgatgttggctgtgggtttgtcatatatgagctttattatgttgagatatcttccttctatgcctagtttgttgagaatttttatgatgaagggaagctgaattttatcgaacactttctctgcatctattgagatgaccacatagttttccttaattctgtttatgtgatgtatcatgtttattgacttgtgtatgttgaaccatccttgtatccttgggataaatcgtacctcatcatggtgtataaactttttgatgtgctgttgttttcaatttgtggtattttgttgaggattttttgcatctatattcattgggaatattggtctgtagttttttttgttgttgttgtgtccttgtctggttttggtatcagggtgatactggtcccatagaatgagttagggagaattccctcctccttgattttttggaatagtttcaggaggattggttttagttctttgtatgtttggtagaatttgtctgtaaatccatctggtcctggactattttagtttttgggagattttttttattactgattcaatcttgctacttgttattggtctgttcaggaggtctatttcttcctggttcaatctcaggagattatgtgtttccagaaatgtattcatttcctctaggttttctagtttgtgagcataaagctgttcataacagactctgatgatcttttgtatttctgtggtatcatttgtaatgtctcccttttcatttctgattgtgtttatttggagcttctctcttcttttcttggttagtctagctagtggtttgtcaattttctttatcttttcaaaaaaacaacttttttttttattgatcctttgtatcgttttattggtctctatttcatttagttctgctctgatctttgttattccttttattctgctaactcagggtttggtttcttctgcttttctcgttccttgaggtgccataggagtttgttagtttgtgatctttctacttttttgatatgggcattgaatactgtaaatttctctcttagcactgcttttgttatatgccacaggctttggtatgctgtactttttttcatttcaaaaagtttttaaatttctgtctgaatttctttgttaacctactgattggtcaggctctctgctcttcttgcacaaagaactgggagggactctctggaatttccctatctaagaaagtttaaatgcacttaagaccccctacctagggatctcacaaaataaccaggaaaaatcaaccatctgagaagagaagagactgggagttctcactgcacccagatagacttttcatctagtcttctgagggcagctttaagagattacctgttggactttatctgtataagacaactttagttcctgtgtagttccacccctcactttcctcctgggtccattcatcctccctaatgatttactgtccctcaaaagaattgcctacatcccccatctcttccttatgaaaaagggtatataaatgtctgtaccatgctgggtaattgggtaatcatgatgtgattttcctccatgcatgttaataaatctgtatgccttttcccctattaatcttccttttgtcagttgattttttggtgatcctccatggggcaaagggaaaactttcacttggtctctacagctccagatctatttctatagtctagaaatagaactagactttctcctgaactccaggctcatgctctagcttttttttttttttttttttttttggagacggagtcatgctctgtcgcccaggctggagtgcagtggtgtgatcttggctcactgcagcctctgcctcccaggttcaagtgattctcctgcctcagcctcctgaatagctgggattaacaggcacgtaccaccacacctggctaatttttgtatttttagtagaaatggggtttcaccacgttggccaggctggtcttgaacttctgacctcaggtaatccacctgcctctgccaaagtgctgggattacaagtgtgagccaccgtagaattcttgatattattgttgacttttctgtctctcaccttctactctatctgcacaggcaccaaatgtatgctaccgcagaactaacttgagtatctcactcttctgtcttcctttctcttcttccttcttcgcttccctcagagcaggaccttattctcttttgtcatcataagttccctgattcgactgatcccaattaggaattatttcaaaaataaagtagatcatgccatctcactttgcttaagggaatcaaagagcttcttttgattctgtcatttatacatagtaaaatcccaattctgtttcacttacggctatcccacctcctgatctctgtcctcatctccctatgtttctaccatgaaattttccattgccaggacatagcaagcaatgagtagtttttaaacatattctattttgttcagtaggttagacataaccacatgtatctctacaattctaatgtgcttaattccatatcccaggataggaataaagcctaatttatgattgattttatacattttagggttaaaggccaaagttaatttaatgcttatggtaggaagaaaagcttacataatcatgaattctatgattaatgtcatccttgaaactaaaaatgtattttatgctttgatgttttcactggaaaaagttgatctatatttgtgagaaaggaagtatccttgctcataggcaaagcatattctcttagctccataaataaatcaaccctaaggaaacaggtcattcatgtttactcagcatttcctgaacacatttatgtacccatctaaatgtccaccaagtcctctctgcaaatctacttggaatccgagctgaccccctggtggatgggacagactggttttatgcagccagaagatggaccaataatctcagcacaaagctggcatgttcaagagatttaattttttatataacagctttagccaaagctattctaggattcagtggaagcagaatttcatgaggacaaacttctcgactaatggccaatcactaatcagcagggagggcaaagcctggtgtttgtgtcatggcccggagtggagggggtgagtggggcgtcagtatcaaatagtaaatcgggacaactagcctggccagccttgccctcacagcccctcagagcagcccgtcaggaggcagcagatggatcaatggtcaagccaggggggatttgctctgccacaggctactggaaagcagctttttgcctcacagatgtccacaaaatgccttattttacaagactcattttgttcttgttttgcttgatggttctcgtggagagcagaaaacccaagaggaagcgatggacagggcaggtggaaatgcccaagccaaggtaaagtcataggtgggaaaggagggaggttaccctgcatagtagcagcagcagtggcacagtgggatggctccccagggggctaaggtcctattgagatatcgccctatgagaatgagaacccagctacttcactgaacgcagcctctccctgggcacacatactctatgtgtcacaagcattgagagcagaactagactgggatgagccttccttcggatgcctgcgttcagccaaagcattttgatttgaggcagatataaatagttggagacgtagtgggtaaaatcattctctgtacaaatcacattgtgctgctttgtttctcagggttacaaccgatgacctgctaaataattacactcaagtattttggggagaactgtatataggaacctagcctgaactattaagaaaaaaatgcatacgggagttgtcttccttaaattatttgccagagaataactttataatgatattgggtttcattttactgttttgaatcttagaagaggtgttcagaaatttgcttaattatcagaaatatatgtgtgaacaacagtgaatgcaatttcatgatgtaatggagacattcccaagaaataatagcccaggatctgcattcaaaatcattacattacaaatctaagttccttaggaagtttattttgaattgacatacgaagcatcatactccaggcctgaagtagacataaggactgttagacatggagataagaaaagaacaagcagctaagatataaacaccatgtgtggcatgttacacatttattttccattctactaagcatcaga

SEQ ID NO: 11224 - DNA, 6000 bp, Homo sapiens
gagggcgtcccattagggtaaggagtgggcagtgttaccagggtggatcataaacctcaagaacttttaacgaaccacatcctctgatatttttacctttaaggagatagagtttctttaccaaacaacacgaccgagctgaggctccttagagaataatttccaatttaggcaatggggaatattagaaaacttactattagtagccttttggtaatgcacagattatcttctatcgtttattcatctccatactgtaagtattctgtcatcagaaattatcttatggattgatgattattttcatttcacgagagatgattggttcatttgagtcttaattagtcagtttagttactgaaataaatgcaattgtatttcaatcttgatttgtcttagttcattactttctaactttatagagtctattcctgtaaccaccaaggcagcctatcaacttccagtggccttaaaaacttttgagtcaaacaaacaacaaaaaattgaaatgcacaagagcaaggtgatagagaattgagcaatgtttggaagtcttatctgtttgttttctcctatttaaacccattgaaaatcacacaggctgaaatttaaaaaaaaaagttctgggatatgtaaatttattccacttcaatttgttaattaagatacacttattttagtgtctaaaaattaatcaaaactctaaatgtcattaatcatcaatgcagcagaatgttgctggaacagctgataatgtgttcagaatcataagggataccacagcatgcatagttaagaagagtgagttgcaagtatgcaacagtgtgatttcaactgaaacctgactcagtcctgactttattctctgagatctttaatgccatgtataaacaggctgtttgttttagctaaattgctatgcaacaggccacttgcatggaataataggttaggtgttactataagatgaggtttttcaaatgtcacataacagcaggacttccgtgacaagtcaagtggaatccttagtaagaattccatgtgaaaaatttaaatatagctatggcatgtaagaacctttgaaacatctttgaaattcaggttgttctggggtatgtatttgctgtttccagcaaaaggtataggcattgtctttttaaatgttgtgctataaagattattacacattttctcataccccagcaggtggcagctaactagaataagattcattttcactggcagaataggaaactaaaattgtttctcaagtaatagtgcccaagaataagaggtcattagtatctgcaaatataaaaatatagtgaaagatgaagctagtgggtttttttgttattgttggaagaagctttgcattaacatgatatgcattttcttctttgtcaatttatcataggtttgatatttgtgtcagccttctatgatttttttgaggtatacttctaaatacagcttctctctgggtgtgcgtgtatgtgtgtttttgcagtttgttatctctgctttgaccttggaatctacagagctttggctcatagaaataaagagtgccatatggttaaaatgaggaaaaaaatgagaccatagaataaaatatataaatcttactaagtatatataattgcctgatatccaatagcagtagttttctctttcctttaaggaagaagcaaattacagaactgacacaatttttaaaagggttaaatctagtcagtgaaatactgtgtaaggaatttattaatccttcatataacctcagaactatgatgtgtggtatcagtattggggagaaacttgtaataacttcaaaattgccacatgttaaggcatcaactatgccaccaaatcattttattgtagtatagggatgtaaatttagcattccccccccccccaggaagtgagtgagtttaatgtgaaagaacaagaattaatctcattaccctagtaacagatggaaatctggaggtggagaattgaaagtgataactaattgtacatttaaaaaatgtctttagccactgaatattgacagcatgttatttggcattctgaattgtggtctttctagcaatttttttttgtactgacaatcaagtagtttagtgttcatgaggaatctcacaattaatataagtagtttttttaacagtatgccctattacaaaaaaagataactacatcttgggcttatcaagcaattgcactgaaaaatacacacaacacagttgataaaatagtcctcttgataatgtgaacaatgcaataattccaattcctttactctgtgtagtagaaatttacacattgtcactcaaatatcatgttagttatttattgtgctactttcaatgtactactccagaataatgaatgccaggagcgctgtccgtggtcctgaagaaaggtcgtctccagtcttttagaagttcaactggacaggtggaattgctgtctgttgtgctaaagcctttcaactgagttgatggatgtaaatgaatctaatttaccatatgtgcaaaattggttctttggggatcaattaatattaaaaaagtacaatcttttaactgtttaatttattgtgtaataacttcatgaatatagaggcttgatctttcacttttccaactagacatccaaataaccccccaaaataaatagtttagaatactagtttcaagtgcaaaagttgcaaccataatgtaaaatgtcattatattaatggaatacatgaacaaagagatgtggtacattttgttttctcaggttccaataaatgccagctacactgtgaaatttcagtattttgattagtcacaataaaacatgctattttcaggtagtagatatcagttatattggcagataaaaatgtgaaggattatttttttcccctggcagtcattattatctctgctaggatcaaaaagaaaatgaacaaacagaatggaataaatgagacagcaaatagaagacagaacgtgttgggctgtgtatgtgttttataagagatattttaaacatggactgaaggagtcgctagatacccttggttttagcactaggtgttccttttaaggtgctcgaacagtcgaattatttgattgaattgcctgctatactgcagaactagccattcatgatacttatttttgacactgcagttattgcctccatcttaaaaaaaatcaatgccacttaatgcctttgcaaaatgtagatttctctttaaattagcactttataatatcttaagaaaatttaaattaaaaaatcgctgtaaggaaatgaaaacattacagtgttttcttgctgtttggaggaaaaaatagcaagtcgaatattcatatcactcatatcactccttatttaaaaattagccttcagataggatatttttttgtgagatttaacctatgccctgttagttggttatgaaaaatagattaatgataagatataggtccaacagtttgccttttgtgatgtttaatcttttaaaaatgttgacaatatatatttattatacaagttagttttacttagtgtaaaatattaaaattgtatatttttaataaatagacagaatattacttattttaataataaaaatgtatttttatgttgaaagaaattctatttctgtactttatttcttgaataaactcctaacgaaagccaagagagtcactacctagtgactctaaatattcctaccagaaaactagcaaatgataagacagttttagaggaatctgtaacactcaatgtcgctcatgctatgatctcatattctgcctctttaggaaaaagaatgttcaaaaaaccaaaatacgaagaaatttgggcataaattattgaaggctttagagtttgctgcacccattcaaacatcattgtttttatatatgcacaattattttctttgagcttaaaaaatgggtggaaaatttaacttctccattttaatttgagatttctcccataaaagttcactgaagaaatttctcctacttctgggtagcaatcaaggaataccccagtcaagtttttaaagagtgggtttacctctccaattgcattccaatctatattcattcctggtcaaaataaaagtataaataagactctttcaatctaaccacaagttagatttgcagtaaattcctccgtcttagatcactttcttttttacagttcccagacaaactgactttgatttagctagtaatttaatgaaattcatcagttgattgtaagaagtccgcttacatacaccagtcattctctcagcaaatactcatggaaaataaaagcaatgttctccccataaataaatcctacttctttcttgcaactcaaggcgggctgtcagatcggttgcataatagatattggggagctcactggccgggagccttaagaggagagcagctatctcagtctttctcacttaatcttggcttcacgtcagaagctgtgcagcagtgcagtagaatagggcctggcaaaacctttgctagcaaagcgccttttgtgccgggctgtggctcgctatcgacatctcgtccgttaccaaggctgggtttcctactgatttccctcctcctctgctttcacaggctcgcgcggccggacattgtgggtgtgcgtgctggatttctcccggatgctctccgactaacatggatgtcccaccattccttgcagtggaaggttgttccttggcgcagtgagtgaagaacatgcagcgattgctaatgggtttgggaagcggagactccttcctctctctatgaccatgccgtgatcgtgtctgcggtcaccactcgacgcatcctcatttctacccgaacccaggagccgaacgctagatcggggaagtgggtgccgtgcgtgtgggcacagaaacaccatgaagattattttcccgattctaagtaatccagtcttcaggcgcaccgttaaactcctgctctgtttactgtggattggatattctcaaggaaccacacatgtattaagatttggtaagattccccatctctcttggttgcctggtatccgctcccaggcagccggatgtaaacaggcggttcgctctgcctggcggtgggctccgtggattctgatctgctcactgctctgtcgtctcctggggcttttaaagaactccttgtgctttcatttcttctcttctttatttttatttttagccgcgggagggtgaagggagggccaatgtgtggtagtggtctctgcattacctccccacagtagcttgccacggagatgatgatgacgatggaggcacggtcagccgccactcccgcctgtctcccccggcgccctgcgagcttggaggggtgcgcggtccgcgcaaaagtgcgcgccggggctgcacgcctctcagcttgcggggctggtgagttaacacctggtaactctttggcgagttgcgcctgtccgcttccgccagtgaccagggcagttctcacgtgcaaatgaaaggtactaacccttttgatttctttttccagagagccttttcgattgttttcaccgcttttccagtccctggtgcccttactgggatgcagagctttaaaaaatgttctaagattcgaggttctacttaacacagggaggctgctacttagctggaacgaaatagcgtcaaaattagaacggcattttgtttgtttttaacttgctgagtccccctctcacagctttctggacgttatggactaattaatgaaggatagtatctggggcggtggggaagagtagttgtttaaggagggttgactaagtctgcatctttcactttggcaagacgaaagacgttaggtagttacatttttttatggaaatgtattgcttttctaagaatcagggtttctttggagcttgaaggaaaatctaaacgtgggattccagtggaaaccctggtcagagggtcagagtgat

SEQ ID NO: 11225 - DNA, 6000 bp, Homo sapiens
gcacaaaatattttctggtacaacatacctctctaagggatgccacttgtgtatgttctgctgatacattcctgattttctattagtactttctaaagaagtgaaagcaagaatatcataatcttgctaacagaagttaccttgtggttttagaaatgtcatagaaggtgtattgtctcaatttttttttctcattgttgtgtcttcatttccctggaacatagttggtactcaataaatacttgctaaaagaataagttatgaccgggcatggtggctcatgcctgtaatcctagcactttgggaggccgaggtgggtgtattgcctgagctcaggagttcaagaccagcctggggaacagggtgaaaccctgtctctgctaaaaatacaaaaaattagcctggcatggcagtgggtgcctgtaatcccagctatgtgggaggctcaggcaggagaatctcttgaacccaggaggcggtggttgcagtgagcttgagatcgtgccattgcactccagcctgggcaagagaacgagactgtgtctcaaaaaaaaaaaaaaaaaagtaagttattaaaaactggaattacttttacatcgatcttataattagctacttcaattgttttgaagtaggacttggagatttaggaattggtaagggaagaggtaacagtagtggagtagatggggggagataatgccaagtattgtaacctaaagagcctaagatttatactggtagaaaggaagaatgagagttcttgaaatgttcaaagattcctaagtcatcaaggtagaatggccctgactgttggacaagtatccaactacattttattatcctttcacactcctgataaaatgctcctgataaaaatgccacattttctccattctccttaaacatctattactttctccctactcaagactcttagcttgctttttacttttacgtcatgaagaaaacacaaagaacaacaacaggacctcgtatcctctttctgttcctattcttcttctccttcccttcccttactgaaaaattcagtactaaattatttaagtgagaccaagcaaaacagtcatctgcgtgagagttaggatagtggaaggcagagagtggtaaggaaggtatctatggagcaaagtagcccagcatagggctttggagcgcatgtaggaaaaatagaccctcaacaccacacttaaaaactatttgacatctgcattatatactgtgcctcccttcctattactagggtttattggtccttctcctattccaaagtaaacccctcttcttgtactaggtcccatcctttcttgactaatcaaggacatccgttcatttcttcttcagcatgtttatgtccaattatggctaaaatgacctgagggaatgggaataagtgggaagcaagataccgggtctctagtcctagaactatttttaactcactctgtgactctttaagttctcattgtctagattttctcatctctaaaatcacattgttggaatagattggtggttctcagcttagggtgaagaagctcctcaccagcccatgatggccttcaaggcatctgtgcatctcctattattgcatgtaaaattttgaagtcattgcacatgtgttcattttgttttcagatgagagaaaggtctgtgaaaactgaactagagtagatttccttgaaatgtctttaagtcttgacttcatataagtctaagttttgaaagagactacaagagacggcctgatgctgttctgcacagttagaaggcagtctcagttctgccacatcctgagtatgtcactccttttctctcactttggtttttaccatctataaaatgaaggtgtttaatgagatgatccaaaataatacttttcaattttacattcagttcaacaaaatcaagccaaaacaaacaaacatcctggtagttagcttgaattcagactggtctttgctgtgtcttcagaaattgaaatattgagctgctaatgttctaagagcactttgagagggaagaaagagagggcgggagccgggcaagagagagtaagtagggatgttgttcctgcataagactgtagctgaaggacttagcaaccttctaaattttagaagattaaaccttaagagtgattggaaataaaagaaaaaaaagcttcatggttgcccgagaagatacttgagatctcattccttaaatgtttaacttcctaaatcctaaaataaatcatgaaaaatatttctttatagcattgaattatttttgaagggttaaatagattgtgtggtgtctaatgctcccttgttagtctgtttttctcattggaatctagataatattttgctattgagaaaattaatttgtcacagcatgcataattttgatttgttctacactccagctctctcctattttctcctatgctgttgttgggacttgttatttctgtctttacaagtgtgtcctgtttgcttcaaaaaaatagattcgtgacaaggctctcaaatcatacacagcactaacaggaagttgttagtaagcctctcctttcccaagtacaatgtgggtctgggggcaacagtgtggaaagcggaaggtctatcccagtaccattctttatccagcacctactgcatgccagactctatgctaaacacttaatgtcaaattagacacactctgttctacactctcagagttgtcacaagagctgggtgccttcactcagggatttccactggaatctgctcgtgctggtgttttgctcctttctgcctggaagtgggtggatgtaatcatgacaaggagagagtctttagccagtagacaagttatcttccttactcccatggaggaatgggacagaatggggcattttttcggagcctggcccaaactcggctgtgcctcgagggcccattaggctgcaggtcacagcagctggagcccaggcgcccagaaccggtcacgcgtctgtgctgcccgctccaggatgcacaatagagtcattgactatttatttactgggtagaacaaggctgctgttgacttaattaagggagccgcccagccacccctgggatcttcaaatgactaatggactctccattgccactaactcatctctccttaacataagtccccagtccccctccccccaaccctgccccacccaggaatgctcagtaagcatgttgtggggaacggggcgcagagagtcctggatggtgaccaagagggaaagactggcggttttggcaggactgaatttctgtgtttcagagctattctgagccaggcgctagcctcagggtgtggaacatggccctgctgcgccagggtccggcgagggcttaactttactagggctgcagtgaaggaggaagcaaaagggcaagttctggtctccagctcagacaacgggtccctggggactcagagcctctctaattcccggacctcggaattagatagatagtggagaaccaccagggactggaactgctaggggactgcagagccgtggaatcccccctggccccttctttatgcagcccgtttgaaatggtctcttgagcccagtgcgcctggcctgttcccgcttagcctcacttaaatctcctcgcgaatctgagctggccaacttcctctgggggaaactgctaaactcagctccagttaatattgtagggctgaggataaaatagcaacggttttgaatagatgttgacttttccgacccagaggagcggaactcagggattgtttgcaaaagctaatcgtttccacagtgaagcagggagagcctggtgcgctcaccgccgccagcccctccctggaagccaagctgcgggaagactctgggactcagttgcccctccccatctctggcctttaaaagagtcctcccgagaacttggaccagtggccgccaaaccagggctgcttcccagactcctgtctccaatcttggagtctgcgacctcaggttcggcgcccactagatctcgaatccaacttctttctgaaatgtgtttaggttgagagttccggggcctgggcgggagtttggtggggagaggggagtctgctatttaaggcgccatacatacacagagacagcccgcccgacctcctaacactcaggaaaagtcaatttccaagcatctgttctcaataatggtggcagggagcagggcactgtgactcccagcatctgagggaatacccgcagcagcgctaccagagcgcatttgctctatgcgctggaggtcggggtgggagggtgcgcagatcaagatctttttttgcgaacctcagggaaatgaccgtagttggactaagaggtccactttggagactaccagcagccctccaagccctggcagtggagaagtttcgttgctatggtttcggagaggcataaaagccatcacccagaagcaaatgtgtttgggctccttatatgtgttgtcaccacccaaggctaggcaaattcctcggcgctttgcatgcatcactcactccctgacagagcatcttggccttagtctccccatcccaggaggcgggtgtgcgctaagggagcgaagtccagccggaggcttcgtaacatccaagtctagggacaccaggaattctctcgctctagctcctgtggtccaggggtgggagatgcccccgagtggccgcggcggccaggagcgtgcaggggccacggggaaaggagcgcggcgcctttaaagcaagaggcgaggaacccccgccaggaggcgtgtctgtctctgccgccgccgccgccgctgctgctcctcggtcaccgtcttcgccgctgccgtcactcgcgctcggcgccggcggctgcgctggtcggtctggtagctggggacttttccgcccgacctcctccggctgctcctccccgaggaccaccccaccccctccccgcccacctcacccctagctccaggtaaggactccccggctgtgggctgcactccgggctccttcacgaggtgtttgttttcaagaggacgggagggactgcgggtgggcgaggggcattttccacctggagagaaggaagaaggcgaacagtagcgctgcggacgtccgtgcgctcggggcgcccgctggacggattcactgcgagtctttgtcgggcttatctcagccaattcccgtcaagcatgcaagtggctctgttggctgcagtcgcctatgttctccacataaaatgatttaagaagtggacgtgtcaggaagtggcctcagctacggggactcacgcgaggcgaagagaatgagacagatggcaagaagctgtgtggctgccggcgggtctgacgaactccccatccctccttctgcccacccatccttccattaaccctactccttagttctgcgctgaggaagtatatttattttaaccggcacccgtattaagagcttctgaaaaaacttggagggcgtcccattagggtaaggagtgggcagtgttaccagggtggatcataaacctcaagaacttttaacgaaccacatcctctgatatttttacctttaaggagatagagtttctttaccaaacaacacgaccgagctgaggctccttagagaataatttccaatttaggcaatggggaatattagaaaacttactattagtagccttttggtaatgcacagattatcttctatcgtttattcatctccatactgtaagtattctgtcatcagaaattatcttatggattgatgattattttcatttcacgagagatgattggttcatttgagtcttaattagtcagtttagttactgaaataaatgcaattgtatttcaatcttgatttgtcttagttcattactttctaactttatagagtctattcctgtaaccaccaaggcagcctatcaacttccagtggccttaaaaacttttgagtcaaacaaacaacaaaaaa

SEQ ID NO: 11226 - DNA, 6000 bp, Homo sapiens
acagtctatcaaggacctatctccattatgggttctgatttctaccctttaagaacacagcatagacctgaccaatgtctatcagtaagacacacttgcttagggttcctgtgctgtttcccttcccaaaggccagagccatgcctgtccctttgggttggggtccacccatgatgatgacacacagattcttccttcctctgtatttccctctgcattaagttctatccatgtggaggacagaacaaaatcagcctcactcacaaaacatcagaaaacgttctactggaatacgaacaaagggatcaataaaaataaaatctgaggccaggtgcggtggctcatgcctgtaataccagcactttgggaggccgaggagggcacatcacctgaggtaaggagttcgagaccagcctgaccaacatggtgaaaccccgtctctactaaaaatacaaaaatcagctgggtatagtggcacacgcctataatcccagctactcaggaggctgagataggaaaatcgcttgaacccaagaggtggaagtttcagtgagtcgagatcgcgccactgcactccagcctggaagacagggcgtgactccatctcaaaaaaaagaaaaaaaaagaaaatctggtgaccagaaaatcaagctcatctctcaggctaaggggcctaaacgaggaaaagctaaaggtgtcttccagaactagtgaggtgtctcacctgggcccccacaataaaggtacgagtttgagagtccaaggtcttcaccaacacctccaagctgtcaggctcctccacagcggtactggtactatcattaggctccatggccgacaggtctctaaagaagaacgaaggaaggaaggcccgctgttgcccagaccagagtgtacccgaaagactccctagcattaatccctgccccaatacctaaaaagtttctcctgcacacacacacattcacacctgtccccatcccccttctgattccggggcacagggagagaaacacaaagggcaggagatcgacggcttagggagctggaggacgagaggtgggaggggctccacgacgccaatcacaataagcagggagccagtcagattaggaaggaagcacgagaccagagactagtgtcatcaccggtcacggcaggacaagcgccccagaggtcggaaaatcctgggacaacgcgaaagcggtggtcgccccacactctgcggagaaagtggtttcgcgcacgcgcgccacgcccatcgaaccctcctaactcactatagacccgaaacggcactcacggggcgacagacctgctagctgactgcccgcgtctactgccttcccacggtgttccagcagaacggcacaactaacccacagccaaacacacacacacacacacacacacacacacacacacacacccaccaccccgcggctccgcccccgacttccccacggaccgtcacttccggtctcccccaaacctgccaccgacggccacttccgtttccccgatagtatttggggatctcgaagcgatacttccggctccccccaggtccccaagctttacttttgtggggcacgacgagaaagtccgcagccccaaacagtgagtttctgagggcgagtcgggccggggccggcctaggtgggagggagccgagcaccccgaggagccgccaccgctgtcgcccgggggaccgtactacgcctgcgtgcgtcgcactacggatgcgtggacacttaagcatcgccccaccccctcccccctctggcggcgttcacgtctgtgcgcgcgcttgagcgctagaagattgaggtggctaccgtaaatgcctgaaaaacagtcaccagctgggactctaccactgcctcgagaggggctatggacggtcgtatggaccttggactttggagatgggggattatgccacattcatctatgtttaaatcttggcaggctgataatttcaggcggcactgtcctagccagctaaaactcttctccaccctattgccctcgctgcgccctttcttctgtgcctccggaagttactctttcagtaggcgtttgggggcggcactggtcaattttgttctcggttgcttggttgggctagatttcggttctgccgggtgggcgttttaagggctgtgggcgtcacattcgtcggtgtgtggccaaggggacatgacacgttttaggaaaagtaaacgtgctactaagttgcacgacttgtcaagaaaagaggcgcttccgagtttgagaattgggagcaaatggagtccgagtggacagaaagacaagaccctgaccgtggggaatttaaaggccggccagcgtgcttccgaaggccgggggtggaggcattaccgcctctccgtgccctcttctcttaacctgccctgggccaagggcctcggccccgcgaaactgcgagtcctccagaaagacacatcgctgttggggtgtccaacctttctgggattcgtagtttatacccaggtcctggttatattttagttaagagttctaataagcagctgtttaatgagcacttgtgccagcccatatactacgggttttgtgtattattttaaaaagccttttaacgagcttttaacattttttaagtgagtacacttagacgaacataagtgtcagaattgacaaatccaggcctacaggactccagatcgagcacttgtactttactgccccaataaaaagctgttaacattttagcttatttttttgagagagggtctcgctttgtcgcccaggctggagtgcagtggcgcaatcacaactcactgtagcctctgcctcccgagcccaaccgatcttcccacctcagcctccctagtagggaccacagatgcacaccaccacacctggctaattttatttttatagagatggggtcttgctatgttgcccagcctggtcttgcagacttggcctcccaaagtgctgggattataggtgtgagctactgtgcctaaccacattttagctttttattacaaaaattttcggccgggcgcagtgactcacacttgggaggatgaggcgggtggatcacgaggtcaggagttcaagaccagcctggccaaaatggtgaaaccccatctctactaaaaatacaaaaattagcctggcgtggtggcgggcgcctgtaatcccagctacttgggaggctgaggcagagaattgctttgaacccgggaggtggagattgcagtgagccaagatcgcgccactgcactccagcttgggcaacagaacgagactcccatctcaaaaaaaaaaaaaaaaaaattcaaacattacaccaaaatagaacagtattaataaactctaatatactggtcacccaaattttgtttgttttttaactaaatcgcaagcctcagccctcggcaaattttttgtggcagtccatgggatataaatttatcaagctaggtgtggtggctcatgcctgtaatcccaacactttaggaggctaaggtgggccgactgcttgagctcaggagtttaataccagcctggggcaacatggtgaaactccgtgtctacaaaaaattagctaggcgtgatggcgtgcacctatacctcctactcgggaatcatctgagccggggaagtcaaagtcatgcctgggcgacagagtgagaccctgtcttaaaaataaataagtaaataaataatctatcgaggaagatccatctctcacagcattaactgctccagtcacttggtgctatccaaggacaacctatttggcaattcttactgcctattatttgagaacttattacccaccagaaactaagtgctttgcaaacattactattaattatagcaaatatatactttggacttaccatgtgcaagtctttgctaagggctttatgtgcattatttcatttaatcctataagattgatgatttgccaattttacagatgaaaaaacagacatagcagttaggggttggtggtgttttgtttgtttggagacagagtctctgtcgcccaagctggagtgcagtggcacaatcagggctcattgcagcctcgacatcccaggctcaagcaatcctccctcctcagcctccctagtagctgggactacaggcgtgtgccaccacatcggctaatttttgtattttttgtagagacagagttttgccatgtagcccaggctggttttgaactcctgggctcaagccatccgcccaccttggcctctcaaagtgctgagattacaggcatgagctacctgccctgcctgtagttagggtttggacacattctgcctgacaccaacatctatcctctctaacagccagattacatagcctctttgtagtaataaatgttgagtgaatgtgtcagtgaacactgccagggtatacatatttttctaattgtaaactaaagagagcaatccaccgtgccccagcacctgcatcatacctgttctaaagcatttaccaagttgtattgcaatggtttgtctacacagctagttttccctctaacgacttcttcaagatcaggggctatgtcttattcgtttttttatgtccccggggattagctagttcttgggaaacaactgggacttgggattcaaaacagtttgctaagtgaatgaatgagaggcccagtcaagctacttcccttcagtgctgcacagtgcaacaaataaccagctcagatacaggttcaaagaccacaggcttctccctggacagctcagctctcctcataactcctgagaaaccctggacatgccagggtgtactatggagtggttgcatccggaagagggggaggaagtcccaaacactaagtaatccaggtttgggttggaaaacaaggttgaagttactcattagcaggtgaaagggtcaagggtcgaacgcaagggagctgaaagcagagtggactgagcagccagtaggggagagagcagttaaggcacacagagcaccagctccctcctgcctgaagatgttccaccaaatttgggcagctctgctctacttctatggtattatccttaactccatctaccagtgccctgagcacagtcaactgacaactctgggcgtggatgggaaggaggtatggactgagattgggggaagcctatggtggaggctctgagggacttgggtggatggcctaggatgactggagaccatcttgggaaaggaagagaggaagggggtgtgagtgttgtgataatgaaagcaagaagaaaaatatcagtactgtggccatcaatgcagaggcatggcagaattggggggtggggtggttacccaggttgactggggaggggcaaagaggaaaagtcatttaatgactctttgtcatggatccaatccccagttggaaagaggaaggcagccaacacctctacccctaaatcttgctgttttgactgatgaagaggttgaacccatcctgtgctggaacccaccctcttttgctcccttcattgtctctccagttcccagaggtccacttgggccagtggtactttatcgcaggggcagctcccaccaaggaggagttggcaacttttgaccctgtggacaacattgtcttcaatatggctgctggctctgccccgatgcagctccaccttcgtgctaccatccgcatgtgagtggtaaggaggcagaagcatcactgggttcagtctctgcccaaagtgtgagaatccacccaccaagagctggcctcttagctggtatatctactatgcttggcccacggaattcagtggctgtattaattgccctctggagaaagatgtgcctaaccaatgcttggtagcttgaaacccaaggagagctgggcttcaataacaaatacaatggagtaaatagaagccgggacaggccagacgtggtggctcacgcctgtaatcccagcactttgggaggctgaggcggacagatcacgag

SEQ ID NO: 11227 - DNA, 6000 bp, Homo sapiens
cctcctcgcccctcaatgctaacccttcaactaagacctccaagtaatcctttccctcccttgccatggttcatttccttctccccatacttcacttaggattccccacccactaaagattccctccatctctcacttgggtgcatttgtttccggggcaggtgttgggcccgctggggctgggccaggagtgagctccgggttctgggctggggcacgctcctccacttcttctgcctccatgggctcccggggaggtgcttcactttcaactggttctgatgtttgagagctcaaggctactggctccggggtcacagccggtggctgcgggggcggctgactgtgctgcggttggggccctcctcgacactgaaggtaggggagagtcaggataccaaaggcagggtaagactgctgcagaggattactctacaggagactgaacagagaaagtatcctaactagactccctgaaggcatggctctgcaattttatctccgactcgctagcaactagcataagactgacacaaattagatgcataataagcatctgtaatttttttttttttttttgagacagagtctcgctctgttgcccaggctggagtgcagtggcatgatctcagctcactgtaacctccgcctcccaggttcaagaaattctcttgcctcagccttctaagtagccaggcctacaggcgcgtgccaccacacccaactaatttttgtacttgtagtagagacagggtttcaccatgttggccaggctggattggaactcctgaccacacgttatccccctgccatggcgacccaaagtgctgggattacaggcaggagccaccacacccggccacagcatctgtaatatttgtaaataaatttctaacaaagagtagagattgtggtttcctttcctccacaagttggtttcccagcctccacaagttaagagagtagaatcctttaattgaaaagagatgccatgagactaagtctgaaacaaactccccagataccaggcaccaagaggattggcagaaatgagagagcctcacaaagatactttttctgcccaaaagaatgaatactgcagagaagactagattatgaaggccaaaccctgtggatgtggccagtgaagccctaactcccaggctgagagaaaagggagagggagggtggagagagaccctagccagccttgcccacttacctccatccgggatagtaaggtctgtatatccctgatcatgtgctgagccatcaccagccgtacccggggctcactctacaatgagagaaggtttatcagggtaggttacagatgaagccatgagttctaccacctactaaatcaggtcccagccatctctcagccaggtccaccccacctcccagcctccttctcccagatccccttccctgaccctcggaggcccctcaatacctgaatcggggcctgttccatgttgatgtgaacatccacagcagagccgtcactctggggaaagggtaagggaagttgttctgggagaagccaacactaaggcctccacacctccaattcattccctggagccctacctccttttctccttaaagactgagaccaatagcacaccacagggccccctgaacccaatctaaagatggaagcatctatcttattaattccctggtgctaccacaaccaaagctacccacaaaagccctcccctgtggaacataagcttacaggaagattgaaggttccaaccatgacatagctgttggcattccggtcatgaacagaggccccaggcccccgagtaccagggggggatcccccaccatgagtggctgaggcagaccccgtcccagaagatgccccagaagggaggtgagtctgaggaggagcccgttccaccaggtggataacctttcccccaacatctgcagaaaaatagacacacaccaaaacatagtatgaacaggtaaacccatggcctcagttcatccctccagacagtagccccaacctctgaactgcctccccagcccccttactgtattcctgaagcttcttatcatcttgcagaactcgtccctggtaaatgagccgttgtttttcagatgggatgctgacagaggcagcaatgtgctccttaaactcttttacattcatctgaaaagaagaggcatgcacaggaatggaaagaatggaggaaagaggaagaacaaagacagacaaccgagttgtggaggtgaggggtaaaaaccaccacagaatcactacccgtttgtcttgaccgtgagatcattactgtgcaaacccttaaactaaagtaacagctgtcaaaatacagacaataaatttggcttggcgcggtggctcacacctgtaatcccagcactttgggaggccaaggcaggcagatcacattaggtcaggagttcgagaccagcctggccaacatggtaaaaccccttttttaccaaaaatacaaaaaaataagccaggcatggtggtcgcctgtaatcccagctactagggaggctgaagcaagagaatcacttgaattcgggaggcggaggttgcagtgagccgagatcgcatcactacactctagcctgggtgacagagagggactccatctcaaaaaattaaataaataaacttaatgaagctcaggttatagatccaggaaaaataacacggatgaaaaacaaaaaaaaaacacatggacattatattatctgtctggcatccaagggagtatgtgtctagagacatcagtgacccctttccaaacacaagatgataccagtttatttaccagactctcctgtgatttccaagattaaaaaatggcaaagaagatggggtctggtatcaggttaatgaagaaagactaagaagataagaaagcaaaaaaggtcccagcacagtggctcacacctgtaatcccagcactttgggaggccgaggcaggtggatcacctgaggtcaggagttcaagaccagcctggccaacacggtaaaaccctgtctctactaaaaatacaaaaattagccgggcgtggtagtaggcgtcgtctgtaatcccagatactcaggaggctgaggcaggaaaattgcttgaacccaggaggcagaggttgcagtgagctgagattgcgccccagccctccatcctgggcaacaagagcaaaactccatctcaaaaaaaaaaaaaaaagcaaaaagagaaatatttttcctaactacaaactgactcttgggaagtaccagagtatttatatacatctaatcacaagtctatatatggctttcttatatccaggtaatatcacattttagaaaaccatggaccaccccacatgcaatttgtctccaagtattacaggagtaaagacacagatagctatgtccaaggctttaagctcaagagactcaagctatgccataaaaattagtaatttcactcaacagtctatcaaggacctatctccattatgggttctgatttctaccctttaagaacacagcatagacctgaccaatgtctatcagtaagacacacttgcttagggttcctgtgctgtttcccttcccaaaggccagagccatgcctgtccctttgggttggggtccacccatgatgatgacacacagattcttccttcctctgtatttccctctgcattaagttctatccatgtggaggacagaacaaaatcagcctcactcacaaaacatcagaaaacgttctactggaatacgaacaaagggatcaataaaaataaaatctgaggccaggtgcggtggctcatgcctgtaataccagcactttgggaggccgaggagggcacatcacctgaggtaaggagttcgagaccagcctgaccaacatggtgaaaccccgtctctactaaaaatacaaaaatcagctgggtatagtggcacacgcctataatcccagctactcaggaggctgagataggaaaatcgcttgaacccaagaggtggaagtttcagtgagtcgagatcgcgccactgcactccagcctggaagacagggcgtgactccatctcaaaaaaaagaaaaaaaaagaaaatctggtgaccagaaaatcaagctcatctctcaggctaaggggcctaaacgaggaaaagctaaaggtgtcttccagaactagtgaggtgtctcacctgggcccccacaataaaggtacgagtttgagagtccaaggtcttcaccaacacctccaagctgtcaggctcctccacagcggtactggtactatcattaggctccatggccgacaggtctctaaagaagaacgaaggaaggaaggcccgctgttgcccagaccagagtgtacccgaaagactccctagcattaatccctgccccaatacctaaaaagtttctcctgcacacacacacattcacacctgtccccatcccccttctgattccggggcacagggagagaaacacaaagggcaggagatcgacggcttagggagctggaggacgagaggtgggaggggctccacgacgccaatcacaataagcagggagccagtcagattaggaaggaagcacgagaccagagactagtgtcatcaccggtcacggcaggacaagcgccccagaggtcggaaaatcctgggacaacgcgaaagcggtggtcgccccacactctgcggagaaagtggtttcgcgcacgcgcgccacgcccatcgaaccctcctaactcactatagacccgaaacggcactcacggggcgacagacctgctagctgactgcccgcgtctactgccttcccacggtgttccagcagaacggcacaactaacccacagccaaacacacacacacacacacacacacacacacacacacacacccaccaccccgcggctccgcccccgacttccccacggaccgtcacttccggtctcccccaaacctgccaccgacggccacttccgtttccccgatagtatttggggatctcgaagcgatacttccggctccccccaggtccccaagctttacttttgtggggcacgacgagaaagtccgcagccccaaacagtgagtttctgagggcgagtcgggccggggccggcctaggtgggagggagccgagcaccccgaggagccgccaccgctgtcgcccgggggaccgtactacgcctgcgtgcgtcgcactacggatgcgtggacacttaagcatcgccccaccccctcccccctctggcggcgttcacgtctgtgcgcgcgcttgagcgctagaagattgaggtggctaccgtaaatgcctgaaaaacagtcaccagctgggactctaccactgcctcgagaggggctatggacggtcgtatggaccttggactttggagatgggggattatgccacattcatctatgtttaaatcttggcaggctgataatttcaggcggcactgtcctagccagctaaaactcttctccaccctattgccctcgctgcgccctttcttctgtgcctccggaagttactctttcagtaggcgtttgggggcggcactggtcaattttgttctcggttgcttggttgggctagatttcggttctgccgggtgggcgttttaagggctgtgggcgtcacattcgtcggtgtgtggccaaggggacatgacacgttttaggaaaagtaaacgtgctactaagttgcacgacttgtcaagaaaagaggcgcttccgagtttgagaattgggagcaaatggagtccgagtggacagaaagacaagaccctgaccgtggggaatttaaaggccggccagcgtgcttccgaaggccgggggtggaggcattaccgcctctccgtgccctcttctcttaacctgccctgggccaagggcctcggccccgcgaaactgcgagtcctccagaaagacacatcgctgttggggtgtccaacctttctgggattcgtagtttatacccaggtcctg

SEQ ID NO: 11228 - DNA, 6000 bp, Homo sapiens
cgcctgtagtcccagctactcgtgaggctgaggcagaagaatcacttgaaccagagagtcagagtttgcagtgagccaagatcatgccactgcactcgagcctggctatagagggagactctgtctcaaaaaataataataataataataaaaaaattagctgggcatggtggcatgtggctgtaatcccagctactggggaggctgaggctgcagaatcacgtgaacccgggaagcagaggttgcagtgagctgagatcatgccactgcactccagcctgggtgacagagaaagactctctctcaaaaaaaaaaaaaaaatttagccaggtgtggtggcacatgcctgtaatcccagctacttggaatgctgaggtgggaggaggtcaaggctgcaatgagccatgattgtgcaactacattccagcctgggtaacagagcacgactctgtctccaaaaaaaaaaaaaaaaaaggaaaagaaaacagttattcaaacaaattcttgtacgtgagtgttcatatcagcactttttacaatagccaaaaaggtggaaacaacacaaatattcatcagcaaatgagtggataaacaattgtgatatatccatataatcaaatattattcaaccatagaaaaggatgaaatactgatatatgctacaatattttgaggatgaatatcaaaatattttgctaagtgaaggaaagccagaaacagaacacatattatgtgattacacatgtaaggaatatccagaataggtaaacccatagagaacaagagcagatttgtggttgccagtggctgtggggtgggggagatgagaaaatggggagtaacttcatgggtatggagttttatttgggggtgatgaaaatgttttgaaggcccagcgtggtggctcatgcctgtaatcccagcactttgggaggctggggcaggtggatcacttgaggtcaggagttcgagactagctggaccaacatggtgaaaccctgtcactactaaaaatacaaaattagccaggcgtggtggcacatgcctgtaatcccagctacttgggaggctgagcaggagaattgcttgaacctgggtggcagaggttgcagtgagcggagatcagccattgcactccagcatgggcaataagagcaaagctccatctcaaaaaaaaaatgttttgaaattagatagaggtggtggttgtacctattactaatatactaatgtactaaataccattatattattctctttaaagtggttaggctaggccgggtgtggtggctcacgcctgtaatcccagcactgtgggaggccaaggtgggtggatcacctgaggtcaggagtttgattgagactagcctggccaacatggtgaaaccctatctctattaaaaatacaaaaattggccagatgtggtggtgggcgcctgtaatcccagctacttgggaggctgaggcaggagaatcacatgaacccaagaggcggaggttgcagtgagccaagatcgcgccattgcactccagcctgggcaataagagcgaaactctgtctcaaaaataaataaataaataaatacaataaagtggttaggcaaggcatggtggcaccctgggaggctaaggcagcaggatcacttgagccaaggagtttgagaccaacctgggtatcatagtgagaccccatcactacaaaaaataaaaagttagctgaatgtggtggcgcatgcctgtagtcccaactactcaggaggctgaggcaagaggaccatttgcccagaagttcgaggttgcagtgagctgtgatcataccactgcactccagcctggaccgcaactcaaaaaaaaaaaaaggttaattttatgttgcatgaatttcaatttttaaaaaatagttgattacttatgtacacttttctgcatgtaagtaatacttaagtttggaaaactttggtgtagtagaaatagcatgagatttgccaagcattttgctggctattaaacatatctaatctcataatatacattaagcacagccattgtgggggtggcagacagtatgacccagataaatattagtccccttgcacaactcaaagctttcatactctaaaattgtccatgtcccggaggccctgatttctttctttccatttttttttttttttttttgagacagagtttcactcttgttgcccaggctgggttcaatggcgtgatctcggctcactgcagcctccgcctctcgggttcaagtgattctcctgcctcagctttctgagtagctgggattacaggcatgcaccaccacgcccagctaattttgtatttttggtagagacagggtttctccatgttggtcaggctggtctcgaactcccgacctcaggtgatccacccaccttggcctcgcaaagtgctgggattacaggcgtgagccactgcacccggctccttttttttttgttgttgttgttgagatggagtcttgttctgttgcccaggctggagtgcagtggcgcgatctcggcttactgcaacctccgcctcccaggttcaagcaattctcctgcctcagcctcccaagtagttgggactacaggtgtgtgccaccacacccggctaatttttgtatttttagtagagacggggtttcgccatgttggtcaggctggtctctaacccctgacctcgtgatccacccacctaggcctcccatagtgctgggataacaggcatgagccaccgcgcccagctcctttttttttttttttgagacggagtctcactctgtcacccaggctggagtccagtggcgagatctcagcttatcgcaacctccacctcccgggttcaagcgattctcctgcctcagcctcccgagaagctgggattacaggctcctgccaccacacctggctaatttttgtcttttaagtggagacgaggtttcaccatgttggccaggctggtctcaaactcctgacctcagatgatccaactgcctcggcctcccaagtgctgggattacagctgtgagccactgcgcccagccagagaccttgatttcttaccatacctgctgtctgtagagcaccatgtagcactcagctacactccctcttcatgagtggtactatttaaatgcctcaggttaaacatctagagattagggatcttttcttacacttccttgtattttatttatttatttttttgtttgagacagaatcttgctccatcacccagtggattctcctgcctcagcctcccaagtagctgggattacaggcgcataccaccacacccagctaatttttaaaattttttagtagaaatggggtttcaccacgttggccattctggtctccagcttctggtctaaagtgatccacccacctcagcctcccgaattgctgggattacaggcgtgagccaccgagtctggcctcttacacttccaatgaaccccatagcttgtagcacattgctttgtgtggtaagtgtctctattcatggtcctagcaggaaatgaatagcacagtgaaattaggataatttgggggagagtttaataaagtgataattacaaagaagtaggcagggtgtagggaaatcagaaagaatagtgcagtgccttagtacccacagctctgttgtgatcacctccaagctcaaaaagatgaggacagagcagtcgtgtagagaggactttctttttttttttttcttttctttttttttttttttttttttgagatggagtcttgctctgtcgcccaggctggagtgcagtggcgcgatctcggctcactgcaagctctgcctcccgggttcacgccattcttctgcctcagcctcctgagcagctgtgactacaagcgcccgccaccgcgcccggctaattttttttgtatttttagtagagacggggtttcaccgtggtctcgatctcctgacctcgtgatccacccgcctcggcctcccaaactgctgggattacaggcgtgagccaccgcgcccggcgagaggactttctcaataaaaactgtgactttcattgataccgtccatttgggacaacttactgaagcagaaagcagggtggagactgaattcaagggaaaacataagatgtctggtacagcatacaacagcattgattcagaggagggtgggagtactgagcccaggagacggagaaggaatgtaaagcctgcgagaggctgctcagcaattatctggtcccttagcctacaggattagcagcttcctaactcaggcaattatctctctggacctgtttcttctatctataagttgatggaattagtctaatgatatctaaggtccctactatgtgtacgtctactgtgacaaggtccttagctgcatgatctttaattctgacaaaggttactatcacaaatattttaacatgtttattctcgtggttactaatcaacaatctctggcactattacaacaaacctttcagtatttacagagaagttatttgccattcttagcaactggccagtcaacaactcaactttatagtaagttacagaatttattctgtatattgtattctgtacaatgtattccatacattaatttattttgtggtaaaacagtaacttttcattttagatgggaaaactagacgagctgagattcaacccacgtgagcggctgcagagccgctacccttaacagctctctctcgggattctaacattcccttctgtgacggagagacagcaggccgggacacgcatcccaggacggatccacagctggatggggaaggctgcgccaggcgggccggaagcctggcggtggcgtgcaggagccccgccctcctgggctggattcagccgggggcggggccgcgggcggggcctgtggcagcgggaatcccgaccccgcccctttccccacccctccatttctcgccatggcccctgcactgctcctgatccctgctgccctcgcctctttcatcctggcctttggcaccggagtggagttcgtgcgctttacctcccttcggccacttcttggagggatcccggagtctggtggtccgggtgagcgggagggatcgaggatgaactgggaggaggaaggtggagccgtaggagagggattgagggcggggcttggaaacaaatgacaggggaagtccaagagagggaactcgaaccttgaaagcggccgagaagctacaggggagggagacctgagttctaaattaggaactcaaggattagagttttggagaggcgggagagtgaggactgagggagccgaaaagggcggtgaccggagtattctaagtaaagtgttttgtagagaggactgttgagaggagagtgttaaaaagaaggagcatttggagaaccgaagtaagaggggcaatccagcgtggcctctccagccatgctttttgcaactgcctaacatgtggtgttctataaatcctcttccccaggtttgcaggaggcctagggaagagggcagaaactagggatggaaaagtgagatgggcacagcctagagaggaagcattaaggctcttgaaagcagtaagggacatggcctggggatccaagaggagatgagggtgggggaaacattctgccactgtttcgatcttttgtctctttttccctcaacttcctgtagatgcccgccagggatggctggctgccctgcaggaccgcagcatccttgcccccctggcatgggatctggggctcctgcttctatttgttgggcagcacagcctcatggcagctgaaagagtgaaggcatggacatcccggtactttggggtccttcagaggtcactgtatgtggcctgcactgccctggccttgcaggtatgaggccctggccttgcaggtatgaaatcctggcagttgagtccccaagggagaccaagtgtgggaggggtgccgtggattggaggggcaaaatatgggttca

SEQ ID NO: 11229 - DNA, 6000 bp, Homo sapiens
cctgggttcaaacgattctcctgcctcggcctcctgagtagctgggactacagccacatgccaccatgcccagataattttttgtatttttagtagagacggggtttcaccatttgagccaggatggcctcgatctcctgacctcgtgatctgcctgcctcagcctcccaaaatgctgggattactggcgtaagccaccatgcctggcccaatgtatttgatttctgaggctcaacaaaagctaactttcacatttaagtccattttgtgaagatccttcatgaatatgttggagttattttaatgactcaagtgattcaagtgttaaaaaaaaatgatgaaatgaactccccctcatgctggctttctaaaacttggaaaaatagaaaagtataaatttaaaacaagtctaaaaatggtccaaacgtataatttataaagaattaacgtttttaggctgggtgtagtggctcacgtctgtaatcccagcactttgggaggctgaggcaggcagatcacctgaggtcaggggtttgagaccagcctggccaacatggtgaaaccctgtctctactaaaaatacaaaaattagccaggcatggtggtgggcacctgtaatcccagctactcgggaggctgacgcagaagaattgcttgaacccgggaggcggagatagcaatgagctgagatcacgccactacactccaacctgggcgacagagcaagactccgtctccaaaaaaaaaaaaaaaaaaaaaaaaaaaaattaacgtatttaaaatatctactttcctgtatccttgacgattctctgtttcctcctctgttcccctttttaaagaaattaactgttatacatgtaacatgtcagttggctgttatcctagagatggcaacatcatatctgaaaaaaagaccttatctataattgatggcacctaatgaaaaaatacatgccatggggatataatcaactgagagattctatgcagtggaagtcatgaagtccgaagtcttgtgagaatcacattctttcatttaaagtatggaattggccaggcacgcctgtaatcccagcactttgggaagccaagtgcctgagctcaggagttcgagaccagcctgggcaacatggcaaaaccctgtctctatcaaaaatacaaaaaattaattggctgtggtggcacgcacctgtggtcccacgtacttgggaggctgaggttggagaatcgcttgagcctgggaggtggaggttgcagtgagccactgcactcccacctgggtgatagagtgagacagcgtctcaaaaaaacaaaaaaccaaaaccaaaaagtatggaattatgagaaatgaagccttatttccatcaacaacaaagttcttaggctgtctactaaagaattttggtgtaattgctctttcctctaatgacgctaaccattaaaatatcttgcttgacttgtatttctgatgactgactggctattcaagaacttgcaagattttctatcacaacacctatgacctcaggctaatcagtcaatctgtcaatgtgagaacaaagggattttcctaaatatctaactgaaagtattcaataagtacactacacaaaaatcaggaaaaattcaattttaaaaagtaatttttaaaagccagtttgaatcaatatctgatgcaataaatacaggaaatgaagtttattatacaatttctacatcactctttctcctaaaagtcctctgagataattaaaaatgaacattttgcagttccaccaagctgccatggtcaactgaaaaggaaaaggtatttttgttgttgttgttcctgcaaaaatatgacccagtcactgaaaataattcaaaccatttccagtcactaagaactttctctgaaactcatgatggtaaaaactatggcacatctctcagccctcttcaactttttaaaatatccttgttacagatgtgaatgaaatggtttgaatatggttagaagctagagacctacagcagcacccaacataaaaggaacccaacaagcaaatttgtgtggcaaatctactttggttaggcaatgaaaagaccagttgcagttttctcttccttgttcccagggatacccaatagttactcttctgtatttttttcttagatgtttctggttaccgaattcagtggcacaacacagcaactgaactaaaaaatgaaaattgtataaaacttcccaaccaaaggctaaatatacacaccttttcagattgttgggcttgcatctgttctatcattttagattcacttttatactggggcttgtgcattgactgcatacttagaatgttaatctgatagcattaataaatgtcatttagccacataaattccacttttaccaagaatcagcacatgaacaatcatttgaacaatataaatgtaatctaaatgtatcaacatacatacacacaaacacacaccagtcgctcctagcaatcagtttgaaaatgcataaatggtagtccactgtgagaactattctctttagttgccctagaaatgctgaatgacgctttcttttgaaaattcctacttcagcagattaaatgaaaaaccacctagtaaggacttcataaaataatgtaaccaagaacatcacaaaattttgagttccctgggataataatgtgacactgaaaaaaatgtttcagctgggtaaagatgcatattgtggaagaatacagtagtggaaaatgaaatggagggatatcaagagatctggaaaagcaatttcatccatgtggacctcatctgaaaatgttaagttttagagaagaatctcaggaggtttcaattctgtaaatgtttcagtcaaaatcgaatttctaataaaaaaagagacaagggattaactcattttcctatgaacaaacaaaaataaagaaaaaggaagcagataaatacatcacaatcactcagatcactagaacaaaaacaaaaaattgaaggtaaaatgaccatatatacagagtgctggaatagcagatcagttaaataattatcaaatttagtgggcatgatgatataggcagaaatggggaggaaaaacctgccttatatgtactttcgcaatatgcccatattgtggcatacatttttactaacagaacttagcaaaataaaaggactcaaagccttctccattaactgtgatagattgttttccatttgagcctggggttgaaggtaaacttaacagatcaaaacaaaatatagacctaagtatgtcagtagtgctaagaatttgagcatgaatgtcatgtaagagcaaacccaagcaagtcggttattagaaggcagcaagtattatatcactctaaactctgcctagtaaacatgtgattggctcacatttttgaaacttgtggtcattttgaaaaaaaacatttaactgtaaaatttttttttttttttttgagatggagtttcgttcttgttgcccaggctggagtgcaatggcggatcttggctcactgcaacctccgcctcccgggttcaagtgattctcctgcctcagcctcccgagtagctgggattacaggcgcggccaccacgcccagctaattttgtagttttggtaaagacgggatttcatcatgttggccaggctggtctcgaactcctgacctcaggtgatccacccgcctcggcctcccaaagtgttgggattacaggcgtgagccacagagcccagcttaacggtaaattatgaggaccaagcactctttattttctctttcctcagtttaccttctttaaggcattactgcagactaagcctaaaaaaaagtaatttgttttcaaatgatatgatttactctctggcctggatttcaaagatgtcagtataatatggattgtatatattgtttaaattttacaaataacataacgcctattatagaaattttggaaaatacagaaaagtgcaaagaaacagaaaaaaaaatccttcatccggtcagcagagttaccattttcactttttagttgcgctctatattgtacttctatagtcgctacactactctaatatcctgacttagtcaacttttatatcacgagtattttcttgggtcattaaatagctggcacttttaaagtgtttacggagtatctcattttgtagtaatgctatatgtcctggtttttataacagtaagagaaaaagctacagcctattacaaaacacttcctatatcaatgcgcaaaagagaaaggtggacacagaaaaggggaaatgtaacgtgagaattagcaatagagaaagaataagtgagaatcgcttaattagaggcaagataatagggctaagtcacattattgattcttgactttaggacaaaaggggtacatgtcacgcacctctgttccaagtttgtatttgcaccttgaatggcgatttattagataaagtcgcggttttacaacctaagcaaatactgctaatcctcccccgactcaatccaccttgaggccgccttttaaatgctccgactcccttcagagaaagcctcgaggtaaaaagaaaaacctgtctggcaatccagacctgccgtcgccacgataaccagagtagcaggcaggtgtgtgcttactaaagccacggccaacagagcgaagatgcgcctacaccgcacgcgaagtgtcaccgtagctctaggaccacgcatgcgcgaacgcagattcgcgatccaatggctgagcccgtcacaggacagatgatcagggtgcgtccgccttttcgttcccgcttctatcctcctcccctttcccctccccatgtccctccttcttctccctcctccctctctccctccctctggcgtctccagccgactttcgcttcccgtcagcagcctttggcggaagagtgtcccgcctcttccgctctacagcggaggtggctgtggcggtggcgctggtggctgcggcggcggcggcggcagcggcgctcgagcggttcctgtcagggtcagccggcgggccccctgggtggtccacctgcaaatcgcggagcggcgccccagggatcgatggcgatgaactataacgcgaaggatgaagtggacggtgggcccccgtgtgctccggggggcaccgcgaagactcggagaccggataacacggccttcaaacagcaacggctgccagcttggcagcccatccttacggctggcacggtgctacctattttcttcatcatcggtctcatcttcattcccatcggcattggcatttttgtcacctccaacaacatccgcgagatcgaggtgaggggagggagctgtggtgggagttggcgttgctcgggaggagggtcctacgcgcccactccacttctttcccagcgcccagaatccagttgactggctgacctcgcgccgtccaccacccccttccctctgtttctctgttttttctttctctttctgcgggtttcctgaatttgcaggtttgtcctagctttgtcttgctcgagatttacgaaagagcaaatccacggaatgagctgagacggaatgaatgtttaatgcagaagataggtcaggtggagaacgcttcttcagtgggcggtttgtgtggttccgtgggggattagtgggggttgttcacggaggtaaaaagagaagtgggggcggggggcaattgtaactaggtagatgtaaccctgagtgaattgacagggtcaaagtgccattacctttgtgggaagtatcccaagacacagagatggacaccttggccattgttgggagaagaaccagagtcgtagaggtattgacgattctaatgtaaagaagctgtcgcatgttatcaggtcacatatgaggacttatgacaaatgtgcatagtacttttcattttgagctaattcgatatttttagttgtagggcaagatgtacataaaagataacctgaaacttcaattctggttttgc

SEQ ID NO: 11230 - DNA, 6000 bp, Homo sapiens; identical to SEQ ID NO: 2454

SEQ ID NO: 11231 - DNA, 6000 bp, Homo sapiens
agaactgaggatctaattccatcagacttcatttacaaaatgcaaattcaatgagaaaattattaagaatttcaagacggtaaccacagagcattaagccccaactgtgggccagcctctcagcacagagctctgtacaactgggctaattgcatgtctctgaagccggatgtatctggaaggcaaaaagcaacagacttagatgaaagtcggggagggggtaatgcagggaggtaagatgaggtaagagaaaagaggtgtaatctgtgtagatagccacaagccataccatgcagcactcagaataatttctatgtttcaccaattagttatttggggactccaaacagaaataagcaatagatgaagtttatctacctcttcaggatcctcccctcaacttgcttctcaaaaacattatggaaatgagatcctaggcagcttttcagactctggacctgtttttcttctctagcccaatcctgtttcctctgtcatcctcagaatcactctgctgcaagaaagaatcttgtcgactaattcactaatagcaagtacaaccaatacattttaccttccaaagagaaacttgtaaagaggaactatttcacatgccaaatattctcttgtagcagtgtatttacaagatcagcaaaaggtcccattgatagtagtggagaagggaatacagaagagcatgtacatttgcgtggagaccatgcccggtactccctccaatcagctactccaccttgacaagtctaagagctgccaccactccagccagctgcaccctctgtacacactaatctgcagagcaaatattccctgcaaaggggaagtctgggcctcagaactggccaagcagaatttctcagccacggtatttcaaaaaatttgaaattggatcttgatcactgagaacctgtcttcataattaagcagaaaaaagcagacagacatctgttccatccgggaacacagaaagcatactaattacaagcttctgcctggtgtggaacactgcggccttggcttggacaggcttcacggccagacgggcagaggctgaccaggctgcagtcatcagaggagcaataaaggtcactacgatatggctggagcctctgcctttcatcagctgaatgaaggaactgaatggagttccttcttgaccactgtcccatcttcctcttacacaccctggattccaggaacgaacctgggacctgagcttgcaagctgaatcttgtacttttcatgccctaaagctgtcataatatgctttttcccgcctccttctatccaaatcttacccacctatcaaggactgtctctagatccacattattcatttgctaatttattcatttgccaaaaataagtacttaatttgtacaaagcaatgtgctagtcattgcgtggaatactaggtaaattgtgggcaagtcttttctttgtgatgcttataagcctaacatcggagagcaaacagataccaaaataattccaatataaaataaaagaaaaagaaaacctgttagtaccctaacacaggtgaaactagatgcttaggagtacaaaacaaagaacaaagagttgtactgaagcacatcaaaggttttattgaaaaggtgacaattgtgccaggacttgaagaacaggtagcacatgaggacacagatatgcagaaagaaacgaaaagaaccactgaagtaaatagaaggggggaaaaaagctgcaaagtgtgcgtgaagaacaccagatatgttcagtgtgatgagaaatagagattcatgagatatgaggttagaaaagcagcctgccagccaggcgcggtggctcacgtttgtaatcccagcactttgggaggcagaggcaggcaaatcacctgaggtcgggagtttgagaccagcctgaccaacatggagaaacctcatctgtactgaaaatacaaaattagccaggcatggtagcacatgcctgtaatcccagctatttgggaggctgaggcaggagaatcacttgaacccgggaggaggaggttgcagtgagctgagatcgcaccattgcactccagcctgggcaacaagagcacaagagcaaaactctgtctaaaaaaaaaaaaagaagaaaagaaaaagaaagaaagaaagaaaagcagtctgactaatcacagtgtcccttctggaaaacaacccagggggaaaccacagcctctcctgacccctcttctctgggactttcatatgcttctgtctgtccctcgccctttgtgctctaaatggcagacattcaacaaatgtgtgttgaataataaattaataagctattcactgctaagtgttgccatataatataacccaaggaaattgtatggtgtgttctaagtcaaaacagttgcttcaaagtaatcatctttgttccttaatgtttgcaaaactaataaatagaaactatgatttgtgaaaagcaaaataatggtgataattcacatgttaaaggcatcttgaggtatgtgaaccatgttttattttatctcaccagttacttcgttgagagtgagccaaaagcagatgtactggtggaatttagaagacctgtgctactcccagtttcctcaacaggcatttccacattattggaaacttcagcagaggggccagagatggcacaagttggaaccgaatctggcaaaagaagagataaagcaaatgataagtgcctgggaaacttagaattcttgagactccaaactggaaatactcagcggcttttaaaatgtttagctaaatcatagtaaaattaaaatagcaataataatataacaataatagctagaatttattgagtacttactatgtaccagatactgtgatgtcttatcaatataatttcatttaattctaataactagcctatgaattaagtattattagaaacatttaatagatgaggaaagtggggcatagagtggtgaggcaactccaactgtaagtcttaattagactacccctctgaatgaacagatgcattaccaatagagatcaggacacttagcagacaccaacgaggcagacatttcccttcctggagcctaatctctgatacaagagcagctcagagcccctggaattttatatatgtgctgattcttacagactttcaaggatgcaaaaacatacacggccacatttaagtgttcaatggatccacacactgcaagctaacaagcaatatgttaaaattcatgaaaggtgtacttttatgcaggctgggaagggagaaagaaataagtggcacctatatatttaagctgtgttgaagagggctgggctagagttgtggacgcgaggaagaaacaagacaaagccatccctgtccttggtggccccctaaacattggttcaacaattttctttggtctgcccactgtttaacaagacagaggtgtttcttagtgttttttaggctttttcctgaaacctatgtggaagtgaggaaataatgggcaaaatatcacttatatccttaaccctttccaggagatcatcttgcagattgcagatttagtagctatatgaccttcgacaagtaattgtgagtctgtatcaccgttgagtgcgtgtcacttttctgtacctcagcttcttctgtaaaatctggatcagagaatgcccaccacattgggttgctgtgaggattaaatgatataatatacatataattaatatatatgtaatgtacttaacacaatgcctggcatatagtcagcactatgtaaatgttaggtattattattattatgtgtagtatagccatgcaaatattaactattttagtaattattctcattaaatgccacttacaagaggtctgcagaaagtctcctgaagcagaggttattgtatttatacactaacttgcccacaactgtgcacattttctaaggcattcgcgggtaattttctaatgtgttcttgcctttatgcatttgtgcttttttcttgaacgtcataatttaatttattttcttcatctttctttcatcaaacccatttggacttcctgacggtagggtaagggaaagagtgaggattaaaactacccaatattcaaagaggtgagaaggttcttcatttgggcagtgctctaccagcaaagagaagctcctcaccttgtgtcccatcagggacagaaaacatctctaatagggtggcagtggaagaaacacacatcatgaccatctgcctcttcactcattttaaaaatatgtacagtcatgcactgcccagtgatgttggagtcaacgacagattctatgtatgacggtggttccataaggtattttcactgtaccttttctatgtttagacacacaaattcttactattgtgttccaactgccaacagtattcaggagggtaacatgctgtacaggtctgtagcctagaagcaataggctctaccatatagctaggtgtgtagtaggctgaaccaccttggtttgggaaagtacacgctatgatgttagcaggacgaaatcgcctaaccacatatttctcagagtatcacatccccatcataatgcgacgcctaactgtatattgaaccagccttctacgaccaaaatatggtctgggcagaaaaaagctttgaagaagcactaaggcagagaaggtgcccatcctggggagcctcggcagggcccagtgaccagccttccatggccctgacagctgccctaacagaagctccagcctcacggtgcaggcaggaacaagcctggcgcgccagacagctcggccccgcccactcgccgctctcggaaagctggaaccctgcccctttggagggggaggcggcggcggcggcggcggctgcgcgggcctcgggtgcgcgggcacgcgggactcccagctgtcaatcaggcgcgggctgagctctacgaggcggagcggcggcggtggcgacggcgatgggaccccagcgagagatctgcagctaggctggctgcacttgctccacgggtcaggggatcggagggggtaggtaaagccacgcagagtccaggggtggcggctttctattctccaaatgtctttctccagttctccctctcctccctttctctctttccttcctccttcttcatgcataaatgttctttctctctctccctccctccttcattcacgtttattatatgtgcaccaatctccacaaaaaacatgcgtattaaaatcggtgaaaacatacaaattaggaagagctagctccatgctttggtggtttgtggtttgtgttatgtaagaatttggggggtggggcacgaggggcgtacagctaaaaactttagagtttcctttccataagataagaaaagttgtgtattaggaaagagtcaaatatatgtatctagagtttgcaaagttggtttatttatcaggctgaattgagcccccactggccctccccactcctgtgccacgtctgaagatgtttcagtgttttggcgtgatctcaggacctacttctttgtgttgttagacaggaacattagggtgggggtcagacagagtctggaggcctcaaagaaaacagagctggaatttaacagctaatgtttgtttgattggttcctggcactgtaacagaaatgttttcagaaccttggagagctccttgggcgccacatcaggccagcctttggtgaagggcatgtggggaatcttcagcgaaaatggagaagctgacagaaaaaagaagagaaatgtaattcagagaggcagagagagacaggaaagaaagagatacagatgggggtggagggcaggtgttgggggagggaagaagaggagaatgtagtgaatttagtgacctatgattggcttgttttcgtttgcttatccagatccaggaggctaatataatttgcttctttcccccaaatctgcccacacaccactcacaaaatttgggggaaagtaaatgggtctt

SEQ ID NO: 11232 - DNA, 6000 bp, Homo sapiens
catggtggctaggatagacctctctgaggaatctgtagatgaagggcccagaacttagccttgaggaactctgacattgaattgctaagtgaagaaggacaaggataagccagacaaggagactaaggagggatgacggagaggcagggagagatctcagagtgtggcgtcacctggctgcttgctcagtgccaggtaccctgctaagctctttatagacattgtctttgtcttatttaagcttcacatacttttttggggggggagagggggtggttcaagcgattctcctgcctcagcctcccgagtagctggaattacaggtgcccaccaccacacccggctaattttttgtattttagtagagatggggtttcaccatgttggccaggccggtctcgaactcctgacctcaggtgatctacctgcctcggcctcccaaagtgctgggattataggcatgagccaccgcacctggccaagctttgcatactttcagtgaacactttagtgcctactgtagggcaagcactgttttaggagctggagctacatcaataaaaaggacaaaatccctgcccatatggagcttacattgctttgaggatgatagacaatatacataggtaatataattttaagtaatagtaaatgcttcaaatgaaaataaagtgaaaaaagaggttagagagtgacaggtggaagagaacaggttgatacaaagagagagctgctttgaggaggtaacacatagagagaaaattaaacgagggaacaaaccatatgaacacacagagaaagtgcgttccaggcacagggaacagcaaaggcaaaggccttgatgcaggaatgactctggggtgtttgaagtaaaaatagaaggccaggccaggcgtggtggttcatgcctgcagtcccagcactctcagaggctgaggcaggagcactgcttgagctcagaagtttgagaccagcctgggcaacatggtgagaccctgtgtctgcaaaaatgtttaaaaagtacccaggcctggtggcgtgtgcctgtagtcctagctagttggaggctgaggtgggaggatcctttgaggttgcagtgagctatgattataccactacactccagcttgaatgacagaccaagatcctggttcaaaaaaaaaaaaaaaagcccagtgtggctagactgtgggagatgggatcaagatgtttaacagagggcatattgtacagagccctataaactatggtaaagcatttggattttattctggattttatacttttttaaatatttttatactttgaacaaatggatttactttttttttttttctttttgagacggagtcttgctccatcacccaggttggagtgcagtggcatgatctcagctcactgcaacctccacctcccgggttcaagtgattctcctgcctcagcctcccaagtagctgggactacaggcgcccaccaccacgcctggctaatttttgtatttttagtagacacagggtttcgccatgttggccagcctggtcttgaactcctgaccttttgatccgcccgcctcagcctcccaaagtgctgggattacaggcgtgagccaccgcgattggcccatggatttacattttaaaaccacctctgactgtaggtgtgaaggatagactagagaatgagaatgacagcaggcagaccagttaggaggccagcgcagtgcagtggtccagggagaagagacgatggcttggtcagggtagaggtggagagaagtggttaaatttgggttatgttttcgtctcagttgatggcaattacatctttctagttaactcaggccagaaatattggagtcatccttaattctatttgtcaaacatgacctccaatccattaacaaaacttgttggctcttttccaaaatacattcagaaaccagcccttttcacacctccactgctgtcaccctagtctgagtcaccatcacctcctaatagatctccctgcttctgtcatttctgcccattctttgctgcctgccccctcccacctcccgcccaggttgttctcagcacagcctccagagtcatcctttttatttaacaatttaaaaaatgttataggccaggcatggtggctcacgcctctaatcccagcactttgggaggccgaggcaggcggatcacgaggtcaggagtccgagaccagcctgaccaacatggtgaaaccccgtctctactaaaaatacaaaaatgagccaggcatggtgacgcacgcttgtaatcccagctactcaggagactgaggcaggagaattgcttgaacccaggaggcagaggttgcagggagccgagatcacgctactgcactccagcctgggcaacagagcaagactctgtctcaaaaaaataaaataaaataaaaattaaaaaattgtattatatacggagacaaggggtctcgctatgttgcctgggttggtcacaaacccctgggctcaggcaattctcctgcctcagcctcccaaagtactggcattacaggtgtgagccactgcacctggccaggtcatccttttatttattttattttatttttttttttttgagacggagtctcgctctgtcgcccaacctggagtgcagtggcgggatctcggctcactgcaagctctgcctcctgggttcatgccattctcctacctcagcctccccagtagctgggactacaggcgcccgccacctcgcccagctaacttttttgtatttttagtagagatggggtttcaccatgttagccaggatggtctcaatctcctgacctcgtgatccacccatctaggacttccaaagtgctggcattacaggcatgagccaccgcgccccagcccaggtcatccttttaaaatgtaggttggatcacatcactctgctcagaactctgcagtgacttccatttaaatcaacagaagaagccaaaatccttaagataatttaaaagacctttcccaatccagaccctgctttacttctcttttcacctttcccacaactctggctcactcgtgccactccagcccctcttgcctccttcctgtttgttccccatgtatgtccgaacactcctgtcacagggctttactccagctgtttcttatgctagaaaggcccttctcctggaaatccatgtggccaaaactaatcttctttaatgatttgcttgaatttcactttactgaggcctcatttaagactaaaatctgtcctcttgatacttttaaacttgatccatattttcttttatctataggatcatctcccctgctggaaacctaatcagagatctttattttattcagtagtatcccaagagcgtagaagagtgcctggcacatactatacactcaataaatatatttgttgaacagatgaatgaaaaaatgaggcagacttagctggctgatggattgattaggggaggaggaatggagaaagaggatgatgacctttcagttttggcccaaataactgaatgacctgtggtgcaatttcttgatggggaagcctggaagagacaggctttaggagtaagaacaagagctccattttgtacgtatgagagagatttattaaagatctcagagaagatgtcccataagcagttgaattcatgagcctggagctcggggcagaagttgggggccagcaagagaagtttgggaatcttcattggttatagatggtatttaaagtcaggaggtgataggtgataagtctagattaaggagagtgtcaaagatttagccctgaggcacttcaacatttagacttcaggagaagcccattagatgcaaaggaaacctatagagagtagtgtccctgaagaaaacaaaggagggagggagcgaccaagtctatcaaacattgatgggagagtgagtaggatggccccagatctgttgactttggcaagtgtgaattcagacaatggtggcaacaaaagcatgattgtagtggtttgagagctgacagaactacaggagcaccttgctcaagctcccatattaagtggtagagttagaagtgaaccaaagtcttgattgtggtgatagtttactgggtttatgcaggtcaaaacttatttaagtgatactttgcagtttattttgggtgccattttattttgtgtacagtttattgtatgtcaattatatctcagtaaagctgttaccaaaaaaaataaatgaaccgaagctccactgcaccgtgacttctgcatgttgggctccagttccctgtttacaattgtacacttcgggattttgtgacacatttcaacactggaccgatcagacctctcccttagccattggtctgcactgtcttttctgcccatgacccagtcagtctcgcgccccatgaccctctcctaaaacacgcgcagtctcctctctcttccccttcctctcgtgtcttccttgcctaccagcctcacctgatgggctcgtgttctctccgtccccgatccactcgggctccggcagctgctgcttgggcgccttcggcatcgcggtggcagaactagaaacgagttacagatagaaactagaatatgctttttaaaaaaacaaaaaacaaaacaaacaaaaaaacagtatgcctcaactccttcatactagtaggaaattattatgttcattccttgagtctcgcggcgtcgggaggtcacggcgtcaggcttcccagacagtcgtaaacgccatgtgtttacgcgactggagcaagcggacgccggccccgctccgtcattgcaggccacgcctccactgaaccagggccacgcccccgagatgacggcgaagctcgcacgtgcgcagcccgggggcggggttggccgcgccagcttggagagccagccccatcggggttccccgccgccggaagcggaaatagcaccgggcgccgccacagtagctgtaactgccaccgcgatgccgaaggcgcccaagcagcagccgccggagcccgagtggatcggggacggagagagcacgagcccatcaggtgaggctggtaggcaaggaagaaacgagcagagggggaagagagaggagactgcgcgtgttttaagagagggtcatggggcacgagactgaccgggcccctgcgggagttactgcgcatgcgtgccgtgggcccgggaggagtttgccggggaggagtgggtttggaatcggggttaaaggaaagagatccagatgtcgcacgtgacctaagtgagactgggcgagataaaagaaagagcatatggcaccgagggagagatggggagaaatgggaaaaccttgcttaaaaaatttggacatccgccccaccatacactgtattccaccaggaatatatgagccctgcctcgacctccccttccccctgcgcgcgcatacacacaccttgggagcctgtgatcccccttgtttctcaagagagggtgactccttcatggtttctttcttaagacacccctctcactcaactggagcaagagtgtagatttttgatgttggaatgagggttaaggtttacttaaaaagcagcgaaagtttgttaagcgcttgtttttaattaagcactctatatactgtgctttgagaggggaaggaaaaaaacatgaagatatcctcccagggttgaagtcagttttaagggggacataaatggacacaactaaccccagtaggtacacagtaactaattttaaaagcacttattggatgcctactgtataccaggtactgtgtggaggaagtgggaatgtagagataaaagataagactttccctcaagggacaacccagtatggtgaagggtcagagcattaaccagacagacagtggttgtcagagtatgatgaaggtgcttaagaatgttatgggactgtagaagagaggaggagcatctactcagacaggtaagggagtgtcagcaaagcctcccaaga

SEQ ID NO: 11233 - DNA, 6000 bp, Homo sapiens
agctgggtatggaggcaggtgcctgtaatcccagctactagggaggctgaagcaggagaatcgctcgaacctgggaggcagaggttgcagtaaaccaagattgtgccgttgcactccagcctgggcaacaagagtgaaactccatctcaaaaaaataaaaactaaaataaataaatacaaaataaataaataaatatttaaacacaacttgggttctacaagtgcctggactacaggtctgtttgaaggagctgccttgtttgttgacccatggtgatgtcataattatcgccagtaatcaatgcgtggattcagggtgccaatggttgaatatgatcatggtgaaccccttttctaaagccttctctagtcctctacagaggtactatggccaggaccaagaaaatgaaatttctcaaaggtcagtggtccataacagttaagtatgctacatgattctcttggttttcatttctagtgaggaaacacacttactcttcttcaattccacatacaggacaggcctaaaagctcctcccatatctctgagaacattagaccatgcactcttgaagaaggctttcccttttcctccttaaaaatcttcctccagcaattgagggttcccatgtgcagtatgttggctcctttgggtctgcacagggcccaatgggtagaaggtcatgttggccgcaccaccacagtctgggcaatcatctggctcaccatgatgtggtggtcttggagtcagggagcatgccttaggccttcaggctgcccagaaaaggatgatgccctgcacagagatgctgaagccctggtacaggccccagatcccatcagacttacttatcttcaccagacagtctcctaggtctttgaacctgaatcccagctctgtgtacgatttcccaacattgaccaccagatgggttctggcaaaacccagcaagtacacaaaacagagacaggtggctctggccgccttgttggaggccagattgtgggcaaaacagctctagaactgtgtgtgttcatccatactcccaggaatagctgtgtctgcttatccttgaatgtgatgttgagggcttgcttaagaaagtagtccacaattcctgtgcactgctgtcagctgtcacctgcttcctagcgccttgcatctgctacagcagcttcacctgctcaatcagggccacaactatcttggcgacagcagcagcaatgccaccagccagatggtccttggcaaaggagatcgcctgttgtgtcatggttgcagagcaggaagctgagcacatggagaactgggaggattagtgctgctggctcagccctgtgactgctggacctagaggcctacctcttctattcttgatctgggttaacggcattaccatttacctttctcccaacttagaaagcttgatgttattctcaccttctttctcttgccctccacatacagtcagctgccaaatcttgctgcttctaattttaaaccatcatttgattctgtctctcccaaaccctacgctacttgcttaaaataggccttcatcatatcttctttggactattattgagacaggcctgtaatctgttcccttgataagtttttccccaccatgttctccatactgccactgtatggagagttactgagaagaaagcttatcaagccatttttccgtgtaaaagcttctattggttctataaacccatgaggttcaaactctgttgcttggctacaaagctcttaaccctctggtggcaatctacctctccatcttgtttcctttcctaccttcatgttctccaaacacattctaggtttcttgggcctcatatcctcactatgtctagcatataaccctgaactttcagaagtccatacgtgttttttaaagcaattcctttctctccgctccacccccattcacttgaaaaattcccccatctgttaaaagccaagtttaagcatcacctcctccgtgaaactttcccagattttcccaggctactggatgttctgttccttttgctccgagaacactttataattgctataaactttacagtgtagtccttttctatttacatatttgtagctcatagtagactgtaagcttctgattattagtgtactagatagaagttgtttgataaatactggtgaataaatgcaatgttgttttcttcccaggatgttttggggaccagtctctttcttcctactatagtcttaaaatacaatcaactcaaatttatattttaatagcctctaagctgaccatctagaaccacactattcaataatgtatccactagtcacatgtggctgctgaacatttgaaattcatctactccaggctgggcgcagtgcctcacacctgtaatcccagcactttgggaggccaaggtgggaggatagcttgaggctaggagttcaagaccatgctggcccacatagtgagaccccatggaccagcagggtctcgaactcctaggctcaattttttgataatttctttattaaaaaataaattcagccactccaaaatgaaatgagctgtgttatacagcattttgaagagaatatgaaaacaagaatggaaagaaaatatgccatgttttatattacatctcaaaaatattttggatacattgagttaaatcaaatgtattagtaaaatgtattttatgtttctttttctgtttttaaatgtggctactgcattatttaaagttatacgtgtggcacgcaagtatttgtactggacattgctgtgacccttcaatccatcctgaaggttgttttttggtggtaaacctgtattctgtttttctgagtcctcacagtgctgaacagaatttttgtagggaggagaggtactcaaaaaatggtgtttgtttactggttactgcaggactaactttcccaaaagatcctttttattatgctattatcctacttgaagaatctacaggttttctttttctttttttggggggggggtgggtggggaaggagttttgctcttgttgcccaggctggagtgcaatggcctgatctccgctcactgcaacctctgcctcccgggttcaagcgattctcctgcctcagtctcctgagtagctgggattaaacaggcatgcgccactacacccggctaattttgtattatcagtagagacagggtttctccatgttggtcaggatggtctcgaactccccacctcaggtgatccgcctgcctcggcctcccaaagtgctgggattacaggcgtgagccactgtgcctggcaaaaatctacaggttttctactgtcaatttgcatcaaggccagactactttgtctggcttcccaagtcttccataaccctatcatagtttacttatgcagccttatctcaaaagtagtaccttttgttccagtctgttttccaaggtacttcaggtcttcatgcttttgtgcaagctgctctttcttaatatctccctccccagtccccatctaaatccagcgtatcttcaggacaaggctcgtaagttctacctcccacataatgtttttttctgttcattggaactcaccaatatctccctagtagttatttgtcagagctatgtagtataagctctaatttgtttaattactgagcatcttcattgccatatccattcaatttaattccagaaacatttttgagcccctgtgccaagaacagggctaggtagcaatgagggtcacttttatgcagggacaggggctagaaattggccttactaagaagtgtaagaccgactcttgctcattgcctttcttagcatctgcttcatcgcaggcaaggactgtgtttatttggcttgcataagccccatattagaacttcctcataatatacaacatgccaaatcatcgaaactgcgtcacccggagttcaaacttcatgagcctggattagggtctgggttccaatgaaaagtgttttctttagttctctttctcttgcattaaggatcactatttacacagcttcttgttaaagtatcaccgcctagtacttgggttcctggtcacactttcccccttatggaagggcttactgccaggtctttcagactctggagccagactgctttggatttaaatctcaactcctccactagtagttctgtaatctggtcaggttacttaactcctctatgcctcactttcctcccctgtgtaatgaggataacaatatcataaggttggggaaagggttaaatgagctaacagttcgtttaacagagtaatcactcaatgaaatgttatcccctaatacatgtcactactagattatttctcgcccttaaaatgtaagagaccgtttttcctcttttcttccatccgtgtctccagcttctaaactgcaggcgaataaacctcgaatgagtaaatgaacccacccagtcgctagttatttctgcatttccaatgttgtgccagcaagagcaaaggcaaatgggcaagtcaaagtaggcttcttgtaaaaggtcttccattactgggttttactagaggcccttgcggaccatcacatctcaaaaggggggaaagctcgtatgaggcagtgccagctacctttcgggaatcaccttgggcagaaggcctttttgcaaaaagactcggcagcccgggccccgtaggttcggcgcatgcgcagcgcgctcggcgcccgggttccttcctccgcgccacccggaagcctcggcgcgacccagtccccctccccctcccctcgccggctagggtggtgcgtgccggcaggccggtcaaggaggcgggacacgtcggcgctaccaccgccaccgccgccgccgcccctcctcccgttccagctgccgctgccgcttcctgggctgagtccgcccgcggtcccggcggcgccaggtgcgttcactctgcccggctccagccagcgtccgccgccgccgtagctgccccaggctccccgccccgctgccgagatggcgacgcgctcctgtcgggagaaggctcagaagctgaacgagcagcaccagctcatcctatccaagcttctgagggaggaggacaacaagtactgcgccgactgcgaggccaaaggtagcttggacgtcgtcgctgcccacggtcggggcctcttgcgaccggtgaccttcccgccgctgcggcgctcggggcccgagcggacgcctcggcttcgctggccggctcctgccctgactggagggcgggtggctgagcgggcgggcgcggggctcctgtcgaccctcaagtccgccagaggcggcggcgaggtcaggcccgcaggccctgtcagtggccccagcctcccctcctcccagacacgggtttgagcaggtgccagggtagcgatgctcggaccctccacagggctgggggtaggagcgaggctgggagcgcggaaccgggcacgggtctgggcagagcttagggttagagagttgccctcctagctctgctcatagctatctctgtgggtggggccgcgcttaggtctggatcccctcctctaccctccggtgtgaccacgtcctcccactccgggctcggattcttggtctcctagatggagccctacctgcctgcccacctgacagcttttgtacaaggcttttatctctgcttcctgaaaaagagtatggtggtctttttcggtgggtttgagttttacggaataaattaattggagaaaggtctttattagtagtagtattgttttttagtctggttattagccagaatgaagaggaatttcattacatgagtctcttggaggacggtgggtttgtatttctgaagattttagtaattaggttttctctgaccagctagtttgggagaatatgtggacactgatttgtgtacctcataaatgctgaaggttcattttaaagatctagagatggaaaaaacctaattttagttttttcggttggagggctt

SEQ ID NO: 11234 - DNA, 6000 bp, Homo sapiens
ccaacatggcaaaaccccatctctactaaaaaatacaaaaattagccgggtgtggtggctcatgcctgtaatcccagcattttgggaggccgaaggtggttggatcacctgaggtcaggagttcgataccagcctgaccaacatggagaaacccgtctctactaaaaaatacaaaattagctgggcgtggtggtgcatgccggtaatcccagctactccggaggctgaggcaggagaatcacttgaacctgggaggtggagattgtggtgagccaagatcatgccgttgcaacaagagcaaaactccgtctaaaaaaaaaaaaaaattaactgggcctggtggctcacgcctgtaatcccaacactttgggaggctgaggcgggtggatcatgaggtcaggagatcaagaccatcctgtccaacatggtgaaaccccctctctactaaaaatacaaaaattagctgggcgtggtggcgtgcgcctgtagtcccagctactcgtgaggctgaggcagaagaatcacttgaaccagagagtcagagtttgcagtgagccaagatcatgccactgcactcgagcctggctatagagggagactctgtctcaaaaaataataataataataataaaaaaattagctgggcatggtggcatgtggctgtaatcccagctactggggaggctgaggctgcagaatcacgtgaacccgggaagcagaggttgcagtgagctgagatcatgccactgcactccagcctgggtgacagagaaagactctctctcaaaaaaaaaaaaaaaatttagccaggtgtggtggcacatgcctgtaatcccagctacttggaatgctgaggtgggaggaggtcaaggctgcaatgagccatgattgtgcaactacattccagcctgggtaacagagcacgactctgtctccaaaaaaaaaaaaaaaaaaggaaaagaaaacagttattcaaacaaattcttgtacgtgagtgttcatatcagcactttttacaatagccaaaaaggtggaaacaacacaaatattcatcagcaaatgagtggataaacaattgtgatatatccatataatcaaatattattcaaccatagaaaaggatgaaatactgatatatgctacaatattttgaggatgaatatcaaaatattttgctaagtgaaggaaagccagaaacagaacacatattatgtgattacacatgtaaggaatatccagaataggtaaacccatagagaacaagagcagatttgtggttgccagtggctgtggggtgggggagatgagaaaatggggagtaacttcatgggtatggagttttatttgggggtgatgaaaatgttttgaaggcccagcgtggtggctcatgcctgtaatcccagcactttgggaggctggggcaggtggatcacttgaggtcaggagttcgagactagctggaccaacatggtgaaaccctgtcactactaaaaatacaaaattagccaggcgtggtggcacatgcctgtaatcccagctacttgggaggctgagcaggagaattgcttgaacctgggtggcagaggttgcagtgagcggagatcagccattgcactccagcatgggcaataagagcaaagctccatctcaaaaaaaaaatgttttgaaattagatagaggtggtggttgtacctattactaatatactaatgtactaaataccattatattattctctttaaagtggttaggctaggccgggtgtggtggctcacgcctgtaatcccagcactgtgggaggccaaggtgggtggatcacctgaggtcaggagtttgattgagactagcctggccaacatggtgaaaccctatctctattaaaaatacaaaaattggccagatgtggtggtgggcgcctgtaatcccagctacttgggaggctgaggcaggagaatcacatgaacccaagaggcggaggttgcagtgagccaagatcgcgccattgcactccagcctgggcaataagagcgaaactctgtctcaaaaataaataaataaataaatacaataaagtggttaggcaaggcatggtggcaccctgggaggctaaggcagcaggatcacttgagccaaggagtttgagaccaacctgggtatcatagtgagaccccatcactacaaaaaataaaaagttagctgaatgtggtggcgcatgcctgtagtcccaactactcaggaggctgaggcaagaggaccatttgcccagaagttcgaggttgcagtgagctgtgatcataccactgcactccagcctggaccgcaactcaaaaaaaaaaaaaggttaattttatgttgcatgaatttcaatttttaaaaaatagttgattacttatgtacacttttctgcatgtaagtaatacttaagtttggaaaactttggtgtagtagaaatagcatgagatttgccaagcattttgctggctattaaacatatctaatctcataatatacattaagcacagccattgtgggggtggcagacagtatgacccagataaatattagtccccttgcacaactcaaagctttcatactctaaaattgtccatgtcccggaggccctgatttctttctttccatttttttttttttttttttgagacagagtttcactcttgttgcccaggctgggttcaatggcgtgatctcggctcactgcagcctccgcctctcgggttcaagtgattctcctgcctcagctttctgagtagctgggattacaggcatgcaccaccacgcccagctaattttgtatttttggtagagacagggtttctccatgttggtcaggctggtctcgaactcccgacctcaggtgatccacccaccttggcctcgcaaagtgctgggattacaggcgtgagccactgcacccggctccttttttttttgttgttgttgttgagatggagtcttgttctgttgcccaggctggagtgcagtggcgcgatctcggcttactgcaacctccgcctcccaggttcaagcaattctcctgcctcagcctcccaagtagttgggactacaggtgtgtgccaccacacccggctaatttttgtatttttagtagagacggggtttcgccatgttggtcaggctggtctctaacccctgacctcgtgatccacccacctaggcctcccatagtgctgggataacaggcatgagccaccgcgcccagctcctttttttttttttttgagacggagtctcactctgtcacccaggctggagtccagtggcgagatctcagcttatcgcaacctccacctcccgggttcaagcgattctcctgcctcagcctcccgagaagctgggattacaggctcctgccaccacacctggctaatttttgtcttttaagtggagacgaggtttcaccatgttggccaggctggtctcaaactcctgacctcagatgatccaactgcctcggcctcccaagtgctgggattacagctgtgagccactgcgcccagccagagaccttgatttcttaccatacctgctgtctgtagagcaccatgtagcactcagctacactccctcttcatgagtggtactatttaaatgcctcaggttaaacatctagagattagggatcttttcttacacttccttgtattttatttatttatttttttgtttgagacagaatcttgctccatcacccagtggattctcctgcctcagcctcccaagtagctgggattacaggcgcataccaccacacccagctaatttttaaaattttttagtagaaatggggtttcaccacgttggccattctggtctccagcttctggtctaaagtgatccacccacctcagcctcccgaattgctgggattacaggcgtgagccaccgagtctggcctcttacacttccaatgaaccccatagcttgtagcacattgctttgtgtggtaagtgtctctattcatggtcctagcaggaaatgaatagcacagtgaaattaggataatttgggggagagtttaataaagtgataattacaaagaagtaggcagggtgtagggaaatcagaaagaatagtgcagtgccttagtacccacagctctgttgtgatcacctccaagctcaaaaagatgaggacagagcagtcgtgtagagaggactttctttttttttttttcttttctttttttttttttttttttttgagatggagtcttgctctgtcgcccaggctggagtgcagtggcgcgatctcggctcactgcaagctctgcctcccgggttcacgccattcttctgcctcagcctcctgagcagctgtgactacaagcgcccgccaccgcgcccggctaattttttttgtatttttagtagagacggggtttcaccgtggtctcgatctcctgacctcgtgatccacccgcctcggcctcccaaactgctgggattacaggcgtgagccaccgcgcccggcgagaggactttctcaataaaaactgtgactttcattgataccgtccatttgggacaacttactgaagcagaaagcagggtggagactgaattcaagggaaaacataagatgtctggtacagcatacaacagcattgattcagaggagggtgggagtactgagcccaggagacggagaaggaatgtaaagcctgcgagaggctgctcagcaattatctggtcccttagcctacaggattagcagcttcctaactcaggcaattatctctctggacctgtttcttctatctataagttgatggaattagtctaatgatatctaaggtccctactatgtgtacgtctactgtgacaaggtccttagctgcatgatctttaattctgacaaaggttactatcacaaatattttaacatgtttattctcgtggttactaatcaacaatctctggcactattacaacaaacctttcagtatttacagagaagttatttgccattcttagcaactggccagtcaacaactcaactttatagtaagttacagaatttattctgtatattgtattctgtacaatgtattccatacattaatttattttgtggtaaaacagtaacttttcattttagatgggaaaactagacgagctgagattcaacccacgtgagcggctgcagagccgctacccttaacagctctctctcgggattctaacattcccttctgtgacggagagacagcaggccgggacacgcatcccaggacggatccacagctggatggggaaggctgcgccaggcgggccggaagcctggcggtggcgtgcaggagccccgccctcctgggctggattcagccgggggcggggccgcgggcggggcctgtggcagcgggaatcccgaccccgcccctttccccacccctccatttctcgccatggcccctgcactgctcctgatccctgctgccctcgcctctttcatcctggcctttggcaccggagtggagttcgtgcgctttacctcccttcggccacttcttggagggatcccggagtctggtggtccgggtgagcgggagggatcgaggatgaactgggaggaggaaggtggagccgtaggagagggattgagggcggggcttggaaacaaatgacaggggaagtccaagagagggaactcgaaccttgaaagcggccgagaagctacaggggagggagacctgagttctaaattaggaactcaaggattagagttttggagaggcgggagagtgaggactgagggagccgaaaagggcggtgaccggagtattctaagtaaagtgttttgtagagaggactgttgagaggagagtgttaaaaagaaggagcatttggagaaccgaagtaagaggggcaatccagcgtggcctctccagccatgctttttgcaactgcctaacatgtggtgttctataaatcctcttccccaggtttgcaggaggcctag

SEQ ID NO: 11235 - DNA, 6000 bp, Homo sapiens
tcactgcaacctctgctccctgggttcaagcatttctcttgcctcagcttcccctgtaactgggattacaggcgcccgcaaccacgcctggctattttttttgtatttttagtagagacggggtttcaccatattggtcaggctggtcttgtattcctgacctcgtgatccgcccacttcggcctcccaagttgctgggattacaggcgtgagccactgcgcctggcctggtaattttaaattttctaatagtcatatttaaaactatgaaaagaaacaagtgaaattaattttagcaatatgttttatgtaacagtatatccaagatactgttatttcggcatataatactatataaaagttgagatacttcatattctaattttttatactaagtctttgatatctgatgtgtattgtacacttatagaacatactcatttggaccaaccacatatgaaagactcagtagccctgtgtgcctagtggctgttgtatgagacaatgcaaacagaaatggataagcaagaagctattggggatgcattattggaaggaaggaaatgcagatttaccttgcaattatagttgggttaatattaaaacatttgatcttactgcatgtcagctagcctatgggtaactgaattagaactctgttaaaggaagagaagtccatctagaattataaagttaccatagttaatccacataggaataaagaacaaatgtgaatcatatgcctactctgtcacaaccacttttggaaacaaatatcaggtccttatttctcatagagttaagcagatgctatgagttttcaagagatagttagtaatgtctttctttgcttgtgtttagatacattagaattgtttctcattggcaatgattcttatcctatacctatcgctttgaaaaagaaaggtattgcttggtggacagataaaaatgtgaaattcagaaatccccctggaggagacaacctggaagaacgatttaaaggtaaaacattactaatatcccttaaaaaattaaactaggagttttaatgaagtattttaaattttctatcttcagaatcttaaagttatgctttgaaaaacacaatttttctttcctcagcttcataccaagttaggtaaatgttctaatgtactaaaattctaaaggaaatgtatacttttaattatgaattcagtttctgtgatgtcttataagcatttcagctataatattttaaaattgcagcaaagcttcttttgaataaacccctatttattatccaaatttattcgtttctccgccactttaatttcacaatgtaatattttgtctccttatcccctccccactccttttaaggtacaacaaagcctgtgaactggcttaaaccagtttacatgctggattctgacccagataataatggattcataaatgaggattttattgtttggatgcgtactgcagcattacctacttttcgcaagttgtatcgtcttatagaaaggaaaagtgatttacatccaacattaccagctggccgatactctttgaatgtcacatacagtatccttttttggctgggtatacagattcatagagcttgaaaggagtcgagtccaaccttatatctgttatgtggcatgttaccttgtgctttagttttggtctctgcatttttacaaaagtatgtgtggtatatgtgagaatgtatttttaaatttacgtcttctagaaatgttttgaattcgcatatacttggtactggggtttgaagcatattgtttggtaaaattacttaaaatataggtgcttgttttattaacaagctaggtatttttacaagggagattgtaattgggcttaatgtaaaggccaatgagagtacctaaaattgggtgttgagtggtactgggctgttttaatatatatattttagatattaaaaatcaacggatgtgttaatttgtatcaatgtaattgttcatgattttgatctattggtagtatcaaaacattttattattagctatattgttccatattaataagttcacattcagtgctgataaatacatttattccactctaactatgtgttaacactgtgctgagtattttccgctcattacttaattcaggcagcagcatatctccctattacagaccagaatacaggaatatcgagcacttaagtaacttagctgactttacacaggtaataataaagagttgaggttcataaccaggctgttgactccaaaggccataattttactctcagctaccaacatagcctgcgtcttagctagttcactcagttacaccaacccatatctgcatagatgcagtcttttttaggagggaaatactcagtaatttcttttattctaaccaaagtctttgcatcttttaatctggagtctatattttacatacactgtgagtgaagagatctctcaatattagaattgtaaatgtttgctgatctttgcatttttatttccataatccaaatgagtcataatccatatgggttttggttttaaaatggattagtaaatggttaaattaatagacccaatttcaaaataaggttttttttgaattctactctcttgatgttgcacctgaatacacaagtaaatatggcctgctatggcaggctaaaagtgaccaagtttttgaaactaaatccacattggagcagttttggacagacagacccacttcaagtgctggtagaaataacattatcctgaggggatagtcaaactagagagtagctctgttaaaattagcatccagaaaatctctagagagtaagggcaaatttagcaacctgtagcctaaggcacaatgaagggaagtctgtgaagcactgaggaatttttagttgatagatgatttccatacaggaattctgcagcagggtcccaggtttgaaagaactatctaaaggaatgcatgatatatggcagattgagaagacttgataagacaggaatttggacctgcaaaacatcaagggttaattatcaaaattgggcataaggtgggaactaaagactagaatgatggcagaagcctgtttctttaggtttgggagactagagagagacaagcatgggtaatttgatactgtatcccacagaatgttgggttagctagaggtcttaaaatcattcctgccttagtttagggttaatttaagaagttagcagaactgaacctgccattgggagttagggacccatagggacccatctgtggggatggagagttgaagaaactagagaaacagatggggcctaaccctagattcaaaagatgcttttgaaaaagttgtaaactttttgcatggagacttggttctgtcttctttgctgccttacctcttgcaaaattctacaactggtccatgtagataattcatctagtacactggtgccctgtttcctaaatctccttaacagcccacccttcactgccactgttagctatcagctgtgtcacagagtgagttttgccattgctccaaatcagcaagttaaaacttttttattaccatgctttttgatcttttgctcagagccttttcatagtctcataactacactcttgatacatgtgttctttgagctcatggagacttctagttcctgatttttccattttctcctggtctgtcagtctccttgtgtgggcttcattgttcacttgaagtatttttttcacattgcattcctttgaggccttttgccccttccatgtaatgagagcaaaagcacctgagaaactacataacctttacatttatttgttttggtaaaatattttggcttttactactaacatttagtttgctaaatcagtctttcaagataatactttgtgtgtgtgtgtgtgtgatttagaacgtaggagtgaggtacctgtatatcctagaattacacaaatgaattaccaacaattaaatggcaacttttaaaattgtattttaaacatcaagtaaccagagatggaaaaatcttcctataccctcttcagattaccctgtacattattttgatggacgaaaacggatgatcttgagcactatttcatggatgggaggaaaaaatccatttttggggattgcttacatcgctgttggatccatctccttccttctgggagttgtactgctagtaattaatcataaatatagaaacagtagtaatacagctgacattaccatttaattttatattatgaaagcaaatcatctgcatgtgcatcaaggccagtcctattcaacctagctttcgaatgctgatatctggttagtatgtcattttgaagttggcacataacttttctaaaaaaaagcagtctttgttgtttgcttcttccctacggatgacttctaaaaatatatgacgggtataaaaaaattagctatattgatcatatcaacactgtaactgctgaaatggcattctaatgtttgctttttattcggacaggccacatgatgcatagagcctctttcatgtgacttgtgtctactgcttaaatctttatgctgtgttgatgatattatattgacatatgaagctgtatatgtgtatgtattttgtggagaaagggattacaagatgtatgagtataatgacttgctaacctttcaggattcagagaaagatgaagaaagaccatatctaaataatacacttcatcattttcatgtgtataaatgcttaaagtaccatctttgttgaggtggttcatgtatccagtttatccagtacagttatttgtcaagcttagctttgatttcaaaggacacgcttaccttgtctggcataagaattaatgctcatgtctgcagtggttgggtaggtcctgcttaggagaattaaaaaattcctctttccgtttggttgaatgttgcagtcaggaaccccaactcacttggaatgtttttatatgtaatcatttcccttgaagcttatactttataagggaagaaagaattcaggtgatatgggaaaactgcttggcagaccttcatcttctgcctcaactgtaaaccacatgtaagtgcttaatggagactgttttcattcttgtgatatttaacattcagaaaattacttcagctttggaaatactcaggctgtttttattctgcaggtaagtgttttgacttaagtactaatattccagaaatttttgaaagcagtaaccttaatttcctatgtatttcattccacttttgcatataggtcaaatagcaatgtgtatgcacattctctttagttaaggcaccaattgttttggttggttttcctaagacatactttaaaaagatgttctataaatttcctaattaaattatggggattttggagtatgtacatgataaattataatatgtatatggttgaagttattttattttttactaatgaattattttaatattccttattgaataaatgctgtaacttgtttgctatggaacttattcttaaagttctagttaaaaataatttttccacatgcatgaaaatatgtattaatcagaggtggcttaattacattgaaattgcttttttgttgttgtttttttactgaaataactcatgtttgtgtagaagaatgcctgtttactcagagtttatattttccttcagttatattttaaatcaaaaggtctgggtaatgtatacttttgattaatatatactttttttaaaaaacaaaaaacaatgtaatggttaatagtagaaatgtgccacacttttcaagttttatataacatatgaaattcagttaaaagaatgtgtgtttcataatgacttttaactggtaaaaatattacttgcacgaagtacttgatgtatggttatcctgaaatttcggagtatttggtgtgttctttgtctaaaaatagtctgttttgtcagtccttcagaatattatttattctgaagattgtccctcttg

SEQ ID NO: 11236 - DNA, 6000 bp, Homo sapiens
gatttcccaacattgaccaccagatgggttctggcaaaacccagcaagtacacaaaacagagacaggtggctctggccgccttgttggaggccagattgtgggcaaaacagctctagaactgtgtgtgttcatccatactcccaggaatagctgtgtctgcttatccttgaatgtgatgttgagggcttgcttaagaaagtagtccacaattcctgtgcactgctgtcagctgtcacctgcttcctagcgccttgcatctgctacagcagcttcacctgctcaatcagggccacaactatcttggcgacagcagcagcaatgccaccagccagatggtccttggcaaaggagatcgcctgttgtgtcatggttgcagagcaggaagctgagcacatggagaactgggaggattagtgctgctggctcagccctgtgactgctggacctagaggcctacctcttctattcttgatctgggttaacggcattaccatttacctttctcccaacttagaaagcttgatgttattctcaccttctttctcttgccctccacatacagtcagctgccaaatcttgctgcttctaattttaaaccatcatttgattctgtctctcccaaaccctacgctacttgcttaaaataggccttcatcatatcttctttggactattattgagacaggcctgtaatctgttcccttgataagtttttccccaccatgttctccatactgccactgtatggagagttactgagaagaaagcttatcaagccatttttccgtgtaaaagcttctattggttctataaacccatgaggttcaaactctgttgcttggctacaaagctcttaaccctctggtggcaatctacctctccatcttgtttcctttcctaccttcatgttctccaaacacattctaggtttcttgggcctcatatcctcactatgtctagcatataaccctgaactttcagaagtccatacgtgttttttaaagcaattcctttctctccgctccacccccattcacttgaaaaattcccccatctgttaaaagccaagtttaagcatcacctcctccgtgaaactttcccagattttcccaggctactggatgttctgttccttttgctccgagaacactttataattgctataaactttacagtgtagtccttttctatttacatatttgtagctcatagtagactgtaagcttctgattattagtgtactagatagaagttgtttgataaatactggtgaataaatgcaatgttgttttcttcccaggatgttttggggaccagtctctttcttcctactatagtcttaaaatacaatcaactcaaatttatattttaatagcctctaagctgaccatctagaaccacactattcaataatgtatccactagtcacatgtggctgctgaacatttgaaattcatctactccaggctgggcgcagtgcctcacacctgtaatcccagcactttgggaggccaaggtgggaggatagcttgaggctaggagttcaagaccatgctggcccacatagtgagaccccatggaccagcagggtctcgaactcctaggctcaattttttgataatttctttattaaaaaataaattcagccactccaaaatgaaatgagctgtgttatacagcattttgaagagaatatgaaaacaagaatggaaagaaaatatgccatgttttatattacatctcaaaaatattttggatacattgagttaaatcaaatgtattagtaaaatgtattttatgtttctttttctgtttttaaatgtggctactgcattatttaaagttatacgtgtggcacgcaagtatttgtactggacattgctgtgacccttcaatccatcctgaaggttgttttttggtggtaaacctgtattctgtttttctgagtcctcacagtgctgaacagaatttttgtagggaggagaggtactcaaaaaatggtgtttgtttactggttactgcaggactaactttcccaaaagatcctttttattatgctattatcctacttgaagaatctacaggttttctttttctttttttggggggggggtgggtggggaaggagttttgctcttgttgcccaggctggagtgcaatggcctgatctccgctcactgcaacctctgcctcccgggttcaagcgattctcctgcctcagtctcctgagtagctgggattaaacaggcatgcgccactacacccggctaattttgtattatcagtagagacagggtttctccatgttggtcaggatggtctcgaactccccacctcaggtgatccgcctgcctcggcctcccaaagtgctgggattacaggcgtgagccactgtgcctggcaaaaatctacaggttttctactgtcaatttgcatcaaggccagactactttgtctggcttcccaagtcttccataaccctatcatagtttacttatgcagccttatctcaaaagtagtaccttttgttccagtctgttttccaaggtacttcaggtcttcatgcttttgtgcaagctgctctttcttaatatctccctccccagtccccatctaaatccagcgtatcttcaggacaaggctcgtaagttctacctcccacataatgtttttttctgttcattggaactcaccaatatctccctagtagttatttgtcagagctatgtagtataagctctaatttgtttaattactgagcatcttcattgccatatccattcaatttaattccagaaacatttttgagcccctgtgccaagaacagggctaggtagcaatgagggtcacttttatgcagggacaggggctagaaattggccttactaagaagtgtaagaccgactcttgctcattgcctttcttagcatctgcttcatcgcaggcaaggactgtgtttatttggcttgcataagccccatattagaacttcctcataatatacaacatgccaaatcatcgaaactgcgtcacccggagttcaaacttcatgagcctggattagggtctgggttccaatgaaaagtgttttctttagttctctttctcttgcattaaggatcactatttacacagcttcttgttaaagtatcaccgcctagtacttgggttcctggtcacactttcccccttatggaagggcttactgccaggtctttcagactctggagccagactgctttggatttaaatctcaactcctccactagtagttctgtaatctggtcaggttacttaactcctctatgcctcactttcctcccctgtgtaatgaggataacaatatcataaggttggggaaagggttaaatgagctaacagttcgtttaacagagtaatcactcaatgaaatgttatcccctaatacatgtcactactagattatttctcgcccttaaaatgtaagagaccgtttttcctcttttcttccatccgtgtctccagcttctaaactgcaggcgaataaacctcgaatgagtaaatgaacccacccagtcgctagttatttctgcatttccaatgttgtgccagcaagagcaaaggcaaatgggcaagtcaaagtaggcttcttgtaaaaggtcttccattactgggttttactagaggcccttgcggaccatcacatctcaaaaggggggaaagctcgtatgaggcagtgccagctacctttcgggaatcaccttgggcagaaggcctttttgcaaaaagactcggcagcccgggccccgtaggttcggcgcatgcgcagcgcgctcggcgcccgggttccttcctccgcgccacccggaagcctcggcgcgacccagtccccctccccctcccctcgccggctagggtggtgcgtgccggcaggccggtcaaggaggcgggacacgtcggcgctaccaccgccaccgccgccgccgcccctcctcccgttccagctgccgctgccgcttcctgggctgagtccgcccgcggtcccggcggcgccaggtgcgttcactctgcccggctccagccagcgtccgccgccgccgtagctgccccaggctccccgccccgctgccgagatggcgacgcgctcctgtcgggagaaggctcagaagctgaacgagcagcaccagctcatcctatccaagcttctgagggaggaggacaacaagtactgcgccgactgcgaggccaaaggtagcttggacgtcgtcgctgcccacggtcggggcctcttgcgaccggtgaccttcccgccgctgcggcgctcggggcccgagcggacgcctcggcttcgctggccggctcctgccctgactggagggcgggtggctgagcgggcgggcgcggggctcctgtcgaccctcaagtccgccagaggcggcggcgaggtcaggcccgcaggccctgtcagtggccccagcctcccctcctcccagacacgggtttgagcaggtgccagggtagcgatgctcggaccctccacagggctgggggtaggagcgaggctgggagcgcggaaccgggcacgggtctgggcagagcttagggttagagagttgccctcctagctctgctcatagctatctctgtgggtggggccgcgcttaggtctggatcccctcctctaccctccggtgtgaccacgtcctcccactccgggctcggattcttggtctcctagatggagccctacctgcctgcccacctgacagcttttgtacaaggcttttatctctgcttcctgaaaaagagtatggtggtctttttcggtgggtttgagttttacggaataaattaattggagaaaggtctttattagtagtagtattgttttttagtctggttattagccagaatgaagaggaatttcattacatgagtctcttggaggacggtgggtttgtatttctgaagattttagtaattaggttttctctgaccagctagtttgggagaatatgtggacactgatttgtgtacctcataaatgctgaaggttcattttaaagatctagagatggaaaaaacctaattttagttttttcggttggagggcttctgcctcagcctttgaaacagatatactatttttagctgctatgttttgtgtttggagatctgatttatgtttaatgtcttgtaagtaatctcaagggaaatatttcttttttttttaaagaaatgtcttgtgtagttaagaaaagatcgtgtatatttttaattggtttatttcgttattgggtgagaaatagggtagttctctaaagcaggagacagtctctttggggaatgtcctttaagatttctgtgttatttgacttagacttttcctgaagctttactgttctatctcaatactatataaatgagtcacatttcagtaggctgataatatttgactagactgagccacacagcatcagcaggttacttcactgtcgtaacaggtactgaattactagaagaatcatgcgggaatactgtaactagattatttttatgaagcacttttcaatatagtaacttgattgagtcaagattatatttatcctatgtaaccttttcaggtgatgagtttttacaaagtccgtgcctggttcttgtaatacttgttttcctagtaacttgattgtgtgtggttatttgggagttctgcactgtgtttaggctcagttgcttgctcattgactgcactagcaaaacactgaaaaatggtcctttaaaaggccaagaagaagaaagaagctgaagctaaatagtacacattttgtcattttgagtaataacatggttaagtagagatgctggtaaatattaaatctgttcattaaaagtcgaatagtaacagtttcagaattaaccttccttcatctacagactttattaaaaataatttaatttttgttcaaatttctgtctccaaaaaagtactttataaaatcagattttcactaatgctttct

SEQ ID NO: 11237 - DNA, 6000 bp, Homo sapiens
ggaagaacgatttaaaggtaaaacattactaatatcccttaaaaaattaaactaggagttttaatgaagtattttaaattttctatcttcagaatcttaaagttatgctttgaaaaacacaatttttctttcctcagcttcataccaagttaggtaaatgttctaatgtactaaaattctaaaggaaatgtatacttttaattatgaattcagtttctgtgatgtcttataagcatttcagctataatattttaaaattgcagcaaagcttcttttgaataaacccctatttattatccaaatttattcgtttctccgccactttaatttcacaatgtaatattttgtctccttatcccctccccactccttttaaggtacaacaaagcctgtgaactggcttaaaccagtttacatgctggattctgacccagataataatggattcataaatgaggattttattgtttggatgcgtactgcagcattacctacttttcgcaagttgtatcgtcttatagaaaggaaaagtgatttacatccaacattaccagctggccgatactctttgaatgtcacatacagtatccttttttggctgggtatacagattcatagagcttgaaaggagtcgagtccaaccttatatctgttatgtggcatgttaccttgtgctttagttttggtctctgcatttttacaaaagtatgtgtggtatatgtgagaatgtatttttaaatttacgtcttctagaaatgttttgaattcgcatatacttggtactggggtttgaagcatattgtttggtaaaattacttaaaatataggtgcttgttttattaacaagctaggtatttttacaagggagattgtaattgggcttaatgtaaaggccaatgagagtacctaaaattgggtgttgagtggtactgggctgttttaatatatatattttagatattaaaaatcaacggatgtgttaatttgtatcaatgtaattgttcatgattttgatctattggtagtatcaaaacattttattattagctatattgttccatattaataagttcacattcagtgctgataaatacatttattccactctaactatgtgttaacactgtgctgagtattttccgctcattacttaattcaggcagcagcatatctccctattacagaccagaatacaggaatatcgagcacttaagtaacttagctgactttacacaggtaataataaagagttgaggttcataaccaggctgttgactccaaaggccataattttactctcagctaccaacatagcctgcgtcttagctagttcactcagttacaccaacccatatctgcatagatgcagtcttttttaggagggaaatactcagtaatttcttttattctaaccaaagtctttgcatcttttaatctggagtctatattttacatacactgtgagtgaagagatctctcaatattagaattgtaaatgtttgctgatctttgcatttttatttccataatccaaatgagtcataatccatatgggttttggttttaaaatggattagtaaatggttaaattaatagacccaatttcaaaataaggttttttttgaattctactctcttgatgttgcacctgaatacacaagtaaatatggcctgctatggcaggctaaaagtgaccaagtttttgaaactaaatccacattggagcagttttggacagacagacccacttcaagtgctggtagaaataacattatcctgaggggatagtcaaactagagagtagctctgttaaaattagcatccagaaaatctctagagagtaagggcaaatttagcaacctgtagcctaaggcacaatgaagggaagtctgtgaagcactgaggaatttttagttgatagatgatttccatacaggaattctgcagcagggtcccaggtttgaaagaactatctaaaggaatgcatgatatatggcagattgagaagacttgataagacaggaatttggacctgcaaaacatcaagggttaattatcaaaattgggcataaggtgggaactaaagactagaatgatggcagaagcctgtttctttaggtttgggagactagagagagacaagcatgggtaatttgatactgtatcccacagaatgttgggttagctagaggtcttaaaatcattcctgccttagtttagggttaatttaagaagttagcagaactgaacctgccattgggagttagggacccatagggacccatctgtggggatggagagttgaagaaactagagaaacagatggggcctaaccctagattcaaaagatgcttttgaaaaagttgtaaactttttgcatggagacttggttctgtcttctttgctgccttacctcttgcaaaattctacaactggtccatgtagataattcatctagtacactggtgccctgtttcctaaatctccttaacagcccacccttcactgccactgttagctatcagctgtgtcacagagtgagttttgccattgctccaaatcagcaagttaaaacttttttattaccatgctttttgatcttttgctcagagccttttcatagtctcataactacactcttgatacatgtgttctttgagctcatggagacttctagttcctgatttttccattttctcctggtctgtcagtctccttgtgtgggcttcattgttcacttgaagtatttttttcacattgcattcctttgaggccttttgccccttccatgtaatgagagcaaaagcacctgagaaactacataacctttacatttatttgttttggtaaaatattttggcttttactactaacatttagtttgctaaatcagtctttcaagataatactttgtgtgtgtgtgtgtgtgatttagaacgtaggagtgaggtacctgtatatcctagaattacacaaatgaattaccaacaattaaatggcaacttttaaaattgtattttaaacatcaagtaaccagagatggaaaaatcttcctataccctcttcagattaccctgtacattattttgatggacgaaaacggatgatcttgagcactatttcatggatgggaggaaaaaatccatttttggggattgcttacatcgctgttggatccatctccttccttctgggagttgtactgctagtaattaatcataaatatagaaacagtagtaatacagctgacattaccatttaattttatattatgaaagcaaatcatctgcatgtgcatcaaggccagtcctattcaacctagctttcgaatgctgatatctggttagtatgtcattttgaagttggcacataacttttctaaaaaaaagcagtctttgttgtttgcttcttccctacggatgacttctaaaaatatatgacgggtataaaaaaattagctatattgatcatatcaacactgtaactgctgaaatggcattctaatgtttgctttttattcggacaggccacatgatgcatagagcctctttcatgtgacttgtgtctactgcttaaatctttatgctgtgttgatgatattatattgacatatgaagctgtatatgtgtatgtattttgtggagaaagggattacaagatgtatgagtataatgacttgctaacctttcaggattcagagaaagatgaagaaagaccatatctaaataatacacttcatcattttcatgtgtataaatgcttaaagtaccatctttgttgaggtggttcatgtatccagtttatccagtacagttatttgtcaagcttagctttgatttcaaaggacacgcttaccttgtctggcataagaattaatgctcatgtctgcagtggttgggtaggtcctgcttaggagaattaaaaaattcctctttccgtttggttgaatgttgcagtcaggaaccccaactcacttggaatgtttttatatgtaatcatttcccttgaagcttatactttataagggaagaaagaattcaggtgatatgggaaaactgcttggcagaccttcatcttctgcctcaactgtaaaccacatgtaagtgcttaatggagactgttttcattcttgtgatatttaacattcagaaaattacttcagctttggaaatactcaggctgtttttattctgcaggtaagtgttttgacttaagtactaatattccagaaatttttgaaagcagtaaccttaatttcctatgtatttcattccacttttgcatataggtcaaatagcaatgtgtatgcacattctctttagttaaggcaccaattgttttggttggttttcctaagacatactttaaaaagatgttctataaatttcctaattaaattatggggattttggagtatgtacatgataaattataatatgtatatggttgaagttattttattttttactaatgaattattttaatattccttattgaataaatgctgtaacttgtttgctatggaacttattcttaaagttctagttaaaaataatttttccacatgcatgaaaatatgtattaatcagaggtggcttaattacattgaaattgcttttttgttgttgtttttttactgaaataactcatgtttgtgtagaagaatgcctgtttactcagagtttatattttccttcagttatattttaaatcaaaaggtctgggtaatgtatacttttgattaatatatactttttttaaaaaacaaaaaacaatgtaatggttaatagtagaaatgtgccacacttttcaagttttatataacatatgaaattcagttaaaagaatgtgtgtttcataatgacttttaactggtaaaaatattacttgcacgaagtacttgatgtatggttatcctgaaatttcggagtatttggtgtgttctttgtctaaaaatagtctgttttgtcagtccttcagaatattatttattctgaagattgtccctcttgcacttggcagtttattttcggggatacattgttgggggagaggggtttctgccactctttccagattgagtctgtgctgtttaaggaggactaccatcctgcaactctttttctaactggggcacagaggatgtcgctaaagaaaagttgaagagccctttcagcactttctcatctgtggagaagatggaatcttaaaatacatttggagttttatctgttttacaagtccattgatggcctaagttcctcctgttttctgctgtttgatctctaaggaactcctgttgctaaatatgaagagtatggaacattcgtatagtctctgtgaagcatggggggagggaagacatttctttttcttataggctttatgctcaaatgtcatagtctcctttcaaagaattgtgttgcattttaaatgcacccagcttaagtagaagacattgaaggatgcattaattttcaggaactattttgaattatgaaaagattcccaattgaaaaaattattcaacaagtaaaagctaagaaatttcattgaaatcataaggcagtttaagcataaattgataaaaatagctgtgtactactaattaatagaaaatcattcaaccaagagaagagtcaagtgaatatcgtttgtttatttgctagtgagtttctttgtaacgttgattttattaaatgataatatttggttagtatgtcctatgttaataaaaatgaacaaaattaattttgctatgttcaggtgtcttgataaaataacaatgctccagtgttgttgcttacatttagcactaaattttaacacagcgtcagtgagtccaggttttaacttcttcatgcctggatgggataaaatgtaattcattgttaaattaattcatatttgtatttattaatcactgtgacaacattaaccatttgttcttaccaggaagtggtcagattatcatctgagttacagttagactggctaagt

SEQ ID NO: 11238 - DNA, 6000 bp, Homo sapiens
aggtcttgctctgttgcctgggcttcattgcagtggtacagtcgtagcgcactgcaaactcaaaactcctaggctcaagcaacccttccacctcagcctcttgagtaactaggactataggtgcatgccaccaggactggccaatttttaaatttttgctagagatgggggtctcgcttggttgcccaggctgctcttgacctcctggcctcaagcagtcctcttgccatgtcctcccagagtgttgggattacaagcattgttagccaccgcacctggcctttttttaaaaaaaatagagatggggccttgccgttgcccaggctagagtgcagtggcaatgttcatagctcactgtagcctcaaactcctgggctcaagtgatcttcttgcctcggcctcccgagtagctgggattacaggcgcaagccactgtgtctggcttaattgtatttcataataaaactattaataatgactaacattttttgagagtatactctgctaagagttttacatacatcatgttagttgatacagtgacacttaacaagggtaacattattctctccattttttttttttttttttttttggatgaggacattgaatctgagattaagtcttctgcttagtcacaaaggtgggattcatactttagccatctgacctcttgtttagtttcctgtagtttcctgtattctctttccacacaatctgtttaaaaagaagggtccgtgcttattgccaatgtccattcccatctccctttaactccttaatttgctgcatttgaagtatgttaaatggtaaaaaatcctatgaagaagaatgaaggaagggttgatggtttataattttaaatagggtagccaggggaagcctcagtaaaatggcatttgaataaagaaccaaaagagggaagagagtgaaccatattgatatgtgagggaagaatgttccaggcagaagaaatagtaagagcataggtcctgaggaatgtgcttagttaggtgtttgaggaacaacaaagaggccaatatggctgaagtagagggggaagaatggtagaagatgagggtattgggaagtattaggaggaatatcacatgaagcactataagaactttggcttctccgctcagtttagtgagaagctattgaaaagttttgcacagataggtgttattatttcacttatgtttaaaaagaatcactctggccttgacatggagaatattgcctggtaaataagagtaaagcagggtatttctgacaggaaaaagccaaagcatatttcctagtctcgcacaccactcaacacttctgacaccacatgtgtggaaatttttccctacacaccatccagttctgacaccagattctccagcacacagcaattgggtgtcctataatttcgttaaattctggcactatctactaggagatagtatcagatcccacagggtaggggctcagtcccacaagactgcctctcactttagatgccaattgtaagtcccaggctgcgacctgtacttctggccaaattgctataaactggtgtttccatgacgccctccttgagtttgctttatttgctagagcggctcatagaactcaggtaaacactttatttacgtttacccgtttattataaaggatattacacaggatacagatgaaaaaccagatggaagagatgtaaaaggagatgtttggagaaggggttcagagcttccatgtgctcactggggtgccacacttcaggcacttccatgtgttcagctatctggaagctctctgaaccctgtctttttgagttttcatgaaggcttcattatgtacacatgattgactcaataattgaccgttggtgatcagctcagtcttcagtcactctgcctcctgggactcaaccttcagtccctttccccttcccacaggtctattcatgccttggtctttctagtgaccagcttccatcctgaagctatttagggggcaccaaccaccaattgtatcattagcatatgaaagacactcatcactcagagactgtaagagttttttttaggagctctgtaccaggaaactgggagcaaagattaaatatgtatttcttactgtaaatcacaatatcacacagggaaaccagttaagaggctattgcaagtaattcaagcaggagatgatggtggtcacagtagaatggttgcagtgaaaagcagttagatatagaatatatttatgaaagtagagctaaaagaattttctcatgcaattgatatatggggtgtaagagaaaagtgaagaatcaaagatgactaagatattttgatttgtagctggaaggatggagttgtcatttttcaagatggggaagattgtaggaaaatgaggttttaagtatgctagtaagaggatgtggtgggggaagcagaataaatagttcaatatttgacttgttaggatgagatgccattagacatccaagttgggaataatgagtaggcaaacaaatatagagttcaaggggaaggttgagactagagttacatattttgagggttaatcagcatagatgatgtataaaggcctaattagcatagatggtgtataaaggcctaagataggatgaaatcataagagtgatttataggtcaaagaaaagtaagaagatccctgagtcactccagtgtttagaggctggggagctaaggaggaactagcaaaggagactgaaaaggagcagccagtgaggtaggacaaaaacatggaaactggtaccctggaatcaaaggaagagcttgtaaacaacatgccaaatgttgttgctcatggttcacagaagagcaggactgagaactgactttttttttttttttttgagacagagtctcgatctgtcacccaggctggagtgcagtggcacgatcttggcttactgcaagctccgcctcccaggttcatgccgttctcctgcctcagcctcctgagtagctgggactacaggcgcccgccaccaggcctggctaattttttgtatttttagtagagacggggtttcaccgtggtctcgatctcctgacctcatgatccgctcgccttggcctcccaaagtgctgggattacaggtgtgagccaccgcgcccggcctgagaactgacttttgatttagtgacatgaaaagcagtggtaaaccttacagagagtggcatcaccatccatagggtttttcatgccagaaaccctggaaatcaacctaagtgtatttgccctcatcccatctctaggcactaagttctgtagattctaccttctctttcttttgtgaatctgtcttttgtattcctgctgccactttattagtttaagttctcaacatttttcacctggattattgtggtggcattctgtctggcattctctttaatctctctgcacattggtgccacagtgattctttttgagaggctagttttaatgtttccttcttttatttaaaatttctcttatggctgtttctgtctagcattcaggatactgttcaaacccctttacatagagtgtaattttcttcatgataggctactttctgcttttctagccacatctcctaccactcccctaccttatgctctagtcatggcaaactactatagtttctggaatgtgacatgctaatagtttacctgaaatgaccttccttttcttattctatcacattttcacatgcagttcctattaacatggaaagtcttccttgattctcctttttccacctggtatatatgcttctctcagtttccagaagtactagcttacagcctgccttaaaattatattatcctgtaattattcataaatgtgactttctatcccacttgtctgtaaattcttttgtagcatgaacaatgtatttttccattttgtattctcatcctgtagacagtgcctagcacctaatagggactcaggtttgaatgagtgaatgaaactcagtcagtaccatcaagacatcttaacacagtttgttgagagttttttggtcatctgaatggtattatgggtctgaaggagttcttgaaattacccaaggaaaatattatatactataaatcaaacttgtataactgtgatatccatccatatctaaaggcaaaacaaatttgcctattgaagagtaatctagagagtgctgaaaatttaacaaacaggttatttggcaaatgctgcagcaaagagagacaaatatcaaaactatatcatgttccaagcccccagtcagggatgtagtctctctttgtactctctccctgtagataacatctactcggcagctttcatggagaaatttgctgactactagactagcttgtattgccataccacctatactttttttttttttttaataaaaatatccattctattttaatgttgttttctgtgttagatactgaactccaggaggtcaggtgctaggctgaatcctcattgctgggaccatagaggcattcataaatgttaggtgaatgaatgattacgtcatgatgggcagtcagaaagaaatgaaagtcctatttcctatctgtttatatgcaaatatttgattatgttgttctcctcaaaactcttcagttccttatttcctgccggacattttaacactcggttacttagcttgctgaggctttattgtcagcagcagtaaccagctctggctagcttagacaggaaagaaagtattaaaggaggattgggtaactctcacacaaaatggatgggacgtacagagagtcaggtttggagacaagtgggaagtaagggagttttgaaagtataaacagtctgatccagatgccacagctgctgttgaatttctcttgctagactactactgtgactgctcatttaatcacatccactctttgtttcccaggattcactggtctatgtgggagtgtctgattgctgagtctagctcttgtacctttacactggctaccatgggtttatggagaggaagaacccatctctccctttggtttctgaagtgggaggtggagccctgcatccttccaaaactcacaatggacagttccacaaaacttggaaacaattccagcaattgccagggtaattgtatttttaaaatgagatgatgtgtgttagataatcagtgccatgaagaaaagtcagcatagagacagaggacctctcagaaacgcagtctttactttctgcagaaagggcgctccttgaagatggaacaatggtgagagcacacttgaacaaaggaaaagcaacatatttatcccttatgcatttggatcatccttactgtcgtatcctgcatccattggctggagctggacctcacagttttaaactgatacccgatttgctaataacctaaaactttcctaaataggtaagtgcaagggagaacaaagaaggagaggaagttgcttatgaaaggtttaaggaagcaataacatttccaaataaggaaggggcataagctatgagctaggacttgcttgggcttgtccaggcatgcctgagtaagccgaagcaactaactgggctaaagtgtaagaactaatagttgataggaggctttagagtaagaagttattatttctagtgtctattgttttatttttaaaccaagatgagctttgaagaggagcttttctactttctacatgtgtattaagtacttacaatgcccagcacttagtatacattcaataaacagtagtcagtgaaatacagtatatagttttgggtccagtttaccttcttagctgcctcatttccttccaacatgaaaactccataaatacaaaatgtgtatgctattgtccttaaatataccttgtgatttccacctctgtcttctccatatgccacctctttctctcttttccatctttcttttatggctctgttcaaatctttgctgcttctcagtaagaaagaagtgttggt

SEQ ID NO: 11239 - DNA, 6000 bp, Homo sapiens
atgtagtcaggaagaggaaatatatggcatgttggaatcaagtgatatatgtagttaatcaaaatttgctcatattagttaatttagtcttaaatattactttattcccaatagagagagaacacagtaagttaatgagaatacaatgatttacatccttaaatatctttccgttgtgtggcccttctttccctaaaatacaagcaaacaggcaataaataaataaataaataataaataaacccaatagcttcattttctttatttttttctttagagatggggtctcactctgttacctaggctggactgcagtggtgagatcatagctcgctgcagccttagactcctgggctcaagtgatcctcctgcctcagcctccctagtagctgggactacaggtgcacaccactaagctcaactaattttttcatttctttgtagagaaggggtctcgttatgttgcccaggctggtttcaatctcctggcctcaagtgatcctcctgccttggcttcccaaagtgctgagattatgggtgtgagccacatgcctgaccaggaatacactttaaaataataaagtatggtagcaacaggaaatggcaaggagtgcctgttaaaaaaaaaaaaaaggtatagtaaatacataaaccagaaacagccacttatcattatgaagtattctgtactgtacataattgtacatactccacttttacacaaatggcaacacagtaggtttgtttataccagcatcaccacaaacacgtgagtaatgtgttgcaataagaccttaggacaaagacagtatcaccaggcaatacgaatttttcagctctttatgggaccaccattgtatattgggcccattgttgattgaaacattgttatgctgtgcatgagtgtgataatttgttttaatagacatcacagcagatacctcattttgttttggtaaggtggaataactacataaaatttcgtaacttcttgtacttgtcatctttaaacattcttttggccagaattgtattagtaccttctgaagaatgtatgatggctctttttcaatctaggttgggtttagactaaattgtatttcacttttaattagtggatactccttatctattagagatgggtcagcagcctatttgctaatttataattggcagctggttacatatatatatatacatatatatatatatttgttgttttaattttttaatttttttgatatggagtctcactctgtggcccaggctggagtgcagtggcatgatctcagttcactgcaacctccacctccatggttcaagcgattctcctgcctcagcttcccgagtggctgggactacaggtgagcaccaccacgcccagctaatttttttttttttttttttaagtggagacaggtttcaccatgttggccaggctggtctcgaactcctgacctccagtgatccacccgccttggcctcccagagtgctgggattacaggtgtgagccactgtgctcggccactttctactatattatatggggaacaaaataaagaagtttcttggcagaggaggactattgtagcaacaagcttttcatgaattgcagtgtctcccaatatgccatttatttggctgaaaaaactaggtccaggttgaatgcagatttcctcctgtctctttattccttctctgctctcaagcctggcacggcttccaatgactcaatcacatgaatgtgagattaatgcattatagttccctcaaatactattttacttccaagaaataaaataattgtggaaatgggtaaaaagttgagagcatgggtaaaaggaatgtggattttcccatatctcctcaagttctaccaatcttctatttctgaagcattgtctacatttggcccaattctttcgcgtctctcttcctttcaaaggttggctgtgaagggtgtccagcacatcaaagaatagcctccaagaaaggggtgagctttgattccagtcagtcctctgttctgtggtggaaactctgggtctcatagagtgaagagggcagatgggatgtggctatggtttaatctcctctacgtataacccaattaaagattcaggtacagatcttccctatgagttagcttatcgtgaattactttacttggctgtcaaatatctagctatggatttgtggaagaataggatttctgcataggaggaagatagcacctgagggaaacaactgtctttaagaaagatgaagtgcttcaggaggaagagggggcatacctggagaatttagtgggaagttagtggtgggaggaggcatgaagctaggatgagacagcggaaaatagattaattttgtttatcatatttggcaacttgtcttgatcttgatggttatggtcagaggtgccactgaaagccattgatgtgtacacctatgcttggtatagcatagtttctttaggcgctgaaaggtacaagttcaaaggtactagaagactggctttacaatttcacttgtatgatttaaacaatgaacctgaattgtgcagtttgattgtggagatagtataaatgtcttggaactaattatttatatctgattgatggttgatattggatgctttctatctaagcagttactatgaactagatatacattaatcctttcaccagaccactaccctgtgaggtcaatattcgctctatttgctgatgaaaaaaacgaagcttagaaacaggatcagtgggctgggcgcggtggctcacgcctgtaatcccagcactttgggaggccgtgggcagatcacctgagattgagagttcgagaccagcctgaccaacatggagaaaccccatctctagtaaaaatacaaaattagccggccgtcgtggcacatgcctgtaatcccagctactcgggaggctgaggcaggagaatcgcttgaacccaggaggtggaggttgctgagattgcgccattgcactccagcctgggcaaaacaagaggaaaaaacttcgtctcaaaaaaaaaaaaaaaagaaagaaacaggatcagtaacttccccaaggctacacagctagtaagtgggagatttatagtaaataggctgggcgtggcggctcacacgggtaatcccagcactttgggaggccaaggcgggtggatcacttgaggtcaggagttcaaggccagcctggccaacatggcgaaaccccatctctactaaaaatacacaaatcagctgggcgtggtggtgcacgcctgtagtcccagctacttaggaagccgaggcaggagaatagcttgaacctgggaggcaaagggtgcagtgagccaagatcgcgccactgcactccagcctgggcgacagggcaagactctgtctctcagaaaaaaagaaagaaagaaagaaagaaaaaaaaagatttatagtaagtctaagatttttcacaacatatttttcctccctaatcatttggctatttgtctttagctcttacagaaaagttgggttatagtcctggctttgattacccatctcagtgtcattgattgtgccacctaaatttctctggacatcttgtctggttggttgaatgagagggttggactatgtgatcaccaggacctttctaatcgtcaactcctagaatatacattttgtggattcagtctttgagtctagctcacttactcagtttcctaaatatttggagcaaatatagtatacttttattgttaaggatatatcacttacccctaatgttagctgactgcatgggttataattgtaatcattcatcgcatttttcgtctattagcaaatatacatgctctccatagatgatcacgtctgctcctcacaacagctttataaggtggattttaaagctcccattttatggaggaggaagctaaggctcagacggttttgattcatccaaggtcaaataggttgggtggcagaaccagaattccagccccgtgtgtctgcaacaaaacctttatatgtttaaagaaacattaatgaagccgtatatattttctaattctaaggatcatggactttatttttcaaccacagatttttttttcctccttcttaaatcattagctcttgtctttgattttactgtctgcttacttcctgcctacttaaccaaccgacagggagaaggagaatgggaagaggttactgtttttatgttaagtgtcttttcaaagtctaatttacagccaagaacagcaaaagtaccccttggctttgtgcctctgcggcgccccggagatctccttccccgtccctcttcctttccgagaagccgcgttccgttgttgaactacgtttcccagcgtgccgcgcggccgagagcgtggactcgaccagcccttcctctttgcctatcagctcgtcgcagcatgatgatgcaaatgcgtcgggcgccgatgagtgacgacattctggctcgcgaccgcggcagccgccttagcaggggtaataggcgcaacggcggcggaggctgcagggacgacgacgacgacggcggcggggcgggcgctgtgcgcacaggggaggggtaggcgggcgtcgccagcggcttcaactgcggcagctacggctagggcgacggaagaactcccaccagtcggcggtcgagttaggcctcagcaccgcggggaactgttcgtgctgtcctctgcgggagatctccatagagaccgtgacacacacagaggcgggggtccgcagaggcggccggaccggagcctcctcggcctctgcggccgccacccccttccccgctgccagcactcaccctctctccgctcctgctcgcaacctcgcggttcctggggtgcttgtgcccactgtgtggacagcgcgggcggacttttgggccggggccgggcggcgggggaggctctctaaggcctccgcctctgcctctcccgcccccttacccgccccggagcgggaagcggcggaggctccgccatggcctcgggagccggaggagtcggagggggcggtggcggcaagatccggacgcggcgttgccaccaggggccaattaagccttaccagcaggggcgacaacagcatcaggtatgggaccccgacgccgcggtggcctggcgggtggggaaactcggctggaggggacgggcggttcgaggccccggcgccccacgtggagcagacaggagggcctgaggaaaggcccgagtgaggctccgggggagctcaggccgttgggggtggcgacgggaagtgggctgagacaggcccagccttgcggcgcacacgtgtggtttgggccgcctttcccccaactctctgggtcaggggctttcccaggcaggctctgggcgggaaaagaaattgtaggcccatgatgcgcgcgtttctttattttttggcggggatttggaatttgagggtattactcatgttctctcgagggagaaaggaaaagatgtggttgatggcccttatacttgctgttttctggtgtcccttctttagtgtgtttgaggagggggggctgccccttggaatcttaactctggggcagacggggagttgtggggggcgctgttacatggaaagtggaataacttagtctcagcctatgagttaattctcggtttcccctgcctgtggccctcctcgtcttgagagcattggcttagattttattaaccaggttatagttaaccgtggcactggggcattttgaaagtccctctccacccttacgtcttttctctgctgcgcgactcccctccccccccccaacaccgccacccccgcctttattttggaggctggaattggccattctccacagttgaccgggactccagctctgatctcatacacaaaatattttaatattatgaggcgtattctagaagtatagttacttttgacactccaggaatgttggtggtcttatagtttagccactgtatgaact

SEQ ID NO: 11240 - DNA, 6000 bp, Homo sapiens
ttgagtccaggagttcgaaaccagtctgggcaagaatggtggaacctcatctctacaaaaaaatacaaaaattagctgggggtagtggcgtacacctgtagtcccagctactggggatgctgaggtgggaggatcacttgcgcctgggaggttgaggccacagtgagctgacagctaaccctgattgcctccatagactgtgccactgcatgccatctgggctgacaagagtgagaccctgtttaaaaaaaaaaaaaaaaaggaaagaaaaagtaaaaagagatagggtttggattcaggttggcctggatgcaaattggtgcaaattacataatctctctgaactttcatttctgtctgcatctgtaaataaggataatgatgaagatttggggcagattaaataagaatatgcatgcctagtatttagcacagtgcgtggcacacggaaagccctcgataaatgttagcaattaatgtagaagaggaaaaagaaccacaaagtatttaaacatttgcatttgttagtagctcgaggaaatggtggctcatcattgttaatagagcctgcttaggattgaggctgaaggggggaagggtgggagtggggataggataggggagtggctctacctggattggagaaaggagttctggacataaagatttaaattggtgtccgaggagttctcacaaggcctcagctggaaaacagttaaatgcatcttctgaccactaacccaggttgcctccagagaaggaaaaccaagtgggtggcagacagggtgggagggagacttcttgctgtttatttgaatttggaaccatgtgaatgcattcaacctattccaaaagaataaattacattaaaaaatggtcttttgctatggggataagtgctgagaatggtaagactaggatctaatgataataataataataattccattatactttgtgcagccctaggagggcttcagtcatgcaggacaggttttgaactaagattgggactttttcagcctgactctgatttcaaagatccaagctaatattttaatttcagtcaccctccttctgaccctgattgtagaaagattccagacccagcgctcatggacttggtttattcaacctgtggattgccttcaagagtatgcattgttgggagtcaagtctattggtaaaatcagggatgcattgtctgtgcatctgccggtgtttcccagtccttttggtgctctctttctctctctctctctccctctctctatatatataattttattttttgagacagagtcttgcgctgtcacccaggctggagtgcagtggggcaatctgctcactgcagcctcaaccccgtgggctcaagccatcctcctgccttagcctcctcagtagctgggactacaggcatgcaccactatgcctggctaattttttattttttaataataaacgtggagagggtctctctacattgtccaggctggtctcaaactcctcagctcaagcgatccgcctacctcatccgcccaaagcgctgggatgacaggtgtgagccaccccgcctggccccatagatatttttctgatgcttcaatcagctaagactctgaggatctgattttctagagtcctttggaaggtggggggggggcggggcgggggaggatacacaaccctattcacaaatattagtaacttgctttaaactctaaggccttacataaaataactcatttaaacctcacaataacactatgatatgaatactatcattcccattttacaggcaaagaaactgaaccaagcggttaagtaatttgcctaaggtcagagcctgcagagctaaccatctggcattaccatcactctgttggcaatgaacagagcgggccaagcgtgtagggtgtagggggtcctttgaagatgacaaaagcgtccttggctgtgtagccgcaaatcccaaatccttccttctctgcagcttctggtttaggagctggaaagacaggctgtgaatttccacattgacctggggcaattaacttaactctccgaataggttccttatctgccccggggaggagttttagattaagagggtgtgtgtgtgtgctgggagggaggtggaggggctgagttttctgggtggtgcggttttcccaagtcccgttttgaggttttgtcctagccagctcccgctcaggtccctgggcggtgacggtggtcaagcttagcttggctgttcctcctccgcttggaaaaaggccgccactggggccaactccggccacagcgctgctgccaggagacctagggtaggtcttttcccctgaggtagagacctgggtgtaccctcaggaaggcatcttgaagttactgacagttgagtcaaatcttgaaggtccagcaggagttagtaagaagaggtggaaggggaaaggttaggcgccccctcctccaccccttgaacaaagaaagcttgacggggcttacaatatccgaggaagagctgggcgggtagagaggtctgtagaggcgaaatcacaacttggctttattctaagggcaatggaagagggttttgaaggctttaaaataatgtcattaggagttttagtcgcttgggaggaatgggtcggagggggacaggaagctatcgcagaaagcagcccacttggaagatgaccgaggactgaggaaagagggcgggggacatcgagcatctgaagcctttcccagtcgccgcaacactgtgcgctgtccctcggctttctttgcttatgtggaagggctccataaagggctgggcacgcgccaaacgctcattaagcgaaatagcccgggtcccctcctcttttcagggactctgtggtccacgtgccccagaattggtagggtaggcgggaggactttccactgctgaagatggagaaccgttacccctcaaaaaacacaaaaacctcgggtgcttttggcagcagtctcctccgctcatgacctcatgctttaagctcccatatagcctccctccgcccaatccacacccagcgcccgggtgggggtggggtgggggacactggcgaaggtctgggtagcgggaggtcattcttcttgcgcgacattttgggggaaggggcgcaatgatttcccccacggaaaaaaatggatggtgtaactttctgtcgtgcaaaaaatactgtcttgccctcgagacagatgcctcgaacccggctcgaggtggtctgtttagctgaactacctttggttcacgtttcctctgaccaggaaagaagcttggaaatgcaggggtctcaggccaggttccctgacacctgggccgaccactgccacgccttctcgggacctgggggccgtcctgctgttgccctccgcccccgcccgcgccgcggaggtttgaaccttcggctcgcctttcagcccgcgccctgccccctgctcgcagctgctcccggtttgggtgcagcggtttcccccgcagaggaggaggaggagacagcgcgagggagcgactccgggctcgggtttccgcaccaatgccgagcagccccgggcggcccccggtggccgtccctcctccccggcaccacgttccacagtcatggcgcgcgaggaggggcgagcgcgcgcggcggctgcacccgcgccccctctcctcccctcccctccgccgcccggcccctctcctaggcaacccccctccccggcctgctgcgcctgccgcggcaagggagacccctccccagagagctgctcttccagcgcggtctactgcaccccttccccgcccccatcggggcggagggatggagacgcgcgcttcgcgaacctccagccccttctccggagccccagccctctcccagccccaccgaggccagggtgcggtgggggtaggcgcggaccgtctcctcgcagcccgcctcgacctcggcatctttgcaaacacttagaaaaataaacaaaccccctcacaaaccccagtcgttagcttgcaaagcgtgttacaataaccgggacggctacgcaggaagcaatcctgcactggtccgggtttaaggcggcagcttcccggccacgctgccttctccccggcctcgattttccggccatgccggagggtccgctgcacctcagggctgacaggtcccgctcgcgcagggccgcaactgggcccgtgtcccccgtcccatcctcgtccagagactcgccagcctacaaaaggtgcaacctcacgcacacgcaaagcgcacaaataaagtcagcagcgcaccgccgcgaaggctgcgaacaatgcgccgggcggcccgcgcccgccgtagcgctgcgccccgggggaaaggggacgcgggcgggggccgaggcggacgaccagccggtcgcggcgctggacaccttacttcctgcttccccgcccgcggccagacccagctctgcggagggatatctcccctcctcggtccctctccctcccttccccctcccttcccccgccctccccctctttttgctcctgctccccccccccaccccgcctttctccttttgcaagaaaataatttgacagtcgatttgctgacaagggaggaatttgcatcctggatttaaaaaaaaaaaaaaggccgagaggagcttgggaacggttgctaggggtgggtaatgggtgaaaaaaggggggtaccggggagcggataaggagggttaagggagggggcgaggatggggagcaatgcaaaggtaaggccaggttaccgcggctcggccccgagtgggctgcgaccgggggaggggcgagagatacatatgtatttctgtctccccagcacacccccttccctctaagcgatggctgagaggcggtgcatgcagatggggagtaagtttcctgaaggggagggtggatgcacgcgcgcagcccggcgctgcaaatttccactggggagggagaacggctggatgcggagagtttggagttgcttgcggcggagggcaggaaggggagcagggctgggaaagggggctggcgggcgctatatctgggagtaagtttccagcatcaggagagcctgcacgcttgctcactagtaagtttctggccggggagggcgcatggggaggaggagagggaggggtgcatgtatatagaaggggggaggggggagcagatttcctgcggggaggctgaatgcatatggagagtagatttcctgaagggagggtggaggcgtagacggaccgagtaagtttcttgctggggtggtggaggaggtggtgggttggtgctttggaaacccaaagcttcctaccctgggtgggggagcacactcttgtcggggggacgaggggccaggttccctgctggggagaggggcttgcatctggggagtatgtttcctggcggagcgatatttgtttacaggctgagggcagtacagtaagtgagtagcgctgagagaaggcggctgacataaattaatattgaaattactccatcagctctgctcgccccccatctcaccccccaagcggatactggtcttctcgtcggattgcccatgcacttgttgcagaaacagccaaggtaggcaagaagcttattaagtttcatttttaaaaaattagtttggggatgctcctcgagaagacgggggtggggcgaagtggggagggaagagtggggagacagaaggagaagtctcccccccctttactttcactatgcaagcaggccttctcccttcttcccttcttccctctccgggctgcacagcatcccagcaaagggggagggatgaggtgggcgctataattggcaaccctggcttaaaggtagtgatggtgggcttgcatttgaggttgtgatgttataaaggcttcattctccagctaagaaaccgcaggactctgccttttggggtttttgacatgatacatatgtgtatgtatacgcgcctgcgggctctgtggggg

SEQ ID NO: 11241 - DNA, 6000 bp, Homo sapiens
ctgaggtcaggagtttgagaccagcctggccaacatggtgaaaccccatctctactaaaaatacaaaaattggccaggcatggtggcatgcacctgtaatcccagctactcaggaggctggggcaggagaatcacttgaacctgggaggtggaggttgcagtgagccgagctgagatcacactactacacttcagcctgggcaacagagtgagacaccgtctaaaaaaaaaaaaaaagcaaaatagaagtttgattaagtgttcctcttttcacacaggtgtccctcacaccttagacattacagatctaagcaataggctgggtgaggtggctcatgcctgtaatcccagcactttgggaggccaaagtggttggatcacttgaactcaggagttcgagaccagcttgggcaacatggcaaaaccctgtctctatcaaacacgcacacacacaaattagcagacatggtggcatgcgccagctagggaggatgaggtgtgagaatctcctgaacgccagaggtggaggctgcagtgagttgttatcgcaccactgcactccagcctgggtgacagagtgaagccctgtctcaaaaaagaaaaagaaaaaaaaatctaagtaataataggtagaaaaaatggtaataaagtctatataaagaggaaaaaagacattcagggtaggaggaaagaaaatgacatttcatacagagagagggagagaaagaggacagaggtaaaatacacgagagacaaaggtagatagaagagagagaagtggaatttggagttctgcttagtgtcaatgcgggtaagctgcttatttcataaatgggcattacctcttttttctgctatttaatacctagtttactttccaatcttttatttttcttctaacctcctctaaagattagcttaacaaaaataaaatcaagatgtacactggagcaaaaagcttcaagaactctgagaattctcctaaaatttcctttacccttggaatatcttgttacctccaagtttggccttttgggcccaagcaaaaggatctgattttttttttttttttttttttccctgagatgaagtcttgctctgtcgcccaggctagagtgcagtggcgtgatctcggctcactgcaacctctacctcccaggttcaagtgattcttctgcctcagcctcccaagtagctgggactacaggcatgcaccaccacaactggctaatttttgtatttttagtagagacagggtttcatcatgttggccaggctggtctccaactcctgacctcaagtgatccatccaccttgccatccgtgagccactgcacccagcctgatctttttcctttatatcatatagcacagctaacactatatgtttaaacctgtaacgcttaggtttaaacattaaaattagactttactaaagactaagggtttacaaagactacccacacagagtaacattaaatccaatcatctggcttataaaacctcgacctctctcttctaagtgccccatttcagctcccattctgtttcttagtggtgggcaccattttagcaatctcagcacccatcacccaggtggtcacagctgcaaggttacttttcttacagtacagaacccagggcaaacatgaagcctacacttaaggcctcaaaatgataagttatacacataattactccaacaatcacccaagaaatacacatagacaataataggtatctttgaccaagggccccacagagctggctaccaatgaccagctccctgaagggtaaattattctctaggacagtatgatattatccccagataaagtcaagcctaaaatcatgggatatagtgaaaagaacactggactaggcatcaggagttcgagttattcctacctcattttgtgaacccccccccccaagcaagttactatatatttaaatttatttacaccatacgttaaataggacctctctatatcaaccttaaagtgctagagtaagaataaaatgagatgacagatggaaagtgctttgaaaaagtagattcttttacagctctggatgtccatgattcccatccatccaatgaacatgagcacttactatgcattacatgttgcagaaacaaaaatgagtaaaattcagcaattggaatgaaatggagtttttttggtttcttttttgttttttgagatggagtattgctctgttgcccaggctggagtgcagtggcatgatctcggctcactgcaacctctacctcccaggtttaaacgatcctcctgcctcagcccccctagtagctgggattacaggcacattagcctgtatgcccagctaatttttatatttttagtagagacagggtttcgccatgttggccaggctggtctcaaactcctgaccttaggtaatccagccgcctcggcctcccaaagtgctaggattacaggtgtgagccaccacgcctggcctgaaatgtagttttaaaagcttataaggttgactgggtttggtggctcactcctgtaatcccatcactttgggaggctgagacaggcagatggcttgagctcaggagtttgagaccggcctgggcaacatggtgaaaccctgtctccactaaaaacacaaaaaattagccaggagtggtggtgtgtgcctgtggtcccagctactcaggggcgtggggggctggggttggaggatctcttgagcctgggaggcggctgttgctgtaatccgagatcatgccattgcactccaatctgagtgtcagaaagaaaccccgtctaaaaaaaaaaaaaagtttataaagtgattgggaagcatttttctggatatgcaatctgtccaactttgccatcaatcataaaacgtttcattgcttactaattgcttactactccaaagctgaaaactattgtagaggcggtgaggatacagaagtgtaagattactgtggtcttctaataatgtagaatctagtgtggcagggctggacgcggtggctcacgcctgtaatcccagcactttggaaggccgaggcaggcggatcacgaggtcaggagatcaagaccatcctggccaacaaggtgaaaccccgtctctactaaaaaatacagaaattagctgggcgtggcgggtgcctgtaatcccagctactagggaggctgaggcaggagaatctcttgaaccagggagacggaggttgcagtaagccgagatggcgccactgcactgcagcctggccacagagtgacacgccgtctcaaaaaaaaaaaaaaaaaaattaaaacttttgtcttgcagtacctggactggagatcaaattctgatgttaacttaccgtttgatctttgacaagtcctttagcctttctaagcctgtttccccagctgtaaaatgggaataaaatacagtactgtccctccaaaaagaagctgaggcaaaatcaggccaagcttgaggactgcaacccaggaccatagattcaagctgccctgaatatacactcggattagcaagttacaagtaggtttttaaaggaaaagaggcagctcctaaattgtttaccaatttacattaaaatatcgtgggctcttgactagctatacattgttctttgtatcttaaatttcagaaacttaaagataatgcgtaggcagctaatcaggaacaaaatgcctttaaacaattgccccaggcattagtagtgaaaggaagagaatgacagcctgcctacttcgcagagctgaggtctgatctatttttcttagtacctattcgtaagggttgttgtgaggttaaagtgagacaatctatgtaaagaacagttcctggaacataaatgcttgataaattatggccacaattcttttttgtggttgagcagtgcggggagatcgcgaaaaatttctatttacgcgcagctaacaaaatactctatgttgcagagctgtttcactttctccctttgagacgcaagccggcttgccgcctcctcaagtaaccaggcacaatgttctgatcccaaagtctcacaatccttcaagtatgaaatcagtaaaaactccaacttccatttatggatttacggagaactttttatacatcgaggggctaattcaatcagtaagtcactttgatttttactctgatcaccgagactaataagcagcgatgccgaaccaagtaaatgaaagaatcgtgagccatacttcagtagataaaatttaaatgtagactgattttcttcacgattgctagggaagaaatccttacagcgtacttagaaatctttgttttaaaatgataacgctgttatgttgggctgaaaataaaacggatacttccccaaggtcagcagcggaggaggcaaccgtggccttgccaaagtcatcccctcttcccagcccccgttcttcctgccgccctccccctgccccctcccttccccacccccatcaacaaactccgccgggacatttcagtaccaccactccctagcccggcgaagcgcaggggcgtgctggggaggagtaaagagggtggggcggaaacccaatttcattgttcgcgggaccgattcttcccaaaagagctcgctggcagcgcctgcgcagtgcgccctctttgtgccaggctgcagcaagctggttgtttgtgtgtgtctacccgaagctgcggaggcggagcgagggggcgtggcctgccttgtcgcactctaattgggctttcgcaggaaagtgggcgggcgcggggcggagcttccgataacaacactcggagctggggctgtggctatttgttgctgcgccgccaccgcccgagtcatgttccgcgatcttctcaggctctcctagcagcatccatcgccgccaccctatcttcactggcttcattcaccttctccttctctcttcgttgctgagcgacaagcttcctagcgctatgactgtcgtctccgtcccgcagcgggagccgctcgtcctgggtggccgccttgcgccgcttggcttttcctcccgaggttactttggggccctcccgatggtgaccacggctccgcctcctttaccccggatcccggacccccgggcactgcccccgaccctcttcctccctcatttcctagggggagatggcccgtgtctgaccccccagcctcgcgctccagcagctctgcccaaccgcagcctcgccgtggcgggaggcactcctcgggcagcgccgaagaagcggcgaaagaagaaggtgcgggccagccccgcagggcagctgcccagccgcttccaccagtaccagcagcaccggccgagtctggagggcggccggagccccgcgaccggcccgagcggagcgcaggaggtcccgggcccggccgccgccttggccccgagtcctgcagccgcagccggcacggagggagccagccccgaccttgccccgctgcggcccgcggctcccggccaaacccccctcaggaaagaggtgaggccgccagggggccgttggggagtcgggcccttagacggtcgcggccgagctctggggctgcagaccctgcacccggggggtcgggcgggtgggggcggggtggggggggcggctgtttactcgggagggaagtttccgtgacgcccgctccattcttgctttgggggaagaagggggaaggggaggcatgcgctggcgcttctgattggctcccaggagtcggccaatgagaagcgccgctgcgccccagcaacagccccgatttagaaggctggcggcgttccagggggtttcggcgttccgggcgcgcggcggggtgggggcagggacagggcccgcgggagggctgacgtcagcgcgcgctacgtgcccggcgctccggcgcccatgaaggaggcgaggccgggtgggggcagctggggaaggactgggcccggctttcggcctcccggctatcgggagccccagtcctagtcggtgaaacgc

SEQ ID NO: 11242 - DNA, 6000 bp, Homo sapiens
cactggactcagcatcaggagatatgggttctggggatgatctctgtctctcagtgagtaagcaaggacaagttgtctctaaggttctcactttcctcatctataaaatgactacattagaggagtgccttgtaacttatgtgctctgtgattccacgctaaatggaagccaagttagactgtgtaattcacaggaaattaggaggctgaagaaagcttggcagccagtatctccctggatgtagtctgtgttctgctttcttgtttctctagtcattcttttgttttcagaaagccaaaaatgacctgcactgcttcccaaggtttggagattcagaggacctgtccctgttcccttcctaccccattgctggggctgagcaaaaatgagcccttcacctcaagcttcagtagctttcattgagtatcatcaggcaggttcactcatacattccacatttacaaagcaccactatgtgccagggtgcaagggactagaaagatgtttctacttgattattcttggagccagagaatgtcaagatgcagcgggactctagaagcctcggagtctcagcctgactttagaactgaatttttgtccaaccaagggtgtgaataaatgcaaagacatgacttgttatttgttaaggttgtggggtgaggggggtggtcacacagagcattgtctccttgttgttagcagcgttcatcttcctacttgtggggagtaacagactacttttggcaatacagtgctcaaaagtgtcaagaaaaaccctgcaactcaggacccactggattctagagaacaagcgtctcttttctggattgttcttgtttatttggggggtaaatttggataagaatcaaacaacttgtagagagatccacagcagaatcaagagcaagcctgcaaacactgtttctttcatttggcacttagcaagcacctactatgtgccagacactgctccatgacccacctcctctctcaccatccactgggcaaacaacagccataggttgaattatgatgtggaagcaaatgcaaatcaacttcctccttcatataaacaaacaaacaaacaaacaaacaaaaacttgtgtcagaatgtttttggatactaaacatcaaaactcagccaagctcagctggtaggttttcccagcgatttccttggtctgagcatctcttaactctgcatatcggtaaggggaatggtattttaaaggagtgactctctagaggttgaatggcctctgtgaggggtcgatcacaggggattggggaaggggtctctttaacaccaattccatcagctctgctagctgatgggaaagcttgtcctttcaccttcggtattttaatttagaagaatgtgtgtgtgtggagggggtgttaatggaaaaaatgtcaccgtttttagagaagctagtgaatggcagggctagcagtcaacctcagatagtctgaaactttgaggggtgctctgtacccctgcctctctcatacaacctagttaataggattctctttaacagggcactagcagaggaatgagctataatacaatacagtcctcagaggactgtagaatcagtagattctcctaacacaaggccagctttccagggcaattctggacagcctatgtcaccgcacactggtttagggctccttgtatatatctccagtgtcctgtgtttcatcccaatctaaaacatttatcatcttttatgtgtctgctccctgctacatggagaaaggagtcatgtcattaatctgctatatccccagggtctggcatatagtgggtgctcagtatttgatgagtgggtagattgatggatgggcagaaataccccttgatccatggtcctctcatgatcttatttcctatctcttggaccaaaatgtaaacatccttcgataaaagaaccttccctgcgttttaggctttggttttggttgagagctccatactcacaagcgcctacagaggaaattaggggctatgtctgaacctgtttagaagggtttcagaacctctgagggtgtggctatccccaccaccttccaaagcaataaacttatccttgtaacttaaggtcttgtctctgttaaaagataattctgagccagatggcatttgccccttatcaatcatttcctttaatggactcacaggaaaaaatctttgaaagttaagaccgaacagggtgagaatccttttacaaataacaatctggaacccagagaggtctagccactcgcctaaggtcacacagcttgttggcacagccctgaatccctatctcgtggtttccagcgtttagcctggctgtgcctccagtggcccctcagggcatctgcaggtgacttcccttcatttgcccaacatttatgcagcacctactatgaatcaggcagcatgctggggcctgtggatagaaagatgaagagccatagtctttgtcctgcaaaggctttcttctctgagctgtacccatggtagccccaagtttctacgccttaaatccgaggtcccccgtggcctgcagcagctttgcctgagtagaaggcagcccgcactaaggctccaggcttatttgggacctggtgggcgacggggcctcagcccctcccgcctaccctggagcttgttgccgccgttaccactgaaccagtcatgccagaaagtcatcacgatgatttcagaactgtattgtgatttatgcaaagcgcgccgataattacagccgggcgcacagaacacaggatgcatatgctgcgggtgtgtgcgcgcagtgttgtgcctttcgccagggctgaatggggtgtgtgtgtattccgtaggcatcttcttgacaccatgcttgatcggggactggtgacaggaaaaagagggaagatacccattttgattttgagacaatttgatgagccttgggagtattttccagaagttttggtgcctacaaatgagccagcctggcaggagcgttcgagagtaggggaagaggtggtttggagcccaggaaagccatcgtccagcccccgcacaggcaaagcaattagtagttctccttctcgaaacagacccctaaatgcttcccctgcagacaggcctgggtctagtcatcaccccccacactgccctcatcttcgccccagataaattagttccacccttgaagttctttgtcctgaaccaaagaaccccataatcgcgtccgcgttatgggggtggtggtggtaggtggctgaagcaagtggatttctggcgtgaaccagaacctgaggattccaaacggagcctggcatcttattgtgtttctcaaatcctgcccgaaattcctcccctctctgggcgccgagttcgagaaagcgctacgccgccggtcgggctagctccacaagcggctgtacaagttggctgtcaaaaaacgctgatttctcctcctgtcacctaataaacccctacgcgcttatggcctcgtcccacaatcccccaatctcgtcccaattcgaaaaaccgaggaggagggaataaactgagagataaagatccccccatcttgctctttccccgggaccccagccttggtcgcggcgccccactaaggaggacacaggctctggtgtgtgtggtgtgcgagaccccgagctcgaggccgagccaaggctgggcagaaagttgcaatcacgtgctgtcggagcccactggagcgcacagcccgctccccctgggacgcccaggcggaggacctgctgcgccctcccagggctcgggggactccagcattcacttgcacgcacaggcgaactctgattgaaagcccgggatgacaccgagtctggagaaagagggaccggggggtgggctggcggaattgcagagcgccggccacagctcccctccccgcgaacgtcgagcggagggcgggaggtgtaacctctgacctctggccgggtccacgccctgaggagggactggcaagctcttgttcgacaagttcaagctgccgagagagcttaaatagaattaatctcttagagatcggggatcatcgctccctcggcatgcgctctcccagcgccgcgcacagagcaaggcgcgagagagctcaggaatcgcgggaaggcaagcggaatggggagggggtaggggatgagggcctctcttcactattcctccgcccggagagcgggagcccgcaacgcccgccgaggacgagcggcgggagggaacgctctgccctccagccgccccggtgcagataatggaggcgacaagagattcgctcagcgtcggatgggccagctctgcttggggaagctggcggcatcctcccctcggctggtgcccaaacccactgcgcgaaggccgaaggaacgcggaacctccagaagaccccatcctcagccctgactttccgtagatatgtgcaaaatgagtaaattactcacctcgggccagatccaagttttacccaacagaaggggcaccggaccaagaatgaaccaactcacatggccatgtccggcgcgcacaatcacacgccagcacacagccacccaatttcttccgcgaatctatctggcactctggagagagggggaaaagcgttttgagaaagccccgtcacccctccccttccttcttgccgtgaaatatacgaattcatttttattacgagccgcaccgtcctcaccatcacgcacgcacagagccacactcccatattcacactttctaactcgtaagctccgacagcgcctgcattttctttgggagccgcttggaggttcattaatatcattagcatttaaccccctccctcttcccatcccctccccgcacatggctgacgtcagaccccgccaggagttgggggaaaagctaagtgggccagggacgccctattcccctccccgcggctgcctgtcagagcgcttctggagatattacaggggacccagcccgcagcgacaggcacaaagtcacggggtaatgaacttcggggacccttcgccgctgcgtgcgcggctctccccggaaacccggacctggccgcctcttccctcggaagatttcccagcaatctagttttcccactctgcgcttgggttccggcagcgcggagcccgtctgcctctgagactgcggtagtgttttccttctttccttgggagaccagcggtcggcagagattgcccacactctgcatgcctatgtagagggagagatcgaagactgagtgacaggaatggggaaaaagagggatttcgctccgtaggaaggccattttcgtgtctccatctctgtctttcaacatccctctcttgctgttcttccttcttcctcagtcttcctgtccatctctccatctgtctgtccatgtgtgtgtccatatcaagcagcattcccagcagctgcggttttgcaagagccgggaagaaacttaaggatgcttaaatttccactgttggacgaattctgagcgcccagggagcagcgcagcgcgcgactgacacccacctgtcccgcccaggagccttgcaggctggagggcagctggagagcggcggcgcccggcggcgaggcgggcgctgccggccgggactcgggcagcgcccaccaaccgctccgccccgggacagccagcatgagcaagccagccggatcaacaagtgggtacctctcgggccgccgtggggcctaggcgcgcagcctggggcgagcgagcggggaggctgggggaggtcctgcctggagcgctgcgaatctgagcccctgagagggattccagcgggcgtgtgcgttcggcccagacctgtagaccgtgagttggagcatttcgtggagaggggagagccgtttcgttgcctctggattgcttgatcccccctgtctggtgcggtgagaaggttacgacccgcgcagcccaccagtcggatgagttgtctccatttagccgccaggtgctggatgg

SEQ ID NO: 11243 - DNA, 6000 bp, Homo sapiens
accagtagacaaatgaccccagtttgtgaaaatgagccactgccttaaatactattaaataataaactctcttctgcctctttagttgcaggatggctactcgtatccctccacacatgatcatcagtatttgcctcctgtgtcccaaccggcctgagtcaagtaagtgtatgaaaagaggtgtttctctctgcgctagagaaagaaggataggttcactaaagagtgaattttcttggtgctagtagcctaagctcatcacttaatgcataaaactcctctcccacagcttttgagagaccttccaaagacatttcaatattttcaatagctccaaggtcattacttaaccagttttgaaactacactcaaaacttacaaattttgttaaagagtaagcaactcccaaattctcctaagtgacttcatcctgttatttatacatcacatatgtacatatacattcctataatcaagtaattctaaatttgggacaaaatatcatacacaataatcattgtctttttttttttttttttttttgagatgaagtccggctccgtcgcccaggctggagtgcataagcgcgatctgagcgcagcgcaacctctccctctcgggttcaagtgattctcctgcctcagcctcccaagtaggtgggatacaggcatgtgccaccatacccagctaagttttgtatttttagtagagacagagtttcatcgtgttggccaggcttgtctcaaactcctgacctcaagtgatccaccctcctcggcctcccaaagtgctgggattacaggtgtgaaaataggccaggcgcaggggctcatgtctgtagtcccagcactttggcagactgaggcagatggattgcttgagcctaggagtttgggaccagcctgggcaacatggcgaaactccatctctacaaaaaatacaaaaattagccgggtgtggtggtacatgactgtagtcccagctacttgggaggctgaggtgggaagatcaatggagctgggagttggaggttgcactctagcctgggtgacctaatgagaccctgtctggaagaaaaaaaaaaaaaaacagaaaagaaaatacagtagagctctagatcaaccagagactcaggagcctttcatttgggcaatgttacagcaatatttgccaatatttttagaattctagtttcatgagacattactagtgttgtattcaaaaacagaaatactaatcatgcttcttcattacaagaattgtctttagatagataggtaagaaaaataccgaacacatttgcaggattgccactgtttggcaatgtttctctaagcccgcctaccttagccctctagaaaatcacttgggagaaatcctgttgcctgaacccagagatccagctgcctcccacaggctcagcgaaacaaacaaatggcggagtgaagtgatccctctcttcttcctttaagagaggaagggatctctgcttctcttatctactccaaagtctcatcatacaaaggttgtttattcctgcaaaagttaaatgacaaatccacctaaattatcctccaatggcccatacccttcaacagagaaaggccagttttcatatttaaaggtggccctcacagccataaaatcagtgtggtattatattttttcattaattcagcatttaccaagtaacttccgcagccaagaacagtgaaaagtgttagggataccatttttaaaaactttatcataataaagtatattattctagtaatacctttgattgatggccacattctagactttaagaaccacttgggattatctcctttaattcctatatccaccctataaagttggtactgttaccattctttatggataaagcatatcctttacggataaagcaactgaggttaagtagtttacccaaggtcagcacgtggtggagctgtagtctgaagccagagcctgaattcttaaagattaccatgttcttaagaagtacactttctactgaggtttgatctgtagtatactaagatttcccaaattatttcatgtattatatcttatctcccaattaaaatttgaccttctatttagggcagcactgttcaaaaggattttctgcaataatgaaaatgttctagtttgtgctatccaaaagcacagtctagccataatttaaatttaaacggctacaagtagctaaggcatacagtactggacaacacatgcaaggaagagtttcatttcttccgatttatctataaagccaaggcttaggtaaatcagttaatggaaaggaacaagtgaagaatctttaggaggagtttgtactcccttagctggggagcagaaatctttattatatcaggactttcagtataataaaaatgttataagaagcatatgatacagcatgcagtcctagaggagttcataaagatggattcttacattccttgcaatatctttggaagaccttttttttttttttgagatggagtttcgctctgtcaccaggctggagtgcagtggtgcaatctccgctcgctgcaacctctgcatcccggtttctagtgaatctcctgcctcagcctcccaagtagctgggactacaggacccaccacacccagctaatttttttttttttttttgtatttttagtagagatgcggtttcaccatgttggccaggatggtctcgatctcttgacctcgtgatccgcccgcctcggcctcccaaagtgctgggattacaagcgtgagccactgcgcctggccagaagactgacgttttataattgatggtcacaactttaaaaattcatactcagttataggtttttgtctaataaaaacatcactgcttaatttatttacaaaacatggagtccatagagagaaaaacaacaggggcctcttgatagtaaaaggatgagaaacagggaaaacttgtaagtcaatggacacttccttcagaaactacattcaaaacttaaaaattttgttaaagagtaagcaactgccaaattctcctaagtgacttcaacgtgttacttatacatcagatatgtacatacatattcctataatcaagtaattctaagtttgggaaaatatcataaataataatagttatcttttgaaaataaagtggggctctagatcaaccagtgtcaggaagcagccaagtcacaccccactgggtgcttcctggacaagcgcagtgcagctcccacagggcctcacacccaaccttcaatttgcttaaaagaactatctcaaaaaatcttagctatttagtcacaatttgtccttgccagggaacatgtttttcttttgcctgattttcaataaccttagattgcaaaatcataaaagcactcatcaaagaactgtgagagcagctcagcttccctggagatctcaaaccatgttcctttgatacaatgcaatcagctctttatactttaggaacctaattttcccttactaaatgctaaacaatttacaaataacacaatggctacagaaaaaaaaaatccaacatctttacattcaaatcccaaagatataaacctgacgtctaaattaatacgtgcttagtgcaaaactgggcaattattccacatttgcaagacagtataacatgaccacctgctgctgaaatgccaaagccaccactgttaacgctttgctccgccttccagagaggttattacagcttaagctgcgtcaacaacccagaggaggctgctatctagtttatctgtgtggaaggcctgtaacacactgttaacagagtagttgcaggcccttccttgggatatttttctgcgtataagagtgaatgaactccacggccagatcctcctagtcatgttgcagtgctggtcatgggaccgcagagggaacagcacccaactggggatggggagctcacaggcacaggccccgcagctgatgcaaaccttccccctccaaggttctctcgagtctctgccaagagtcggctggagggcccaactgctatgttcttattgctgtaatgactgcaatttggcagcatccaggatggtgtaccgggaacgggagggggaaggagatggtgggcccctctgttaaacgcaacgccagaagggacacaggatgaatttattgtggccatcggtcctgagctggaaggaaagtcaaagggctttaaagctggggaaaagctctaactcctgctctgctgtcaaagccttacttcccacgaagagtaggggccaggcgggccaactgtaagggggaagcggcccggggtgaggtaagaggaccctcctaggtgccgctgccaggcggcggttcgctggggcagcaaggcgcccgcactcgggaggcgccacaaagggccgaggcctgcggaggccgcacgcgcagctctccggggcggagccgccgggatcgcggcagcggaggctgcagcagccgcgggtagccggggtgcccagcctcccagctcggaggtcgcggggggcggggaggatgccgcaactgcagtccgagcggcagagcccggcgcgagctcccaggcccccgcaaccgctgtgaggcgcagcgcgcgccactggccgggaggagctagaggcgggcgtctgcacagcgtcgcgccacccgtgactgcccgccttcagccgggcccgggaccccgtagcggcccatgccctgacggggggcgcagctgcggggctggcgaggcgtcgcgcgtgggaagaggcctaagacaccccgactgcggcggctgcgcacacccgatccggacgcggggccccgcgggcgcgcgcctcggagctcccgcctcctcctcttgctcctcctcggcgtacggtcctcccctgacccctccttccacccgccgagaggatgcgctccccggcgcccagcagcagaggccaccgctcccagaaatgcatgcgaccgatccccttctcccggaccccaggagccggcgcccccgccctgtaggtaggtggtgaggcggggcccagccctcgccgccgcccgccgctgatgctgccgccgagaggccgcgagcagggtccaggaccggccaaacttgcctcccgccgggggctcggtggagcgctcggaggtgtgctaatggcgctgggcgtagccccctgtgaacctgaaaacctctgcttgagctcgggaggccgagcgggggcgaaggagagattgacccttccccgcccaccccttggggggctcgtgggggtgcgcgccagtacgagagtggggaggacaggttggcatggggcttatttggggagaagaccgttggattttcagcagctcaggtggaaatatgtcactgtgtttttccggctggattagcagatgcgttcttcccatctttctagccaaaacatgtagacaggcaaagggttattagtggcatgtagaagtcgctgtggatttttgtgtatttcagagctagctagttggtatataaaatcgatggggcaaacccttaccgtcaacacgttagggccaatttagagaaggtccttctagaagtcagattattctggagatcgatgaggctgggatattgttgtgctgagtatttaggagcctctgcttacgtgaagggatgtgttttaagagtggcaactttgatacaggtgtcgggagttgagattctgctggaaagatgtaccgggtcagccagcagaggcagccttgtgcccagcctaacttccaactcgatgttatgctctgtatttctcagaaactggttatgtattaatgctttttttctcctctaggtgtaaagtttatacatcagagcttttggcaagattccctcttcccagactatcattttttattttatattcagcaataaggcttaaagttttgaaaaatgcatcactgtaagctccaattttatagtcacttaggtatagagatttggagaagtgactcagtataagctcaaatagg

SEQ ID NO: 11244 - DNA, 6000 bp, Homo sapiens
agtagctcgaggaaatggtggctcatcattgttaatagagcctgcttaggattgaggctgaaggggggaagggtgggagtggggataggataggggagtggctctacctggattggagaaaggagttctggacataaagatttaaattggtgtccgaggagttctcacaaggcctcagctggaaaacagttaaatgcatcttctgaccactaacccaggttgcctccagagaaggaaaaccaagtgggtggcagacagggtgggagggagacttcttgctgtttatttgaatttggaaccatgtgaatgcattcaacctattccaaaagaataaattacattaaaaaatggtcttttgctatggggataagtgctgagaatggtaagactaggatctaatgataataataataataattccattatactttgtgcagccctaggagggcttcagtcatgcaggacaggttttgaactaagattgggactttttcagcctgactctgatttcaaagatccaagctaatattttaatttcagtcaccctccttctgaccctgattgtagaaagattccagacccagcgctcatggacttggtttattcaacctgtggattgccttcaagagtatgcattgttgggagtcaagtctattggtaaaatcagggatgcattgtctgtgcatctgccggtgtttcccagtccttttggtgctctctttctctctctctctctccctctctctatatatataattttattttttgagacagagtcttgcgctgtcacccaggctggagtgcagtggggcaatctgctcactgcagcctcaaccccgtgggctcaagccatcctcctgccttagcctcctcagtagctgggactacaggcatgcaccactatgcctggctaattttttattttttaataataaacgtggagagggtctctctacattgtccaggctggtctcaaactcctcagctcaagcgatccgcctacctcatccgcccaaagcgctgggatgacaggtgtgagccaccccgcctggccccatagatatttttctgatgcttcaatcagctaagactctgaggatctgattttctagagtcctttggaaggtggggggggggcggggcgggggaggatacacaaccctattcacaaatattagtaacttgctttaaactctaaggccttacataaaataactcatttaaacctcacaataacactatgatatgaatactatcattcccattttacaggcaaagaaactgaaccaagcggttaagtaatttgcctaaggtcagagcctgcagagctaaccatctggcattaccatcactctgttggcaatgaacagagcgggccaagcgtgtagggtgtagggggtcctttgaagatgacaaaagcgtccttggctgtgtagccgcaaatcccaaatccttccttctctgcagcttctggtttaggagctggaaagacaggctgtgaatttccacattgacctggggcaattaacttaactctccgaataggttccttatctgccccggggaggagttttagattaagagggtgtgtgtgtgtgctgggagggaggtggaggggctgagttttctgggtggtgcggttttcccaagtcccgttttgaggttttgtcctagccagctcccgctcaggtccctgggcggtgacggtggtcaagcttagcttggctgttcctcctccgcttggaaaaaggccgccactggggccaactccggccacagcgctgctgccaggagacctagggtaggtcttttcccctgaggtagagacctgggtgtaccctcaggaaggcatcttgaagttactgacagttgagtcaaatcttgaaggtccagcaggagttagtaagaagaggtggaaggggaaaggttaggcgccccctcctccaccccttgaacaaagaaagcttgacggggcttacaatatccgaggaagagctgggcgggtagagaggtctgtagaggcgaaatcacaacttggctttattctaagggcaatggaagagggttttgaaggctttaaaataatgtcattaggagttttagtcgcttgggaggaatgggtcggagggggacaggaagctatcgcagaaagcagcccacttggaagatgaccgaggactgaggaaagagggcgggggacatcgagcatctgaagcctttcccagtcgccgcaacactgtgcgctgtccctcggctttctttgcttatgtggaagggctccataaagggctgggcacgcgccaaacgctcattaagcgaaatagcccgggtcccctcctcttttcagggactctgtggtccacgtgccccagaattggtagggtaggcgggaggactttccactgctgaagatggagaaccgttacccctcaaaaaacacaaaaacctcgggtgcttttggcagcagtctcctccgctcatgacctcatgctttaagctcccatatagcctccctccgcccaatccacacccagcgcccgggtgggggtggggtgggggacactggcgaaggtctgggtagcgggaggtcattcttcttgcgcgacattttgggggaaggggcgcaatgatttcccccacggaaaaaaatggatggtgtaactttctgtcgtgcaaaaaatactgtcttgccctcgagacagatgcctcgaacccggctcgaggtggtctgtttagctgaactacctttggttcacgtttcctctgaccaggaaagaagcttggaaatgcaggggtctcaggccaggttccctgacacctgggccgaccactgccacgccttctcgggacctgggggccgtcctgctgttgccctccgcccccgcccgcgccgcggaggtttgaaccttcggctcgcctttcagcccgcgccctgccccctgctcgcagctgctcccggtttgggtgcagcggtttcccccgcagaggaggaggaggagacagcgcgagggagcgactccgggctcgggtttccgcaccaatgccgagcagccccgggcggcccccggtggccgtccctcctccccggcaccacgttccacagtcatggcgcgcgaggaggggcgagcgcgcgcggcggctgcacccgcgccccctctcctcccctcccctccgccgcccggcccctctcctaggcaacccccctccccggcctgctgcgcctgccgcggcaagggagacccctccccagagagctgctcttccagcgcggtctactgcaccccttccccgcccccatcggggcggagggatggagacgcgcgcttcgcgaacctccagccccttctccggagccccagccctctcccagccccaccgaggccagggtgcggtgggggtaggcgcggaccgtctcctcgcagcccgcctcgacctcggcatctttgcaaacacttagaaaaataaacaaaccccctcacaaaccccagtcgttagcttgcaaagcgtgttacaataaccgggacggctacgcaggaagcaatcctgcactggtccgggtttaaggcggcagcttcccggccacgctgccttctccccggcctcgattttccggccatgccggagggtccgctgcacctcagggctgacaggtcccgctcgcgcagggccgcaactgggcccgtgtcccccgtcccatcctcgtccagagactcgccagcctacaaaaggtgcaacctcacgcacacgcaaagcgcacaaataaagtcagcagcgcaccgccgcgaaggctgcgaacaatgcgccgggcggcccgcgcccgccgtagcgctgcgccccgggggaaaggggacgcgggcgggggccgaggcggacgaccagccggtcgcggcgctggacaccttacttcctgcttccccgcccgcggccagacccagctctgcggagggatatctcccctcctcggtccctctccctcccttccccctcccttcccccgccctccccctctttttgctcctgctccccccccccaccccgcctttctccttttgcaagaaaataatttgacagtcgatttgctgacaagggaggaatttgcatcctggatttaaaaaaaaaaaaaaggccgagaggagcttgggaacggttgctaggggtgggtaatgggtgaaaaaaggggggtaccggggagcggataaggagggttaagggagggggcgaggatggggagcaatgcaaaggtaaggccaggttaccgcggctcggccccgagtgggctgcgaccgggggaggggcgagagatacatatgtatttctgtctccccagcacacccccttccctctaagcgatggctgagaggcggtgcatgcagatggggagtaagtttcctgaaggggagggtggatgcacgcgcgcagcccggcgctgcaaatttccactggggagggagaacggctggatgcggagagtttggagttgcttgcggcggagggcaggaaggggagcagggctgggaaagggggctggcgggcgctatatctgggagtaagtttccagcatcaggagagcctgcacgcttgctcactagtaagtttctggccggggagggcgcatggggaggaggagagggaggggtgcatgtatatagaaggggggaggggggagcagatttcctgcggggaggctgaatgcatatggagagtagatttcctgaagggagggtggaggcgtagacggaccgagtaagtttcttgctggggtggtggaggaggtggtgggttggtgctttggaaacccaaagcttcctaccctgggtgggggagcacactcttgtcggggggacgaggggccaggttccctgctggggagaggggcttgcatctggggagtatgtttcctggcggagcgatatttgtttacaggctgagggcagtacagtaagtgagtagcgctgagagaaggcggctgacataaattaatattgaaattactccatcagctctgctcgccccccatctcaccccccaagcggatactggtcttctcgtcggattgcccatgcacttgttgcagaaacagccaaggtaggcaagaagcttattaagtttcatttttaaaaaattagtttggggatgctcctcgagaagacgggggtggggcgaagtggggagggaagagtggggagacagaaggagaagtctcccccccctttactttcactatgcaagcaggccttctcccttcttcccttcttccctctccgggctgcacagcatcccagcaaagggggagggatgaggtgggcgctataattggcaaccctggcttaaaggtagtgatggtgggcttgcatttgaggttgtgatgttataaaggcttcattctccagctaagaaaccgcaggactctgccttttggggtttttgacatgatacatatgtgtatgtatacgcgcctgcgggctctgtgggggctgggtactccccagaagttagtgtggccacccagatgggagaaatgtgtaagggggtaaacctgttccttcactccccaacttcagtttgggagactgggaagttactgccggtggtcttaagaaacagatattaaaaaccaaccaaaccactccttcaccagcggaggccgagagcacctggcaggcagcctctggccagcactggactggagcatgtgcgcctgccatccttaggttacaagaaaacgctttctggttcctccgtgtgtcttctaccggcctgttagagccagctttgtggaaactcttccccagactagacgcagctttggcaagtgccagtactgaaggggatggcttcaattcagcatggcctgggctgtcttgtgagtgcgtggaagtcgtgcttaggaatgaccgcccctgtagtggctaaagagttcattaaaaaatatctcctgaaaaccggtccaggtgcacttttcagcaggtcattgaggagagttttaagaaggggagtttt

SEQ ID NO: 11245 - DNA, 6000 bp, Homo sapiens
tcgataaaagaaccttccctgcgttttaggctttggttttggttgagagctccatactcacaagcgcctacagaggaaattaggggctatgtctgaacctgtttagaagggtttcagaacctctgagggtgtggctatccccaccaccttccaaagcaataaacttatccttgtaacttaaggtcttgtctctgttaaaagataattctgagccagatggcatttgccccttatcaatcatttcctttaatggactcacaggaaaaaatctttgaaagttaagaccgaacagggtgagaatccttttacaaataacaatctggaacccagagaggtctagccactcgcctaaggtcacacagcttgttggcacagccctgaatccctatctcgtggtttccagcgtttagcctggctgtgcctccagtggcccctcagggcatctgcaggtgacttcccttcatttgcccaacatttatgcagcacctactatgaatcaggcagcatgctggggcctgtggatagaaagatgaagagccatagtctttgtcctgcaaaggctttcttctctgagctgtacccatggtagccccaagtttctacgccttaaatccgaggtcccccgtggcctgcagcagctttgcctgagtagaaggcagcccgcactaaggctccaggcttatttgggacctggtgggcgacggggcctcagcccctcccgcctaccctggagcttgttgccgccgttaccactgaaccagtcatgccagaaagtcatcacgatgatttcagaactgtattgtgatttatgcaaagcgcgccgataattacagccgggcgcacagaacacaggatgcatatgctgcgggtgtgtgcgcgcagtgttgtgcctttcgccagggctgaatggggtgtgtgtgtattccgtaggcatcttcttgacaccatgcttgatcggggactggtgacaggaaaaagagggaagatacccattttgattttgagacaatttgatgagccttgggagtattttccagaagttttggtgcctacaaatgagccagcctggcaggagcgttcgagagtaggggaagaggtggtttggagcccaggaaagccatcgtccagcccccgcacaggcaaagcaattagtagttctccttctcgaaacagacccctaaatgcttcccctgcagacaggcctgggtctagtcatcaccccccacactgccctcatcttcgccccagataaattagttccacccttgaagttctttgtcctgaaccaaagaaccccataatcgcgtccgcgttatgggggtggtggtggtaggtggctgaagcaagtggatttctggcgtgaaccagaacctgaggattccaaacggagcctggcatcttattgtgtttctcaaatcctgcccgaaattcctcccctctctgggcgccgagttcgagaaagcgctacgccgccggtcgggctagctccacaagcggctgtacaagttggctgtcaaaaaacgctgatttctcctcctgtcacctaataaacccctacgcgcttatggcctcgtcccacaatcccccaatctcgtcccaattcgaaaaaccgaggaggagggaataaactgagagataaagatccccccatcttgctctttccccgggaccccagccttggtcgcggcgccccactaaggaggacacaggctctggtgtgtgtggtgtgcgagaccccgagctcgaggccgagccaaggctgggcagaaagttgcaatcacgtgctgtcggagcccactggagcgcacagcccgctccccctgggacgcccaggcggaggacctgctgcgccctcccagggctcgggggactccagcattcacttgcacgcacaggcgaactctgattgaaagcccgggatgacaccgagtctggagaaagagggaccggggggtgggctggcggaattgcagagcgccggccacagctcccctccccgcgaacgtcgagcggagggcgggaggtgtaacctctgacctctggccgggtccacgccctgaggagggactggcaagctcttgttcgacaagttcaagctgccgagagagcttaaatagaattaatctcttagagatcggggatcatcgctccctcggcatgcgctctcccagcgccgcgcacagagcaaggcgcgagagagctcaggaatcgcgggaaggcaagcggaatggggagggggtaggggatgagggcctctcttcactattcctccgcccggagagcgggagcccgcaacgcccgccgaggacgagcggcgggagggaacgctctgccctccagccgccccggtgcagataatggaggcgacaagagattcgctcagcgtcggatgggccagctctgcttggggaagctggcggcatcctcccctcggctggtgcccaaacccactgcgcgaaggccgaaggaacgcggaacctccagaagaccccatcctcagccctgactttccgtagatatgtgcaaaatgagtaaattactcacctcgggccagatccaagttttacccaacagaaggggcaccggaccaagaatgaaccaactcacatggccatgtccggcgcgcacaatcacacgccagcacacagccacccaatttcttccgcgaatctatctggcactctggagagagggggaaaagcgttttgagaaagccccgtcacccctccccttccttcttgccgtgaaatatacgaattcatttttattacgagccgcaccgtcctcaccatcacgcacgcacagagccacactcccatattcacactttctaactcgtaagctccgacagcgcctgcattttctttgggagccgcttggaggttcattaatatcattagcatttaaccccctccctcttcccatcccctccccgcacatggctgacgtcagaccccgccaggagttgggggaaaagctaagtgggccagggacgccctattcccctccccgcggctgcctgtcagagcgcttctggagatattacaggggacccagcccgcagcgacaggcacaaagtcacggggtaatgaacttcggggacccttcgccgctgcgtgcgcggctctccccggaaacccggacctggccgcctcttccctcggaagatttcccagcaatctagttttcccactctgcgcttgggttccggcagcgcggagcccgtctgcctctgagactgcggtagtgttttccttctttccttgggagaccagcggtcggcagagattgcccacactctgcatgcctatgtagagggagagatcgaagactgagtgacaggaatggggaaaaagagggatttcgctccgtaggaaggccattttcgtgtctccatctctgtctttcaacatccctctcttgctgttcttccttcttcctcagtcttcctgtccatctctccatctgtctgtccatgtgtgtgtccatatcaagcagcattcccagcagctgcggttttgcaagagccgggaagaaacttaaggatgcttaaatttccactgttggacgaattctgagcgcccagggagcagcgcagcgcgcgactgacacccacctgtcccgcccaggagccttgcaggctggagggcagctggagagcggcggcgcccggcggcgaggcgggcgctgccggccgggactcgggcagcgcccaccaaccgctccgccccgggacagccagcatgagcaagccagccggatcaacaagtgggtacctctcgggccgccgtggggcctaggcgcgcagcctggggcgagcgagcggggaggctgggggaggtcctgcctggagcgctgcgaatctgagcccctgagagggattccagcgggcgtgtgcgttcggcccagacctgtagaccgtgagttggagcatttcgtggagaggggagagccgtttcgttgcctctggattgcttgatcccccctgtctggtgcggtgagaaggttacgacccgcgcagcccaccagtcggatgagttgtctccatttagccgccaggtgctggatgggggggccatgggggcgggaactgggccgcagctccaggcggtagcacaataacacactcgctcaaaactccgagctccagcgcgcaaaagcaactctgtgcaaagcggattttgaatggaatgctttgcaccccgtttctagctatttcaaataatcctgcaaactgggaagcagaaacaatttaaaagtcacattttccttaatcctaaatccgcgtaggtcataactggggaatttaaagtatggcgaaccactctagcaaagagaggaccaaatccctaatcccaaggacttttcgagccggagcccagcagaggcaggagtgcgcggcctgctccctccgtgcgcttctctccttcctcgaacttccttagctgccggctctccgaacgccaggccgcagctgacctctcaccaccccgagactcacgagcgcagggctaagtgtgtgtgcgagggcatttgcttgcaccctgcctgcggaacccaagaatgtgcaggcccgagccagcgttgagcaggcgcggtcacggtgctcagatctcccgggggcatttcagttcccgccatccagtggcccacggctgcgggctccagggtctgaggctggggactaccgttgccgccgcagtccccatatcccgaagttgccttgctgcttgtgttgttttcgcagatagcatttttggcgctctgtgcgttccttccctccccctccccctttcactcgccctcattgtcctgagtctttgaaagttgggagaatcggagatacttctgaggactggtaatgaagtctcacttaagtgggatgcaattcccgccctcctacccccctccaagaaggaggttgtgttttcattttgttttgctttgggtgctgacctttaaaaaattagagcaaaatgaacgtgaacaaaaagaaaaggagaaatgtttcgagctggggcagagggagcagagaaggagccctcaccgcggccggaatgcagagcggaccctggcccaggactgggtttccctttaggctcgggcctaccctggccctcgctgttggaatctccaggaggtaaagcgacctcgatttttgttgcccgcattcccgggcgtgagtgtccttcccaggaggctcaggaggccgtttctgttgcattctgagcctccgttgcaaaaactgaagcccgtgggtctcggcaggcctcctagctcgctcgccccgggacaggccctcgcctacacccctggaagtaaggagccccgggctctttcgtccttttcggggtgtggagcccctggggcccttgaaaggtgaggcctcagaggcgagggaggggtgagcggggagctctgcccgcctgcggctgcgcccccgctgtggactaggaggcaggccaaccctccggactttgggggaaaaaccacagcgggctccttgcggaaactttggccgttctaacttgccaagagcctgagtgaggccttggaagcctccagccccggctcaggtcgggacgcggctgctgagctttctcaggcccgcaggacagcggcccccgccggtggcgccgctgcatttaggccctttccagaccggtggcggcagccaacccgagacttgcgtccctcgggcccggggcagctaggaggtcggcgcgcagcgggccgggtcaggactgggtcgagcagacagagctgcagcccccgccttgcccggcttctcgcggctggagagcagagcgatgtcacccggagccccgcctgggtggtaacgagaccctggccagtcacccctgcagcccagactaacttctttcaacagcctctgatggtaattacagtaatcgaagctgccatatatctttaggcaattatgacacacaaaaagccccgaggggaccccctggcgagggaagttaagaacggttttcc

SEQ ID NO: 11246 - DNA, 6000 bp, Homo sapiens
aaaagaaagctgtataaacgatgtacacttgtggacaagaacagataggaatgtagaaaccttaaaaatggtttgatctgttaggatatcagaattgtcggtggtatttctgtttttgttttagtcctattaatattattgcaattttatgtaattataaattttaaaaatcataagttaacgttatcccaacagtagcctcaaattcaaattatcatttagtgattagaagatactttaagaatcatttgattatattcattgccctttctcctgttgtgatggttatagtatgaaccttggaggatatttcaggagctgcagttttcacagctctcattctcttcccaggaactaggcatatttctattgattaagcctggaaagatactttggaaacttcattcagtaaatgtgtataagacagcagagaagttggaagcaaagaacattcctgcgtcaataaaattagatttctttctaatattaaaatagtagccagtattattcctgacactttctagttgtcaaagatgttttattacaattacaatgcaatagtactttgatctacataaagacccgttgtagtattgtttatctttgttcctagctaaagcttcagatctacatttttttcctcaatgaatacaagtatccaataaatgaagactcaatgaggaaaaaatatttggtataaatatttcattgtgtttttcagttttacattccatctcttgatctttccctcaaattgaaagacagttttaacagtttcgcagtgcctgtggacttttactttatttgttggctcttaattttgagtatggaagtagagataaccttgataatgggaaattttcaaattagtaaaatggatttgccaagcagggaaaagatggtttatgtactgaagtccacactagcacctgccaagaaagtggacatggtgttaacatctgtcacaaacgtgtttttcagggtggatcatttgtacacattctttgttcagtggtctcccgatgtctatggaaaagatgccaaagagcaaggctttgtggtggtggagaaggaagaactgaacatgattgacaacttcttcagtgagccaacaaccaagagctgggaggtgagcacttgggcagggttagaccgtcgtagttcctaaggtacagtaagcagtctcgcattcagattccatgtaacaggctggtaagaaactagagtccctgtgcacctatgaaattacagaggaaaataactttattcctccgtttgaaaaaaaacaccaccaccagcaccaccgctatgtacacaggcacacagttcattctgaccacactagatgaatctacttatattcttactcatagctccatgccttagttcagagctcagcaaatttttttttgtaaagggcaagataataaatatatttggctttgtaggccatacagttcctgttgcaggtactcatagctgccattatagaacagaagcaaccatagtatgtaaatgaatgagcatgactgtgtttcatttcacatagttattatgtgtcacaaaatattgttattaatttttattgaatcccttaaaaaatatgaaatctttcttagcttaagtgccatacaaaaacaggtggtagactggctttggctgacaagctgatatagtttggctccacgtccccatgcaaatcatatcataattataatccccaaatgtcaagggaggcacctggtgggaggtgattggatcatggggacagtttccccgtgctgttctcatgatagtgagggagttctcacaagatctgatggttttaaaagtggcagtttccgctacgctcgctcgctctcctgccgccttgtgaagaaggtgcttacctctcctttgccttctgccatgattgtaagtttcccaaggcctccccagctatgtggaactgtgagccaattaaacctcttttgtttgtaaattactcagtttcaggtagcatctttatagcagtgtgaaaacggactaatacacaagctgtagtttgccagacctcagttcccttcatccagtcaggcaagcatgtatcaagtacttctttaggcgagggccctggaaatacaatgatggataacataggctctcaatacttaacaagcttgcagcactgggaaattgggagatgagactaggaaaaataggtctacccctccttcctgttctgctgctctcttgaaccccacttagcatttcttctttcccagcttagacagatggtaaatgaattcaaacacatccttaccaggactcctgagttcctccacccctctcccatctactgcacccatctagcctgcgtgcaatcctggatgaacccaccctcacacttttctgctcctaggcagccaagcattgctggagagaacctgtccaccagggagaatggtgccattacaaatacatggttctgaattcatctgtgtccatgtataagtggccctgcaatactaatttaaactcttcactcaatctgtagttgcttttttgatgtatggtagatgatatttttaatagtcaatttttttccagcactatttaatgatttccaatgtttccttcatcatgttgaaagatcttacatatggactgtggggctgtataacttgtcatttaaatatacaagcaagcttggatactctgtgcttaaaagcttcagtggcctccttattgactctgctgattcttacccacctgttagaataactacctgggaattttaaaaaactgaatcctagatccttattactagagacattaattcagtaggtctggagggaggaatgttagaatctgtatttttcaaagctcccagatgatttccaaacagttatgttttggaaacactgacctgtagggtaagttttaagctccttcgtggcatcagggctcttctttttctctgctcctcctaccttttctgtctcatctaccttcctcatcactgctttccttgctgtctcttctccagccaatgtgaacccagaatccatctctgcattcctgctgtgccctgtccctggaacatcttctcacaccctatccttgctctcaaactgaagcaccatctcctctgtgaataagctatctcagaaccccccaggtcaccccaacctcctttgagtgtctgctgtagattttggcatctgtatcctataaaccaaaaacaatgcctgagacagatctcaatcaatttagaggtttattttgctaaggttgaggatgcatctggttagggagggaaaaagagacacaagccacagtaggatctgtgtcctgcactttttccaaagagggttttgagggcttcagtatttaaagggggaaaagtgggctggagaggaaggagaaaagaggagggtagaaaaaatgagacaaacggttactttcttgtgagtctttgattagtgtgcactgaatccaaatgttgcatgtgcaaaggagagggtagaggaaccctcaatcatgtatgccttgtgcgcagtaaatctgcactttacataagatgaagtaaacagagtcgtggaagaagtccagtatgcattggtctggaggtgagcagtaaggtcaatttctagtctgctcttgtttccgacttgtgaaaataagctgttaatttacattgtccaggtgagggagaccacctggggagacagctgtttagaaacaaaaggaaagatggtttttgtttgtgtggctcagtttcaaagcttaattttccctttttttgtagtgagtttgtgatcccaagattttattttccttttacaatcacatggaatggcacccatttatttagaattgtttctctactgtctcctcacctgctggagactgtgagcagctttatgtctctgtgcctggcaaagcacctggcacccaccatcatataggaaataataaatgtccgctgtcctggagtcccaggggcccagaggagagtgttgtcttgctggcattctgtcccaggttgtgctcaggctgttgcattgagagtcagttctgctggccgtggactggtctctaagtatctgctagagtcttctttataacccccagtgtgagcaatacaatacactctgatccccgcagctgtgcccaagactgaaaggccacttcggatctggaagaatcacagaaatatcactgaaaattgatccagtgctgatctgtatttctttctaacctcctgacatgtgatctgaagtgtagaggaggactcatcctgcttattagtcattaaaactaattccaaaatgtaaaaagataagtattactctgccaactgttttataaaactacatgtaagatgacatctttcacaacctcatgtaaaccagatgttttcccattcttttaagtccctcccaccaacaaacatgacatagtattgaagtgaaatgccgtttgttctaactgtaatgaagcctacctccaccgaaggctccttttcatccttcctttgagattcaagcttataccagggatcacacgtaccattttaaatggagctttagccttaaagaaggtgctgggggcgggggagaaaaaaaaaagaaaaaaaactctgaaaaggcagggctagaaaagctaggttcactggagggacgattaggaaaaaaagtataagaaggaaaagaaaaaaaatgaacaatggggttttatcatagtgttgggaaaccaccgtttcaaaggtgaaagtgtccttttacagtctcacagcgatgcctggcaggaagtgtgtttgctctaaatcctaatttgggtgtgttcctgtagaaatgttgaaacttctcctgagggaaacagaaactcaatcatgcaggaaactagatactgagaaaacagttgtagctcagcgtggctacaagtaactgtggtgtggaagcagagtagagagaaaacttgttcctcattagagagagagccacacttctcactgctcacaatgagaggccaaagattacccttggacatccagattttctattgtgccagacctgacgaagagccttttgtgaaggtatgttggagtgcgtcccgagggctaataaggtgctggtgaattctcagtgatgtacctccgagtttcttttgaaagtcgttctaattagaaaggattgtgctgacatttctaccagcaggtgttttattcattgcggagagggttatggtgtggttgcctcttctcattggagccagaaatccatatttgattttttttcattccacagcctcattttatacttgtgataaacacagagtttgctgaaaacagagtgttttatttcattcatttaaaatgcttggtttgtgattcttgatagtgttttcactacggaaacactcccccagaaaatggtaaaattagtaagcttaattttcttacttgtaaatctggctcagacgccagcgggtactttgtatctgtcattgtgcattttggaaattgagtagtgcactactgcctgacaacttgcactggatttaacttaaatgtttttctctataatataaaatcattaatactagtacattttggtgaattagttgtctaatataatccttcacttgatcttacacaaaaggccaagaagcctaatatacactcttcaatctgaaagtaatccagtgatttatccataatttaagaagggccaaaaatggattttagagtaaaatgaactttggtaattcataagcatagctagagttaaataataaatgttttgtacaatatgatgtttctaggtttagaaggggagactatttttatcatctctgaacagtacataaataattgtaacctagttgtaatttagactaaagcttcacacttctttgtactcatgctcctggtagctgttatcattcgttatttctaacagaagtggtttctatgtgcacaaccttaagagaaaacatcaggaacctgattaaaaa

SEQ ID NO: 11247 - DNA, 6000 bp, Homo sapiens
tctcaatgccttacagagcagtattgttgcccgcatgtcccacctccagccctaaggcggttttcccctatctcagtagatggaacatacaatcgggttttatacgatgagacattccattgcccagggacaggcacgagagagatgccttcctcttgtctcaactgcaaagaggcatgccttcctcttatactaatcctcctcagcacagaccctttaccggtgtcgggctgggggacggtcaggtctttcccttcccacgaggccatatttcagactatcacatggggagaaaccttggacaatacctggctttcctaggcagaggtccctgcggccttccacagtgtttgtgtccctgggtacttgagattagggagtggggatgactcttaacgagcatgctgccttcaagcatgtgtttaacaaagcacatcttgcacagcccttaatccatttaaccgtgagttgacacagcacatgtttcagagagcacggggttgggggtaaggttatagattaacagcatcccaaggcagaagaatttttcttagtacgaacaaaatggagtctcctatgtctacttctttctacacagacacagcaacaatctgatctctctttcatttccccacaccttggcccccttgttttttttttttgtttttttttttctgcaccaatctcttggcaatcatttccactattgaggcttcagttctcactgcagagctggatctacttgaaatctatcatcattagtcaaacatatcaacccatgtacaagacagcttcacttgggtgacctctcttcagtccaaatctaaatgcaacatggcttcctctattgcccacccccacccccgtctcaaacagcaccctttctaaattaataggccatgatcaaaaccttaatgattttctcctttgattcctattcaactgtcatagaaacagtcttgttcacttttctatacctgtgcatgcaaagatgactggcatggagtaagaattacataagtgtttgctaaattgatgaatgaatgacaataactctgtgaagtatgcacggatgcatgcaagttagtgtctctcttgtactccttaggatccagaggctcagagagctgggtcacttaacccagataatgcagctgatattggcacagtcagggttaattcacagtctctggctctggaataacagatcttattttcataagatctctttttcttcgctatattcgcccttctgcagcgtgtaggtcataaataaggttgttgtctctcacattagtccctcaacaccttgaatcatgtttctggcaatgatctcctggatagacttccttactgtggtatgggctccaccagtctgttctgtacccaacagtcactgtcttaccatctgactgtgcttaatctcctccgttttctccttgatctctttacagtatgctcttttcttcaccgctacttccttcttgaagctctcttatccttttattactacctctctgactactcttccttttttttttttttttttttttttttgagacagagtctctctgtcgcccaggctggaggtcagtggtgcgatcttcttggctcactgcaagctccgcctcccacgttcacgccattatcctgcctcagcctcccaagtagctgggactacaggcgcccaccaccacaagggctatgtattttttttagtagagacggggtttcaccgtgttagccaggatggtctcgatctcctgacctcatgatcctcccgtttcggcctcccaaagtgctgggattacaggcgtgagccaccgcgcccggcccctctctgactactctttcaccattttctacctcttccccttcttctttaatgtatactctcctgggttttttccttggtcctctctcctttttataggttttttctttgggaagagctcaaatcttctcaaacttttaagttaatggctccaaaatctctcccttctaccctaattatcaccaaaattcccattctgtatttccaaccacatttagttgtgctgcctctgtggggctcaaactgaacttaccttctcttcttcatcagtttctccatctcaaccttcctattacttttaatgccaccccagttttactagccacacagaacaaatcaaggattcataactgattcctccctattcttaaccctttatatcctatcagacatcgagtcctcttgggttcccttcgtaatttcttgacttgtcttaaggtcttccataatctagctgcagtcacctatctgccctcatctccactgttccccagcgcaggttccctactacagccagtctgacacagttagtccttttcgttgcaaatactagaccatggtcatcctggatcccttagaagcaatgtccattctccttttctcaggcattccggatacttctagcctttaggtccagcttgaaaaacagttttcaagctctattttgattctagtgctcacttccttctcccttcttttaccatatatcgtgattatttgaagtacttgatatgcagcaaataatcaatgaatggtgccaattatttttgttaatggtggcaacatatttttgtcttaattatccaatgaagtgaaagcttcttaagcaccaaaaatcacatcttttcttaaccccatggcacctatcacaatggacttcctggaacattaagtactcagcattctcctcttcccaatcagtctcagcacagctaaaaggagagcaaaacaaactcattttagttgcaatcaagctttcagtctgtttctatgctatgatgaaatttctccttaaaaaaaaaaggcggggccgggcgcggtggctcacgcctgtaatcccagcactttgggaggccaagacaggaggatcacgaggtcaggagatcgagatcatcctggctaacacggtgaagccccgtctctacaaaaaatacaaaaaaaaaatagccgggcctggtggcgggcgcctgtagtcccagctactcgggaggctgaggcatgagaatggcatgaacccgggaggcggagcttgcagtgagccaagatcgcgccactgcactccagcctgggcgacagagagagactccgtctcaaattaaaaaaaaaaaaaaaaaaatccaacagctcagtaagtggcaaaggttaggatggtttagaactttcaggatcaaaaaaacccttaatgtctatataacactatttttctttttttgactccaacattgccatattttcctttgaggaactcccagaattctactttaccctgaatgtgggaattactaatgataagtaggtgcatttttgaggggcctatatggtttatatagtgggaattgatactctggatgtaacacatttaccatatttgtgtaaatctcttagagaaaatttaaagttagccaaaaaaacattaactaaatgggttattaaaacacaataaactagctatgtccaaccatacatctcagaaaagatctcatatttatagagatgagagtaggaatagctccaatataggcaaataatctccaaagtacataatcttaatgtacagaaaaactaaaaattaactctaagcatgatactgaataagtattattcctcataaaactatcttcctcttttattagtcaaacaaaatcaaggttaaacaaaggcttaactgactgcttgtaaacacatccaaattatttttaaaaactgaaaaatacaattttagaatcacagaactttatgttatttgattgattataaattacattacctgtaaatagagatggcgtattttaagccttagattaaataaacttttaaaacggtcaatttttaatgattaaaaaaccccaacaagcgaatgaaaagtacataaaacttatgatttaaaaagaaaaaaaaaactataaagaaaaaaaaaaactatgaaaaaaaaacccaaccagcaagtgaaaactacacaaaactcttgacttctaaattgcatgaaggatacgaatgtcaagaaaaacaagacttccctgaccgggaatcgaacccgggccgcggcggtgagagcgccgaatcctaaccactagaccaccagggaacttgcacaacgcttcttcctaaatatatttgttgtgttaaaaatctgcacttaattcctctaaccagtaggggatagagtattgcgtctaagccacacccactttgttcttgttctgagtcctggtccctgaatctatttcctgaaattgaagcaaattctcggaagcgccgggatggccccttaaggaaaaaacctataccctccaaatctaatcctcttcctattgccatgctggaaaatatatcctggaaattctcattctttacgtaacatgtaaatctctttaccaagacaagtgttgtctggacgcgtactgtccagagccttgtaatttgctttattattttattaaccattttagctgctctttccaaatctaagttctgtccctctccgtctttcttcgttctctgtcacgcggatgttaagtccctctaaacattttactaaatctaacgatagattgccaccagctgagagcgtttctcggcgaagagccggagcgacgcgctgtcctgggtgcagagcgcgtgctcaacaaatatgggtgatgaagggtcacgtagcctcatagcacgcggttctattttatttatttggcacacgcaggctaacgaggctgagagagctgtgggtggtatgcctagtgaaggatcaggacatctgcccaaggctccaagcaagtccttcaaacccactgtgtttgttatcctcctactttccaaactgtgttattatctgggcaattgcttcacttctccgcgttatatactagacacggccaggaaatgatgcaattaccaaaggagtcaagacaccttacagcccagccttaattcagaaaccctcataaagtagatgcagagggcagtaagatataactcaactttgaaaatgtcagccgttatagttgaagaaatctgacccaagagacttcgctccgctgcaagatggaaggaagcttaagtaagacataaatttgtaatgaacttgctcacaacatccgccgccactgtgacttgcagtcatcatccattaccacaaaattaggtgagcctgtgcttgaatctcgtttcttttttttcagcagctcagagatggagtttaaatcattgatatactttatctgaaaatatgtaataatatgagaacaggaagatttaaaggggttattaagataataagatagaaaaatcatcagaagaaatttctacactttattgtattttaagtgggacccttttttcctatcccaaggaatcttagatcaagttcagtaggtggagctcttaactcttacttaaggggttgctagacctcagcattagaccatctggttttgaataaaaagattaagcagatattagtttaaatttgtataggtttagtcacaatattttacacaaagtacaaaagggtatggtgaaaaccatcctcctactcactcctttcttcttcccagaagtaaccagtgttaccagcttcttctgtatctcccagaaataatctatgcacatacaacacatatctggttcattttcctccaactttttggtttcgaaacatgtcaaagcaacagaaagttgcaactatagaacattgaacacacatatacccttcatccatacctttgccttccaatttagagctccagcaatttgtggctattaggcactaaaatgtagccagtatgaatagatgttctgtaaatgcaggatccacactgtatgtttaagccttagtatttaaaaaaaagaaatgtaaaatatcgtgttaatactttttactttaattacatttttaaatgagaataattggatatattgggttaaataaaatattaaacttaattttgctt

SEQ ID NO: 11248 - DNA, 6000 bp, Homo sapiens
gcattataattcagtgtatcctcatcttttaaaaaatggttaaaagtatgagacgcacacatcttctcataacaatacttaaaactgatcttacctcttttattgaccctataaaattgtattgcatagcagctctttggagtccgatggaaatgttctacatcttcattgtggtagtggagatgtgggtgtgtacaacagccaaaacacaacgagctatgcatttcaaatagatacattttagatacattttattgtatgcaaagcaagtcccaataaaatggcttttaaaatatatcttctttgagatttgtactttgcttatgtaaaacaaaacaaaacaaaaaccttgtttttgtgcccaagagacacaccctgacacatcggcaggtagaggcttacgtgtatatatattactgtatatttacagattcagagagagagacagagataaagctatgttaagaatattcatacataccaaaactagataaaaaccaaaaataaaagttagaaataataaaactctatattttaaatgttattctcttcttcaccttttttctcctctttccttcctctctcttcccttttttcttcaacacgctccccccacccccaccccccagccatccttccctactttctcccttctctgcacttgatccccggtgtattccagcctcgaggccaacacacgtcaccgcgtccgcctggggcaggtcggggaagggacgcgaggcggcgctgtcaccgcattctgagggccgcagcgccctgcgcccctgctggtcttgtatcatttcagtgaacgtcgctccagtctttgatggggccacactcgggatgtaaatttaggatcctcactgaaggggcgggaccctgagaggctttctcctggccccttagttgtgagttttcctgcaggcggaggagccagtttccgtcagaaccgcccagaggcaggcgctgccttcctggggtggcggagcagctggaagcgttttcggatcctggaatccgtgggcggcccgtgggaggggctgaggcgcatttccctactcacccggatccgaatccaccgcggtgctgtttcaagcgagtcagattccacatcgcgctccaccccggactcggaattcctgccccacaggtctgcattttcatagcggcagctgtgagtgccccgcggctggagaccagaagcctgaaggcaactccgtcctccccagcccacagcgccgttattccgtttctatatcagcaaacacttgtagaccagggcggggtaacgggtgatctcagtcctcgcagtgaactccgggccgcaggcttgaaaacgcgcgcgggcgcccagcccaaccccgccctgggttctgtaagcgaccgcactgggtcctttctctttcttttccggacccagcagtggcgcctaaagtctgtgaggagaaagtcgcctctgtgccccggagttcagaggtctaaggcgagtcctgaggaagaaaacgtagttgatggggcagagcagaaggggctggaggtggggtggagggagagggcattggacagaaggcctgggagacttggtgggggatgggcagccaggccgggaccctggggagtgcctcaccccgagcgagcggaagaccatctgggcttcccctagcccagaaagggtggattggcttcacctctgctggccatcacctctacatgccttggaactaaccttgtatattattattattgtcgttatttaagtattaaaagtattttttgaggtgagctgaatgagaccctttgctagagctggcacagggaggaaggtcgtcctggagggagggtagacactgtggagggaagggagacctgtgtcaggagagctgagaccacctctctgcccctcactactcttgtaatctttaggagtgtaaataatccccctaaggtggggacaggaccccagtccctgctgtgcgcaatagattatgatgatcaaaataaataatcagtgaatgtggatgggaaatctaagtaattgttaaaaccctgtgatgcttaaattttcactcacagaaatgtgtaggctaggagttttaagaggaatggttagtaattataggtatagttcagttttaaaaaatgtttgtaagagtgacaaagatagaatgaacacagttccagatcatggactgttcatcgtgtagtgagggatggtacaagatggtagatgacagctgggcatggtggcactcacctacagtcccaggtactcaggaggctgaagtggctggattgcttgggcccaggcatctgaagctgcagtgagctgtgatcacactgatgccctccaactggcggcagagtgagatctccccctcttaaaaataaataaataaataaatagtagatggagttcaagaatgcaggcaaagttggtacccatcagggaggttcaaaccatgggctagaacagtggttctaaaacttgcctacacattggaagcacgtagagagctttaaaagatattgaagcttaggtccaacctagccttactgattcaattggttttggctgtgacctgggaccgtggatattaaaaactctccaggtggttctgtgaagtggctaggtttgaggaccactggctagatgttccaaagagtaagagacgtgtgtgttggggacgagatgattctttcagtagaaagaggcttttgcatggtgttttattatcgagatataatttatgtgccacgtaatttaccatttaaaaatgtacagtccagggcccactcagaaccatcccagcaacctgaccacagctggtctttgctggacaccatgaaccacactgcccaaaccttcttcattcctgccaacagtggctgccctcccccgccccccaaccccagctatgagatgctcaaggaggagcatgaggtggctgtgctgggggcgccccacaaccctgctcccccaatgtccaccatgatccatatctgcagcgagacctccgtgtctgactatgttgtctggtccctgtccaacatcctcttcatgaacccccactgcctgggattcatagcattcacctactccctgaagtctagggacaggaagatggttggagacctgactggggcccaggcctatgcctccactgccaagtacctgaacatctgagccctgattgtgtgcatcatcatgaccattctgctcaccgtcatcatcctagtgttgatcttccaagtctgtcgatagatcaggaggcatcatccaggccaggagctctgcccatgacctgtattccacatactccaacttccattcctcgtcctggccccagagctgagttctgtatcagcgctttatcctcacacactcttctacaatggcattcaataaagtgcatgtgttcctggttaaaaaaaaaaaaatgtactggtcagtggcttttagcataatcacaacatcgtgccacagttgctattatctaattgggaagattttctttttttaaaggctagtcaagtaaagcagtgggagcggagaaggaaaaaagaaatctgtaattggttgtgatcaattagttgtaaacaccactacactctgaccagcctaattgggaagatttaaggatgtgacacggtctaatgggctcagaggcagaagcgacagtaatctggaagcaggagactgcttaggcagtggcatcccggtgggacagggcaaggagattggggagcccacttttactgcaacactggaaagagggatgtcaccagaaaaatgggggtggtgacagacaggaggttgtggcagctgtggcttccatggtagagacctcacgtgtgacattcagcagatggggtgctgtgggggtcttagagcactctgactatagctgggacagtcacagtgtttaggaagcctgtacagtgatctaggctgaatcttgtgcagtgatctaggctgaaagccgagactaaagtagtggctgtgggatcaaaatagggttggaggagctttgagtacttgagaaggaaaagggggaaatcagaaggcaccacggaaagagaaacaggggaggaagagaggatgatgtcatgcgagacgtgtagagtgtccttgtagacctgtcacattggaagctactatggtctcagaggtacagatgtcctaaagcaggctggaaaagggagtctggggagagcttggtgttggagtggacactggcaagctgcctccttggccttttgatcacccaggggctgaatagagaggcagccccgggagacctcacacacttacaggaagtgaccataagaaaggggacctagctttgagtaaaagggaggagaaggagattgtaaagctgaaacgtctaagagatttgtcgtcttagcggatcagctggggcaggtgctacagaaacagaggtagctgaggtctggaaacaggtctgcaaatctggtcactggccacatagccagtaacgctgtgcgcggctgaggggagtgtgttggaagaataaccaggcctcgtctcttctgtaagtgtgtcctggaaagaacaagcgaatgacagtcagcttgatggggtggctggcgaaacggtcttggtgaggcacgctatcctaggggtgggggtgcggggatggggtggtcgcaatacagggagggcggcagggcccaggtcgtgctcatgcggttggggctgtactctcagctgctcggagccagtccccgcatttggcggcgcttccgcgcgctcccccttttctgggctccaggtcccgccagccaaagttctccaggtctcctgaccgctggaaccttccccttctgagtgtggccccgccctcccagctcgtgattggccctaagctgcgggcgccagttttcattgggtgagcggtcgctggggtggggccaggtgacaggaaatttctggtgggccttcgcggctccgctgggttggcagccgcttgagccactgcgaggaaagcaaagtctgggccatggagatgagcctagtcctgctgttcctgatccgcactgccctttttgcaccccagggagctgctgctggtaagtggggttcctggcggtcctcggcggagcggcagcggcggggcgtttctgggggtccgggtgggtagcggcgagcgctgtgcggccgaggcggggctcaggtgcgctgtcgggggtgcggggagtggacgcggcccgttcccgccacacctcaaccctgcttccacgtctcttttcagtcctcctcgggatcgctcatcacccgccccctgcattttctggtcttgtcctgcactttctctcctctcctctcctccgtctcctctcacttttcggacaaaccagtctttctgaggcccctgggttcctgggctgctcctgtgaatggcattcgagggcccttccagcgcggccgctgaggcagccacctcccccggtgctgggggcggccctaaggtccctgaagccctgtcctctcccggagccgacgtgttctcagctcctgggccgcatctcctggagttggggccctcctttctcgggacccggagctagtgcttcctgctgctgtggggactgtggggctcctgaccctcacgctgaggggttggagtctgcaggctccgggcagaggattcttcctgcgacttctctcatccccagctcattctcccctggcctcccgctgccggggatcctctcttgtcttgcatccttccctgctactattaactccagtgatctaaggacaccagattccctcccacctcctcccctgccctcagggcaccttgggtcctgttgccctcccagctccctgttaccccttcctatctgcagttctctgatacatttctaggatgtcctctgcctcatcccctgcccccgccaccgcaggtccctcctgcctcccttatgggcctttcctagaagcagccttaacccagggctgcccctatgcct

SEQ ID NO: 11249 - DNA, 6000 bp, Homo sapiens
gctcagtgagggaaggtggtgtgtttaagtgcactcagcaggttagtggcagagcatgcctagaactcaagtctcttgactatgggctcccaaagctccaaaaaggcccatcccagggatggtgctgggtgggatttgctgaggtcctagaagctcctggtttctccccattccctgagagaagattctaatctgtaggccatctcaaggctcccatctgccttcttgtctctccaaggagcctcttggaaggagaaatccccttcccacccacttccatccttctcctcctggcctgcatctttctcatcaagattctagcagccagcgccctctgggctgcagcctggcatggacagaagccagggacacatccacccagtgaactggactgtggccatgacccagggtatcagctccaaactctgccaggtgggcttggagagcacagccatcaagggtggactgggcagggatgggaggcggtgccgagaggggccacatgagtccttggactattgcagggctgagagacacgtgaaggaagatgatgggaggaaaagcccaggagaagtcccaccagggaccagcccagcctgcatacttgccacttggccaccaggactccttgttctgctctggcaagagactactctgcctgaacactgcttctcctggaccctggaagcagggactggttgagggagtggggaggtggtaagaacacctgacaacttctgaatattggacattttaaacacttacaaataaatccaagactgtcatatttagctggatagttttgggcatcatgaaagtctcattttcttccacaggggtaagaaaatgaatttggatgagaaaaagacaagagattttgctccttgaggcccaggaccataggataccacatccctccattctcacaggctcaatcagccagtcagtttttttcttctctctcttcccttccctagatctgatcgccaagttctgcctcctcctctggggtttctctagcacccagtcttcctctgctctcctccccagcattcaccctctccatcagcttcccctggattatggaacctccctgccccaaggccccctccagctgactcagttcttccccaccaaggtcaactcctggcagactcatccattcatctccttagaactctgttttcatcatatcatttccccttcggagaaatgacaagggcttgataatgtacagcattatcaaactgggaactgatggttcaagcccctcatcatatagaagggaaactgaggctcaacaagggaaaggaacttacccaaaatccccacccaaaatccccagtagagcctggaaatccaaatttcacttggcattcaaggtgctctttcctctgactcactcctacttatttgttcaacaagtattagtttgagcaaccagtctgtggcgagtactattctgaacactggaaatacaacagtggacaaaagaggcaagagttgtgcccacacagagctcactttagtggaaggagaggagacagacaatgcacacagtaagtaagtcaatctgattccctgttagaggcacaacgtgctgaggaaaaaattaaaatcaagcagggttaggagtatgggtgtgcaggagggacaggggatgataccatcttaaatgcagaagccagaaggtgccatttgaggaacacttgaagaaggccaggaagtgagccatgaggacatcacggggaggagtattcagggccgagcgaacagccaaggcagcacatgcaacctcaactctctcttcaacacacacaccaccctggccaagactcatggggaaactgggaggagactcccctgagggtgagctgcaggggaaagaagaagtgagtcggccatattcctgggctctctggactgggccccagagaagtggatgcccaggatcccctgtggccatagctcacatggctgccttgccacctaacctgcgcttgggcacctaaggtttaaatcactaggatggagcccctggcatggccctcatgttccagcctcacttcaacatgtcactcccctggtcccagctgtgccccaaccctgccttgtccactcccaatgtaagctgctccactggctccctgtcctggagccttgggattctggtccaacctgtgttcccatggcctccctggctcaggggcacattaaacttcctcattgtgtcctggggcattgcccccttcctatagatctagggcacaggtagcaccaagaatgagccgagcccaaactgcgccttctccacctacctcctgccccagttgtgggcaccagtgccgatgaaatggcctgggaggctccccgcggcctgcctcgtgctccagggcagtggctgccatcagccccagcccagaatcaggctttcctcctcatgggagcttggccttttctctttccttctctgccatgtcagagacattcctctctggactggaatcaccacaggctctcctgcctcagactctctgcgagcactctggactgaagggaagtgaggccatttggcctcaaatttcaactctgcctcctattaagacaccttaggcaagctcctcaatccctctaaaacccagtgccctcgcttgtagaaacaaataaacaaaacaaccacttcccctactttgcaaggtttttgtgaggttgaaagaaataacattcgtggccagacatggtggctcacgcctgtaatcccagcaccttgggaggctgagtggggtggattacttgaggccaggaattcaagaccagcctggccaacatggcaaaaccctgtctctactaaaaaaaaaagaaagacaaaaattagtcaggcatgtggtgcatgcctatagtcccagctacttgggaggctgaggcagagaattgcttgaatctaggaggccaaggttgcagtgagccaagattgcgccactgcactcccgcctgggtgacagagtgagactgtctcaaaagaaaaaaaaaaaagaaagaaataacattgtgaaggtccttggccaggtgactggcacatagtaggtcctcaataaacactggtttccttcatctaacgcccagcaacatgatgtctccatgaaggccaggatcttgcctggtcacctctgtctcagcacccagcagtggaccatattcaacacttagtccagtgttgaatacagttcacctcttcacacaacacgcctgggtggcttgttagtatgaaaataactttcttataaggaaatcaaagaaagcctgatatgcattggcaagacagacataagcacatcaccaactagggtgacccgtcctggtttgttcaggactttttcagtttttgcacagaaagtcccaagaaacccctcaatcccaagcaaaaacgggaagttggtcacccaatctcccacttccacaaggcccagcttaacacattaactgattttctcatgctcctgctcccagtttcccattcctcactcccttgttcccaaaggaaggaaggaaaaagaggaaaaaaggtgagacgggaggagatgggagtgagggagaatggcctttccaggcccttttctaggtcttaccctccagattagggcaatacgcccctcccacccatccccagctgctgtagtctctctgaccactggtgcttcccctgtgtctgaggtcagatagtttattaggtttattactcacactttgtcccagttcctcgagcccaattccacagggcaacatgaatgagagccaggtgcctcctgtgcaggcagtgagtttggatcacaggagagaaacccccaaattaggagacttggagtttatatagagaatctggtatatcttcctctctggaagagagagagagagagagagagagagagagaaacgtttactctggaatgtaaatctccggtgaagaagaggaagaatgcgagcaaatctctggacgttgcactcaaggtatgtttgctattcaatcacccttcagcaaaacttggccaataccctttgcacagaaggactagaacatgcagcaatgtgaaaatatttgtgaagaattgtcttccaacagagaagatagagcattcatgaaacaaaaatagtatgccagaatttaaaaatgctcaaagaataaggaatatcttgtcttgtaaattaaaaatattaaaaaataacattttaaaagacaaaaatagaaggatggaagaaaatgaggaaatctccttgaaggcagaacaaaagagacaaaaagatggaaaatgagatagaaaagatatgaaaatgagatgaacacacgacattcaataaccaactagttaaggaattgcagaaaaatggaaggggagaagaaaatggacatgtaattatcaaagtaagaatttgtttcccagaactgaagaatgtggatccagatggaagggttctatagtgtccaggacaataaatgaagaaagacccagtccagggcacaggatcaaggtgaaacttcctgtttgaggttgtactgcatacaacctcctaaaagcttgggtggtcgtggggcactcccaaagaattgagagcaagaatggcattgagtgaggtgcagggcactctaccttcctccttcatagctgtgcaccctcagattctgtattaggaagatcctgaagatcatctttcctcttcctctcctgtcctccaattgtcacaatcctcccatctcaccccttagccgggccccagcccctgcaggcttctagctttcttcgggtcttctcatcctgtcttgcccacccttaccctcagggcagttcctgagcactgagccaaccagggcttggaagaactccctttccccacccctggaggtgcccatcatttcctttctcccaccccaagtgactttctgaggcagatgtttcctgccctcaggcgaatgctgcatcagtgcccaggcaagcccaggagttgacatttctctgcccagccatgggcctcaccctgctcttgctgctgctcctgggactagaaggtaaggttcaggaggagctgcagctctgggccccatatgctcagccccatgtccaggagtaacgtgttattgtgaatgccacacccataccagcagctgggctgggagatgctcccagctcctgcccaaaattcccacctcctttccttccccaggtcagggcatagttggcagcctccctgaggtgctgcaggcacccgtgggaagctccattctggtgcagtgccactacaggctccaggatgtcaaagctcagaaggtgtggtgccggttcttgccggaggggtgccagcccctggtgtcctcagctgtggatcgcagagctccagcgggcaggcgtacgtttctcacagacctgggtgggggcctgctgcaggtggaaatggttaccctgcaggaagaggatgctggcgagtatggctgcatggtggatggggccagggggccccagattttgcacagagtctctctgaacatactgcccccaggtgagttatcctaggccagctaccaccccttagacctaccctccccacccccgcctattgccagggctcatgggttcttgaggagtgggggcccctggggaggaggcattccaaggagatatcctcttgacagctctgcagggagcggaaaccaaactgggtgggaagtctgagataaatcagctgaaaaccatccctttcccccttccacactactgcgcttccccacaggaaggcatgtccttcccactccagggacttggcctcttcttccagcattttcaacatacttgatgctaacttattttttaattagaaatattttaaacaatgttgaatctgagtgtataaaaccagaattaatttttgtagcttccagtgttttattcctgtaatagcgggcttgatggcttaagaattatggaattcataccttaattaattttataagtc

SEQ ID NO: 11250 - DNA, 6000 bp, Homo sapiens
acttttaaatattttatcttaacatccttggcctcaaaattgtcgtaattcccttaaccacaattttcaagtgggtggcaaattttatgtcataagttaacatgtaaaagacatatacttcttcaaaattttgaacatatttcattgttttcttaccttcccagtgttgctatggaaatgtctgataacagtctgatggttattcatctttactgacctattttatctctggaacatttttataattttctctttgaatttttattatagtatgcttaatatgggctatttaagtatccattctatttggaactctctgaatacattcaatttgatgtcttagatatttgtctaattctgaaaaatcctcggtaccattttttcaagtattaatagttcttctgctccatttactcttttttcttcttctgggaacagaatgacaatagaatatgtgggaactaaaaacgacaataaccaaaattaaaagctgactacgtggactccgtaggagagtggagatgacagaggatgtaattagttaactggaaggcagactgagaaaatttactcagtctgatcagagagaaaacagactgaaaataaatgaccagaacgtcagctatctgcgggacattaacataagagctaacctttgcatcatcagagtcccagaaggaaaggagaaaaaatgtgagactgaaaatgtattcaaagaaacgtctaaagtaatcaaatctgcccaaagacctaaagttacaaatacaagaatctgattttatcccaaatataataagcccaaagaaatacacaccaagacacagcatagatagccttctgagaagtaaagacaaagaaaatatcgtaaaaatggccagagagaaataattatctataaaggaataccaattctaattgtagtgaatttcttatctgaaacaattgaagccagaaaaatgtggcacaacattgttcaaatgctgtaaaagacaaacaacacaattgaataaatatttttccaagggtatacaaatgagcaaattgtgcatgctcaagatgaagatgctcaatatcattagtcattaggtaactacaattcaaaacttaagtacattcactggatggctgtaaacagaaagccaatacaagtattggagagattgtagagaaatgagaactcatacattgctggagagggtgtaaaatttgcagccactttggaaaactattggtagttcctgaaaatgttaaacatagagttgccatatgacccagtagttctactattggttatgtactcaagagaaatgaaaacgtatgtccacacaaaaacttgtacatgaatagtcatagtaacactgcttataatagttgaacagtggaaacaaataaaatatttgtcaactgataaatggtaaacatatatatccattcagtggaatattattcagcctttaaaaggaatgatgtattaatacaacgtatagcacaagtacagctacaacatggacaaacctggaaaacatgccaaatgaaagaatccagtcacaaggaacacatattgttcaattatgtttttatgacatatccagaattgataaaggcatttttgattgaagatatttttgtctagaaagacaaaaatattagtggttgcctgggactgtaggaatggggactgtggtaagctgataaatggtctcttaaaagatatctgtgtcctaatccctggaacctgtgattgttacccttatatggcaaaaaacaaaaaaaaaatgatctttgctgatatgagtgagttaaacatcttgagatggtgagattatcctggattacgtagatgggaactaaatgcaatcacatgtatccttatgtaagagagtcagagtgggatttgaacacaaagaggagaaagtgatgggaagatggagcagagggagactgaagatgctggccttgaagattggagtaaaacagccccaaaccaaagaatgctggcagctacctgaagctggaaaggcaaggaacaaatttttccctagtgtctctggagagactgcagccctgtcgacatcttcatctcaatacagtgtgaactgacttcagacttctgccttcagaatggcgagacaataacttaatactgttttaagccaccaagtctgcagtaaacggatccagggagtgcctgctaacgggcatggggtttctttgggtggggaaatcctgcaaaattggtgttagttgtacaactcagtgaatatattgaaaaccactgaattgtatgctttagatgggtcagttttatattatgtgaattatagctcacagaattgttgaaaaaagtcattgtgaccttgggttaagcaaagatttattagatatgacataaaaattgattcataaaaattatatattggacttcaccagaataaatcaacataaagtgcttcacttttccattctggaaagagagaaatgacaggaaaaaaccccaccagatcagtgtttgtctgggactgaagggatgactaacaaggagcagaggaaagcttttcgggatgatggcactcttctctgtctccattacggcattggatacaagtctctagaactcccagaactcgtcactgaaaagggtgaatagtactgtatgtaaattaggccttaatttttaaatgggaaaaataaatataaagacaaaatacactgctgtattaaatcaaatgatagatgtaaaagtctaatgtatacgtatttttaatgattttgaccaatgcttccaaatttctcttaagaaagattgaatccagtgcatacttcctcgatcagcgaatgaatgtttgattctttctaccctcatcagcacagtgatcccaagggtcacactttagacgatgattggctcagtgctgggcgcactgtatcagtttcatagaatcatggattccaagcgcataaagtccccacaagagataaatcccccactcctgaagcaacttactgttctgatgggggaagggatggaggaacttactgtgtgtgctggggaggggagatggcccctgaactcagggagctcaggaagttctgaggactgggtgagaaacattgaaaaaggaagggtgaataaggaaaacaaaacacgtctgtgagctgagaggtctcaagtgacaatcgtgtctcattcctacgcccccagtgcctacctagccccatgcatagcaatgaggttgtgggaatgaacaaatgaatgaatgaattaatgagtgagtgaatgagttgagagactacaaaagcttagggtcagccgagatagacttctttgcttggagcttggggcttcaaggtcaatttaagattgtggccatgcaagcttgaggactttttgctctgagtcctgttaaaattaatgaaaatggagaccaggcctgaagagtccctgagcaaaaattaaaaaaacagttaggcctcataagtgacctcaactttgcttgatttgcaaatatcagtgaaacttaacacgagctatttcttgtaaatgtgtatattaaggaaaaatagaacttaagctcaaccaatcaaaagaaacttatataattaactagggtctttccaacaggataggccaaataagggaactatataactataactaattaaatattttcttcagtttacttgtcctgtaggagtcttccccttgcattcccccagtggagctcctcaacctcttctgtttggagctgcctgattcatgaattgttgtttgctgaaataatctgtttaaaattttattgtgcctcagtttaccttttgacagtcccatctaaggagtagaaacatggcactagtgagtagggggagcatacataatcacgggagtccagctgggtccccacacactgaaggagcagatgacacaggtaccggacatcaaaaattgatgcttctgattctaggccttggggtaagtgaagggtgtggtcttgggcctagtgctgggtcatttccactggagctggtggctgtacaggcgagatagcattgagcaggaggaagtggagggcacttgcctgcgtgctgacgtaggctggaggcaggggaggaagggggtcttgagatgaggtgggtgaggggaagtactgcggaggctgtaggaagcctgcacgagggactaggagtctagagggagctgatggtgagtagagtcgacaggaggagaggcagggagagggacagagagaggagacgtatggatagggaaaaggagaggctgctggggtgtgtgtgagactgtgtgcatgggcgtgtgtgtgtgtgtgtgaaagtgaataaaagacaaagtgagactgtgagtgtgagtgcatgtgcatgcacacctgtgtgtgagagtacaggaacccctccctcaacccaaaatttatgccctgagtcttaacaatttgcatttttcccgcttgacaaaagtaagatttcaagtgagcctgtaagaggttatttgcaacagtgaacacaagtgactgttctgagcagccaggagcctgggagagagagagaggaaggaacagaaagaatctgcaatgaatgaatgaatgagagtttataagaacttccctgtgaatgtatatatgtaagaaactagggtctgagatgctccatctcagcctaagagcccgcacccctgggtctctgagcccagaagattccaggaaggtctatacctgacgttccagaagcctcaccccagcccccttgctggatcctagggaccagtttctgggggaggttggggagggcggggagccctctgactgtgagtcctcccggcttggggccccagactgggtggagcagccacacctgcctgaagttccgaggaaaagggcggaaacagctgccagcaccgccctcataataggctcaatgaatccctgcggttggctgggggcagtgggtcccacactgcctcacttccctaaatgggcagcttcacttttagaaccccgggtccttccctggcaggcccaggtggcacatcctgtgtcgggtgggccctcaccttggatctccaggcctgacactgcccagctggatggaaccatggccccagccttcctgctgctgctgctgctgtggccacagggttgcgtctcaggtgaggggagaaggggctgacttgtggaggagggagtgggtacagaggcaggagctcagggcctttttcttaccctccttaccagcagttttcttgtttagtgttttgtgggttggggaaggaggagattagggctgacttagctctttaccctaatatcaggccccaggcgaagctaacccaggcctcccaagccaagataaagctctggaccctctctgcattggctcctttatctgctaggcttcctcaggctttaaagcagagccctcaatttcctcacacaaatagctttctctgcttggcctctgtcaggaagccctgcttagttatgacagcaatcattgcatcatgtgtgttttgaactgaatttgaacatttttcttgaaatgctgatgccacatcctgtccctgcctctgtcctgaagggaccagtgtgtgaatgcctttcccacctcacagataccaatgctccttgaggaacctcacccattcctgcccctctcgctgccatggcaaccaagttaccacttcctgttcagttctgggcatggtgggggttggcaaaactcaccactgcctgtgagaggggtgggaggtgtaggcacacatgaagacattgccctggagacccatcccaaggtcacccaactctgcacctcccagagggtagagaaacagcttcccactgccagggcagaaaggggtctctcttgtgctaagaaatcctgggctcatccaccaaataatgaagttggatcattctgtttagtttgcaagggacagagggatgcttagagagggtgctgcttcacacagagcctcagctctagtggctgctg

SEQ ID NO: 11251 - DNA, 6000 bp, Homo sapiens
gagtgatggggatgaacgtccagttggagtaagttgaggaaagaataagagatttaaaaagaggatgcaaaataggtttgagaatttcccagttatctattgctacctcaaaaaacacttaacacttagtagcttaaaacagtgactctgcagggatagtgtctgctccatgtggtattagctggggtagctcagaagctggggctggagtagctcagaagctggggctggagtcatctgaaggctcattcacccatgtctggtggttgagactggctttcagccagaacccctgcatgtgctctgggcttcctcacaacatggtggctgggttccaagggcaagttctgagaaagagagcctggtggaaacctatcacttttgatgacctagccctggaagtcacattgtgtcatttctgcagttatcttcaacaaggcagccagaaagtttcctccgggttgaagagaaagataatagactcctccctttgatgggaggaatgcgtgaagccagaatgatcgtcctgccattttctgaagatacatctgccacaaggggctttgttgtaaggggagcaaaatttaggacaatagctgggcaggggatgtgggcaggtcagtttacccagtaggcacagtgcctagggcccaatattttaaatttcttttaaaaccaaaataaaggccaagtgtggtggctcatgcctataatcccagcagttgggaggccaaggcaagaggatcacttgaacccaggagttcaagactgggaaacatagtgagaccttgtctctactaaatatcaaaaaattaaccaagcatggtggcgcacaactgtagtcctagatactcaggaggctgaggcgggaggattgcttgagcccaggaggtcgaggctgtagcgagccctgatagcaccagtgcactccagcctgggcaacagagaccctgtctcaggataaataaattagttaattaaaataaaatcggagccgggagcggtggctcatgcctgtaatcccagtactttaggaggccaaagtgggtggatcacttgaggtcaggagttcaagaccagcctgaccaacatggtgaaaccctgtctctactaaaaatagaaaataagccaggcatggtggcgtacgcctgtaatcccagctacttgggaggctgaggcaggagaatcacttgaacccggtggggcagaggttgcagtgagccgagatcgtgccattgcactccagcctgggtgacagagcgagacttcgtctcaaaataataataataataataataaaataaaatcataatttaaaagaaacaccgagtctagattatgttcttttttataccagtgataattattaatatttacttatttaatattttttcagtatttgtattatgacccatgaaggcaaaaacgtgtggggcccgtgaatgtcataatgtagccctgaatgtggggtcaaggaaggatttttgtcttgttttaataaaggcaatattacagcacacctgaatgctgacgggaatgatccattagagagggatgagtggaggctgcagaagagaaagggagtaactgcgggaaggaagctttcgagtaggtaaagagagatgtgatctaggaaacaagtggcggtgttgacggggacaaggggaagggcacgctgcttccactgagaccggaagggggcagaggacatgggcacagatacagagaagttggtaaacactggtgggaagatgagtcactgcctcatctgtctctgtgaagtgtgcaacagtgtgggagtgagtggaaggtttgagggcaggaagcgctgtggaatagtcatctcagagagggggagagggaattcggcaggaagagtatgtagtatgattgtctggcatgatctgaagtgcgtacagccagcatgatttatgatgtcctccaatgatgtccaggctccccactgtaggcaaagtgttactgcatagttagtgaacagccttaaccagggccaggccaagtgaggcgttaggaggagagaggggcacaaaagtcaaaatggagagaatgctgggccatggaatgaagataaggaggagagtgaggagatgagcaagatgacagatgttaaaaacagatcagcaggttggaagtcgcaatgagattagtgaattattggagtgaaggtattacagtaacagatggaaggggtggggtgctgataacagacggcagcgtttgaatgtttcagaggtagtagagattggtgacagcaaggcctagggtggtgatcctcaaacttcagtacgcattggaagcacctggagggcttgttaaaacacagactcctggccccagcccacagttcctgattcagcaggtctgaggtggggcctgagacattgcatttctagcaagctcccagatgctgcacttgtggctcagggaccacaagtgaatggaagtactaggtaaggtggaagaaaagctctttggaactaaagagatcaaggaccaggccaggcccggtggcttacgcatgtgggaccatgccaggttgccagcaattagagactaagagggcagtgtgacccccacacatctcactggggccgggcgcagtggctcatgcctgtaatcccagcactttgggaggccaaggcgagcagatcatctgaggtcaggagttcgaaaccagcctggtcaacatggtgaaaccccatctctactaaaaatagaaaaattggccgggcatggtggcaggcacctgtaattccagttactagggaggctgaggcaggagaatcgcttgaacccgggtggcggagttcacagtgagccgagatcgcaccactgcattccagcctgggtgaaaagagcaaaaactctgtttcaaaaaaaaaaaaaaaaaagagagagagatcaagtacctttgaggccagtgtatgggatgggctgtttatccacttggaggtcacagtcactgaaatgactgacatgatgctttgagacaagcagggaagtcaccagtgaatgacagtaatgaggagaagtaaatagtggcaaggagtcagatgtggcttcaaagggactggccttttttggggagaaaaaagtaaaaggccatttggaggcaagagttagaagcgaggaggacactagccctgttatctagaccttgaggtgtgtgtgggggagaaaaacccaccaccacttgaaaggatgacagaagaaatcacatttctccttcaggaatagcaagaaagttaaaagagctttcagagctcagtgacgtctggaggcagagaacagtgagagaggaggtcaggcctggagatgtgcaaaacaattcaggctgaacacccagtgagggatgggtaggttaaggatagattcactggaactgctgcctctgaagtcttctagaaaaatgagtgtcactgggcgtggtggctcatgcctataatcccagcactttgggagaccaaggcgggtggatcacttgaggtcaggagtttgaaaccagcctggccaacatgatgaaaccccatctctactaaaaatacaaaaattagctggctgctgggtgcatcaaaccaacatggcacatgtatacctatgtaacaaacctgtatgttgtgcacatgtaccctagaacttaaagtataataaaaaaaaaaaaaagaagaaaaaatagctgggtgttgtggtgtgcacctgtaatcccagctgctcgggaggctgaggcatgagaatcacttgaacccggaggcggaagttgcagtgagccgagatcacaccactgcactccagcctgggcgacagagcgagaccctgtctcaaaaaatagaaatttaaaaaaaaaaagcaaagaaaaagaaaaatgtgtgtccctggtcttttgatttcttggaggtgtcatttttatgttacattaaaataagcatgaatatgtaattgttcaaaagcaaattttacatgacctataatgtaaaagtaagagccttcaaagatattttaggccatgctcccagatccttctcacatgttagtattttggaggaaatgtgaaaaaggcactacccctaggtcttgtgtgaagggttggagggaggcatttgtagtttaaatcagaaagtgaaaagctcccaagatgaaaggtgtaatctggaaaggagcttcagggaccgagttagcctgggaagagagttgctcacctagagcccttcccatcatagattctgcctcttttcactagaccgtctgaggggcgagtcccagatcaccagcagattctgttttatggcctaggacttgatctcacttcctctctggatttgagtctcctgtctccaagatgggcctccctgaagcaatgtgaggcccagctaaagagatagggagtgagtgagatgggaggatcccagcctagcaccccgactctttcttcactctgcatctctctgcttacctctcagtttcttccccttctacctcttcagagtctaccagggccagcttggttgctttgttgacaaggctaagggaaggagtgaggctggaggagtttaggctggaggtcagaacttcctggggaatctctttttttttttttttttttttttttgagacagagtctcactctgtcccccaggctggagtgcagtggtgtgatcgcagctcactgcaacctctatctcccaggttcaagtgattctcctgcctcagcctcctgaatagctgggattacaggtacccaccaccatgcccagctaattttttgtatttttagtagagacaggatttcaccatgttggccaggctggtctcgaactcctgaccttgtgatccacccacctcggcctcccaaagtgctgggattacaggcatgagccaccgcacccggccacctggggaatcttctaatagtcttagggcagcttagctggcctggacccacctcccttgccacctgccccctgcaccgactgatcatgttcagtcacccaggagatgatggagaggctgatcaggcctcctggaaagggaggaagagggccctagttggagagatccatcagcagaagccagggaggagatacagacccttgctccctgatgctcctcagggctagcatggggcaggagtttagctgggaggaggcggaggcagctggcgagatagatgtggcggagctccaggagtggtacaagaagtttgtgatggagtgccccagcggcacactctttatgcatgagtttaagcgcttcttcaaggtcacagacgatgaggaggcctcccagtatgtagagggcatgttccgagccttcgacaagaatggggtaaggcaccctgaagggaaggaccagtggccagtccacctggcgccttcctccacaagtgtcctcagggagagctcccagttccccactcctcggctctttctctgctcttctttccactccgtctctctttaccttttctgtctcactcaccaaacccttctgtctcttctcttccttttgtccctttccatcttctctgtctctccttccctccctccatctcttagctgtcggctgatgctccctgtgtcctcttcttgagagctgaagggcgactggcagacagtccaggtcctctctttgtgtatttttgaccaagactctgcagcccaatgaccgggttttcgcatctgccagagcccctgtcactctaaacactaggagcaaaagagatgttctaaatgagacaaggtatcttagcatgggctatgagctccctcttgttggggttcttctgagactggtcagatcctccctgtcaagaatgctggaagaggctcctgcatgtattgggagactgggcgaatgactgcaaaagcccctttcagctcttcaagtcctggaaggtttcattaaatcattcagactagagtttctctaagcccacaatgtcactagcagctaagaagataacacatcttgtaaatgcaccag

SEQ ID NO: 11252 - DNA, 6000 bp, Homo sapiens
tggttacagttaaatctaagttgctttattcttaattttgaattagaacttatatatgagtctcaagtcagacttgtgagtgctctgaatgttcagtccttattctttcaaacacctgttcttctttgtcatcagtagtgtctactttggtgtccttgatatccattatttttactctgtatagattcctcactatttgtcagataaaactttcccttccttttctataactaaaatgctttttctttggggttcctgaagtttatggctttaggcacatataaaggcaagtgactatgtaactgtttttctcaaatgccatcttaacatcgcatagataatagtgtactaccagagcctctgcacccattttctcctcccctcccccactttaccttctcttctttcactgttctctgttcaactcagcccactcccagtccatcagacatcttcctatgatagaacatgcctacagacttctcctttatgtttcctgccatctggaacagctttttctgcttcatccactgtgttgctccaaatcttaggggaatatgttctaaaattgtttttctcctttaatctttgtaattgtactgttaaaactcatgaagtgatcatttaaaacaaactatataaataaacccatgaagatgtgtatttcttgtgcaaattaagacttataaaaatacaaactactagaattatttaacttggataaaaaagattgagtgaattactaacatttaaatacataagggataacatgattgttgaggactagctatatttgttacacattaaaaggaaacgtgctctaatttaagtaaaaagattcctcagtgagatataagggagaactgttaatgttaaataacaaaaacattgttaaataatggaatggctcacttaagttggttatctctattctttttggagcagccaaatagtatatctgttcatgtgcttcaaatctgataaatattcatgctctatgaagaaggatatgtgtgtgtgtgtgtgtgtgtgtgtaagagagagagaaagtcagataagcatggacagaaacacacaatattggggagcaagccacagtgaggagtgtggcttgttaaataagatccttgacagttgtattgtgttcttggggcagatgagtagttttttttaaagtacttttgagagaacagtgttttctacttttacatttctgtatttcacaggataaagcttctgctatagaagaaatgtaacatcaaaacaaaagcaagatttaacatgaaattttaaaagttgtacttatagagattttttgagttacgtattattcaccatactactggagattaaatttcataaatgtataatttttgtacttataaataccatcccatcttgttcctgaaacaactgaaatgatagtatttgattattttattggaataatagcttacaagatcaagacaaaatttttgttaaatatttattttgtttcatgtgttgccacgtgaaaagtgatgaatttcacataaacttttatatttcaagaaaagtttctatatctcctagagagactatattatgtaaaaacgttaggtcttggctttccaaacttttactattatttgttaaccttgttatttaaactgcatggagatctttttaaagtgatattttatttttggaaacccataaaaatgttaaaataaacaaacaggaaaggatatagatggaatctgaactatccttatatgcaaaagagttggctgaacaaaaaattgcaaggatcattgctttgggaactaaaatctagaacttccaaataagacttttctttctatttgatatttacagactttgtacataaacaagtacaataaacaacttaataaatcttacagttaactgtcaatgctataattcacaaatgttttttatgtttaagaaaattaaaagggctatttggagtatttgttacatttaaaggacttagtaaaattcaattcaatatccactgttaaatacaaatagtttatttggctgaagggaagttttaatttttagcaggtaatgtatattttcttataacagacaatagttcaaagggaaggttacaacaatctgcatattggacatttgaaaaagaaatataaacactgtcaaaaatcaatcaaaatgacaggaacatcatgtttagaaaacttagagggggattttccaaaaaatttttaaggagctaagtactagtagcatatttaggtgaaagcttttgtggcttctaaatgaaaagaatatatgagataatcatgctagttttctatgtttacaaaacacacagaagatatatatcacaaactttacccagagtaatattatattccatgtcataatttggtttattttcaatcacaagaataaaacatctattagtaagaatcatacattccaagccttcaaaaccagaaaatcccactataatttttagtttctaaactctgtttatttgaagaacttcaagatcgtgtaaaatattacaattatttgaagaacacttttttaaaagttaagctaaaacagcatcggtcttagaagtaaatacaatttgcaaaaaggcatacaaaatttcctatcttttcagtctatcttttcaagcctaaccacctagaaataggctactttacctataattgaatagaataaagtgtctttaaagatgcaaatatgttcagtatttgagaatagctatcttaaaaaaaataagttattctgataaccaggttgcaataggacaagtcatggtaaccttccatttttaagattcagttacaaaaggcaattttatatcctattattccaaagggtttgaggctttatttcttcttcctcatatgtatgatgatttctggatgttttagtatagggcatcacactggtgcagcacacttgggcttacagtgcagcccaaggcatttgcagcaagtatttcccactaggaatgtaaggagctaggaggttacaaggcttgaggaaacaatctagaaaaccacaatacagcttgttggtcctttccccacaaataacctttttaaaccagacccataaaatgcagtttattatctaacatttttaaggagaatcttttgttaaatgttaacaaaagaacgactatccaaattccctttaaaatgcaatccttaaaaaatattgaactctcaagtctttttggaaagtgcttaaatcatctggagataaatatcatttggtgtccttgttttctaacaaatggctttttctattgtttccattaatttcacccatattcgtttttttaaaaacaaggcccttatcctcatcagcaaaacacagatgtatgatttagcatataaaatcggtaattacatactaatttacgaaagatttttttttctccttttcgtcagttttcaagaagtcttcccgtgattaactgtaaacaggaatggtttacatctcaaattagaagccattaattagcatgacgaagtcaactgcaagatacacagattatttaaattatttaatcactattcaccttggctaaactgtagtatactctttcaatatccttaggcaggttatcgatctgtcactaaattacctccagatcagttagacatgaatattagcgtcctttcctttccctcaggtttacattctcccttctcgtaaacacttaaaaaagctttaaggttctttaattccaaatacctaattagccatcactagcctttttgtaataaggaaaaagagtatctgaagtacaaatcaagagttcgctttgcccgtttaacaataaaaaacatttaaaaaacgtacgccaaaggcaatggcagtaataaaagaaatatgcagaggtggcttcagcaaataacgggtttgcaaaacgcaagtgcttaacaaaaagcagcccaaacctctattgcaatatacagcactccaataaattacacaacacttgcataggctgcagaaataacgcaggacaagacttacacagatgccaatccgcagcatttatacacatgcacatggcaagagacagaaaccaaacactatcattcaactcgggaagggtagcgcgatcccgagcttgcccagcgtgagagtgctctctgcgtgtgtgtctgtgtacgcgcgtgagtgagacccatccttggggcatttcccctctctgggcagttttgcttcatttgtttcatatttctgctacatagaaactaacttccatctcagctccagccagcgccgctgaatagagcctgtgctgcggctccgtgtgcgtcagatccctccgcggaaccgtccccggccccctccctgccactatcggcctccacagagaaagcgccttccagccaaccggcggcttgggctccgacatcttctccgactggaaataaataaataaatcgcacgccctgcggggaggagcgggtgggggtctcactgtgccgcgtgcggagcgctggggacgaggggtcggaggcactccttttttagcgccggggggcgggggcgcgggccagagccggggccgagccctgggccgcgaaggcggcggactcctttctgcggcggagggatccgcggcggaggcggccacggccgtagtcgctgcctgagagttgttgtttcctcctcctcctcctccgcctccgccgccgttgcttgaatggtggagccgaagctcggctcgtgaacacacactgacagctatagggcaggcggcggcaccgtccccgcttcccctcggcggcggggtgtcccgtcggcggccctgaagtgacccataaacatgtcttgtgagaggaaaggcctctcggagctgcgatcgggtaagtcggggggctgccggggccgctggcaccgggcgattccgcccgcggtcccccgccccccgccgcccgaccgctcagcctgtgtgtctccccgtccctctctcccgcgcagagctctacttcctcatcgcccggttcctggaagatggaccctgtcagcaggcggctcaggtacggcggcgcgcggcgcgggccgggccggcgctcgccgctcgcgggcgtgggggagggaggcggcggcggcggggccgcggcccggggcgcggggctcagctctccccgctttgttgttgcaggtgctgatccgcgaggtggccgagaaggaggtaagggcggcggcggcccggcgcgtcccgccgccgcgcggccgcctctgggccgctgcgccgccgctgccgccgccggcagggcgcggggcgcggggctcggggtccccgccggggcgcggggcgggcgggggaggggagcgggcgggtaggggccgggggccgggctcacggggtgtcctctccccgcagctgctgccccggcgcaccgactggaccgggaaggagcatcccaggacctaccagaatctggtgagacattcacgtcgcagagcaaagaaacttttccctgagtcgaataaaaattgaatttcccgcaattttttacagagacaaaaacttggccctagaacgtgaaagctccaaaggccatggggagggttgggaggccggcgcggggtctgcgggggccagtggccgggggtactcgtacttcggggccgcaggggctgcggacaatttatttgtgatattttgttaatgtgctagaaataaagatacgtcatgagtgttgtgcagtgcaaggccggaggaggaggggccggcgcgcgcgtccgtgcgggcgcgggggcgcgcgagagtcggcggcggcgggagcggcgcgaagagggagagcgcgctcgctcgttcgcttgctcgctctgcacgcgcggccggctcggctttctcctgccctacacaatagctggtgactaactgctccgaagtggcattagcatttcacaagcaggctatccagccgctgcggtaccgtggcaagacattattttttccccctctgtcgtttattttgt

SEQ ID NO: 11253 - DNA, 6000 bp, Homo sapiens
gggatgggatggagtccttattttgctgtgtcctcaccatgaactttggggatttccttcccttaactttctcacctccttgagcctggatggctcttggcaccagccatgctaacaatctgacaaaaaggaatggctaaaccaatgtatcccaatccctggttctagctactgagcatatctaattcattcccaaatagtcatttgggtgctaaaaagagcaaattaatcacactcctgtgagtttaagcagcaggagcaagaaggagaggtaaatatcacagagattgaacctgaaaagtaccaggggtggaaaaactgtgtaaaacatacctggggtaaagaatctgcacaaatattaaatttgattgaaggttgggaaaacaaagagtgggttccttggaaggtcacagaatgccctggttcctcttgctgttaatgcagttgtgaagtatgcttatgcaatcattgacatttagccttgaaagggtgtggcttatgggctttggccaaggtaagttccctttgaggatttgggatcagggattttcatctcccaggggcccaaggagctgcctagaggggctgcctgggaagaagaagacacttttctaggtatctggatgtgtgcagtttttaatcactcttcaggttccttgcaactacagaagagaaagaaagtgaaataaacaggttgtgcccagcaaaactgagatggagcaaaagcatgaggtgaggactgtggggcgagtttcacccacagaattacgctcctgctctggaagtatgttgagaactccacaggcttttatagatacctgtcatcagaatccaagtaccggcattcagcaaatatttgttgagagcaagggcctagtctattaaatactctagtccccgaattatagtgtaagcaacacatgaaaagcttgtttgaaaatgcagatttccaagcctagccattcaataccttgggactggggcctagggatctgcactaatatcaggcagctcatttgatttgggaccgttagttcttggactcttattgttgctttgtaaaaactaaccttggtctcttcaaaagttagcacccaatcaaagtagagacttgactggaaaatacaaacaaaatattcttttgccacctcttatttgttgtttttgatgttgttttgttacacacctgaattcttcactgtgtattttttgacctatttatggaagattagtaacttaatctggaattacaaactatcagaagcaacacagtatcattttcacttttcccctttcttcctttctccctctgtctgtctctctctctctctctctctgtgtgtgtgtgtgtgtgtgtgtgtgtctgtctgccaatgtctctgtctctttctttgccttaatgatagtcatgactatcatttgttttgccctgctgtctgaaaaatgcaaagtaggtgtacagttgcaactatcaaaagcaacaatatgtacattctggatctgacttctccagtaatttgtcattacttacagcaaaagcctaagggaccctgcctgtgtctgcctgaaagaggaaaagagggacagttcaagaaggaggtgatctgcaagtcattctttcccttgaaaacttcctctcaagcctggtgtggtggcttgcacctatataactactcaggaggctgaggcaggaggatctcttcagcccagcagtctgacgtgcagtgagctatgattgtgccactgcatgccagcctgggcaacagaatgagatcttacctctaaaaaaaaaattttaatattaagcatttttttttcggaatgtcaaagatccacaacattcattagcagtggcattcaatttttttgaccaagaccatactaaaaatatatttcatgtcacaatccaacatacacacatacatatctgtgttgtgtatgtgtttatatgagcacatatggaaaatagaaacaattatcttatgaaacattacttacctttaccatatatactctgctattttctatgcttggccctttctttgcttttcttagccttcccttctcccttctccctctctctctctctctctctgtgtgtgtgtttgcgtgtgtgtgtctgtcaatgtctctgtctctttcttttccttaatgatagtcatgacactataaatggttttgccctgctgattgaaaaatgtgaagtaggtgtacagttccaacagttttgagtaggacaaaagaggagaggagctggaattggaaaacaagtttgttcactattttttttctttctgtctcagtcagtaactctgttaatttatccaggtctaccttagctaagatagtatatacatcctacttttactgtcttagaggctgatattccaaagtagtagaaatgctcagtggaatatattgataaacaaatgagtctgtacttcttaccagcttgacctcctcactgtcttctatgtgacaccctcatttctgcccagatgtctttatctcttaacctagaattctagctacctgctaaatcattctctttgcctactcttcttacctccagggccaccagtagaggtttgcactgactttcccagatcttgaaggctactaaaggtacaagggagaacacttcatttcctagagtagtgctcagccaggtgcaatctacatcaaaggaaagataagcaatgctgttgtttttcaaccgaagctgttattttcataacttgtaaatgaactaaagattccaagaactcgaggtcctcacaatcagctttcttcatccaacaagcaagcttcaatttcatcgtagcatttttattgtgtgcagtaaaaacattcacaattttgtttgctgttgatgatctgagtgtttggttttgaaaaaaaattaacaaagaagccaattttgtgagttatttttcatcacagaggagaaatattcaccttagcactacctttgttgtggcacctttccatctccatgaagaaaaatagccatccagtccagattgcaagtgctactcagtatccttctcacacatatcttactaaaaatgttttcactgactttttctttatttaactatcaagtatttggcaaattaatatcttgaaagacatcttcattataaatattattttaatgataaaattattaacttgtaaatttttatctagctctaagcaattggtttttatcttaattcgtttcagtatactattgtcattcactgaatgcccaagaacagggaatctatcaaaaatgattaagatcatgtcaaaaggacacaagcactaatttgaaagggtatgcattggctaaagatgtggtaataggagcattaaaaaggtaataataatgatagcaatacactgatgcacaccaaatatgtaaaaatccatgagttcataaagatgttccaaaaaagaaagtaatcaaccacctctggagagtactagatcaattaatgtattctgaaaattactaaagaaaaagtgaaatattaaacttcattgcttttttaatacatatttaatacatgatatttttaatacatatttgcagcctctgtgttaccaaagtggatttggccatatttgtaatgtaaggcttcaacacattttcctatgatgtgagctttgcctgctaagatgattctgaaactaactttgcccaattttgctttttctataatttcatatgaatgcaatcattcagtgtggtcttttgtatttgacttctttcgtacagcactttgtttttgatattcatccatgtaggaaaattttttattgttttttattgctgaatagtattccactgcatgtgctcatcacaatttgcttacccattcactagcgcttttcctgcatctgctgaaaggattgtttttccccctttattctattaatcctgccaattacattgattgattctcagatattaaaaaagcagctttgcattcccaagataagccccacaggtcatgatgtattgtccctttaaatgttgttgagtttcatttactaaaattttgttcacgacttttgtgtctatgtttatgagtgatattggtctgtaactctcttttgaagtctttcactggttttggtatcagagtaaatctggtctcataaaatgaattcagaaatatttttgcaatgctcattttatgccttgcagaactttgagaaatattacgcataaagtgtaacatgacgggtgtcattcaaatatatgtctcaaatataaaataatcagtttttgccttgttctttcttttcctaatttccgtaacaaacatgtcctattcgtcttcacatctagtttgaagttagctgaattagtgagtgatttataatcacagatttcagaaaattagagctaagtgattttagggactgttgtcactatatatctagggggggaaactgaggcctttagaagttgccacgctcttccagtacagagtaccttcccacgctttacagattcccaccatgtaacattcattaaaagcctttatgggtaggaaatgaataaggtacctgctgtgtatatatttacattataaagtttacgtattcattcttactctttttccttcctatgaagacacacactgttcttattcttacaatctcaaagagagagcagcgaaacaatgaaacttcaggattgtgtggcctggaggctactagttgaactgggcatgctcagtcgccaggcagatttttttcggtgaagtggaaactacaacagcgcgtaccgcgcgcggaggtgggcgtgccctcgtggaatttagaacgttgcctcagccaatggggcctcgcggccggctggcggggctcctcattggagcagcagggaggcgagcagagggcccccagagggagccgcggaggtgcaggtcgaagaggccgggctacgtcgtgccctgcgcgtgagcagctgcagaggcagaggcagcatccagcggcggcgccagcagttccagtccgttgctttactttttgcttcaccgacatagtcattatgccgaagagaaaggtaagtcttaccaaaaaaagatttcaaaagccttcaaattctgcttacagtaaatgctggcattgcaatggctcgcgcagaacgcgcgcggtagtaacccggggattgggaatctttgctcctccacgcttgtttttagatgcctgttgcagacgttcctctctctgtcccccctacccactccgtcctcatcgatctcttaatgttactttctctccagtgacgcggtttcccttctttttgaactcattctcgctggaatgttttccacccccaacaacaagaagcaaaagcggctttccattccgaaagggagtttcctctttgcaaactgccaggttgcgaattagtgtgaagggaaaacagcgagaggagaaaaacaagtacaagcgtaaggagagggaagaaaataaatcaggcaaatgttgggattattcccatgcggctgtactcgcgggctgggtgcgctgcggtggctcctaggctaagggaaagagaaagccatgtttaaaatagcgctcaccctcctgctcgcctccgctgcagacccgtatgtaccaactccagtgtcaatcagggctggggccggcgaggcggggcctggcggcctggacctacccgcagttcggggcgggagcggtggagttggcagcgtggaagacgggacggcgccggggcgtccaatatggctcgtccaaggtcagggggccaccaggtcctccccagcgactggaacccacactcggttggggaaggcggggtccgcgcgctatccgcccctctgcgcgtctagcgaactggagtcatttttgtcttgtcttccgccccttgcggactgtcctcttctgcgcaggccccggacaccaactactacattcagggacacaaatctccctcggggtggggcttcgacttgtcccggggagggaagggaa

SEQ ID NO: 11254 - DNA, 6000 bp, Homo sapiens
ttttgtcctgttgggctctcaacaatgggatgatgactccctacattggtgaggtcagatcttctttactcagcctacttaatcaaatgctaatctcttccaagtacaccctcgccgacacacccagatataatgttttgccagctagctgggtataccttagccaaatcaagttgacacaaaattaaccatcacagagctcaatctgaataaacatatgaataatgagcatttgctggttgcatacccaccacccatcaaccattgcctgctttgctgttcctaagagtattaagattttccttcgggttagcatctcctcctcctccttagagcccatgtttccaggagccctcaatctaagttaaacaacgtacagtcatgcattgcttaactacagggataagttttgagaagtgtgttgatcggcaattccaccattatgtgaacatcatagagtgtacttatacaaacattatatacttatatcattacaagatgacatagcctactatacacctaggctatatggtatacctaggtatataacagctatacctgttcctaggctacaagctgtataaaccatgttactatactgaatactgcaggcaaatgtaacacaatggtatttgtgtatctaaacatagaaaaggtacagtaacgaaacaatataaaagatttaaaaaaatggtacacctatatagggcactcaccataaatggagtttgcaagactggaagttactctgggtgagccagtgagtgactggtgagtgaatgcgaaggcctagaacattactgtacactactgtagactttataaacactgtactcttgggttacactaaatttattttttaaaagttttcttcaacaataaattaaccttagcttattataactcttttacttcataaacttttaaattttttaaaactttttgactcttttgtaataacacttagctttaaaacacaaacacactgaacagctgtacaaaagtattttatttggatccttattctatacacttttttctgtttatttatttttttatagtttttaaacgttttggctaaaaagtaagacaaacatatgttggcctaggtctacctacacagggtcaggatcatcaacatcactatcttccacctccacatcttgtcccaccagaaagtcttcaggggcaataacacgcacggagcagtcatctcttatgataacaatgccttcttctggaatacctcctgaaggacctgcctgaggctgttttatagtttttttatggaagtaggagtacactgtaaaataacaattaaaaagtatagtatagtaattatataaaccagtaacatagttgtttatcattatcaatattatgcactgcacataattgtattatacttttgtatgactagcagcataagtttgtttacaccagtatcaccacaaacacgagtaatgcactataagtaatgtgtcatgctatgacattactatggctacaatgtcactagccaataggattttttcagcttcattataatcatataggaccactgtcacatatgaggtccattgaccaaaaaatcgttatgcagcgcatgactgtgtgtatcctcaagcatcctgttccccatccctcaagggtaaacttaccaagggcttttgaaaaagaatgtttaactgctcttctgagatggctaccaagagatgctctcggttgtactttgtgatgtgtcatgtgaaaaatgaaactgctagtacatgcattctcaatggaggcaataacacctccacagggggcaaaaactggagagagaaaaaatcttactctttttacatagaaagcacaaatatacatacaatacataaatagatatacagtgtatctgaggtattaaaactttgaggaggggcattaagatgtctaaaaaggctccttaaaagaacaataatgaaaaaaaagattgaaaaacactattgtagaatatagcaaataccacaaaaggcagaagagaataatggaaactcaattattgatgttatcatcaagcctatgatggaaatatggaacacttgtctgacatatatatgacccagaacattaaagtggtgttactttagtcccagtttctgctaagcctccattaaaataggtcccagatatccctacacccaaaatgagccaaataagatcagaatctcatttagaacaagcaaagaggtggtgggaaatggattttgaaacccttgtcctctcaacccctggagagtataaaagggccaaaattgaagacagagttggaagttagagagtagttattagggtgctgacatgagggagaatggtggagggtgctcaaactcggagggacttcaaggaatttacttaaatagttttgatatgtatccggaaacgtgtggagacacacagactggtgactgaagttgacatgaaattctgaggtcaagtttctatccttaattcatgaaagttaaaggaaatgcaaagtcaaaattgaagtgaactgagagaggttcagctcccctccatcattcctctgcatttaaactttattacttaggattatttggttacaagtgacaaaaatacaacttggaccagcttaaatgaaatggtaatttactagctcacataaccaaatcacagaatgtaagagatggattggaccttgggaatgactgaacccagagacataaacactgatgaaactttccatctattactagaagctagggaaaaggcgcaggcagacaaaaaagaaaaaagtaatctgcaagcaagttggacaaaaattgattttagactggcatcaatattagaagtccaaatcagtggataaaacatagaagtgttggggtagaagatattcaaaatcatgtaatcaattcactttgaaatgcatctagcaaaatggtagatggatgtaaatatggatggagagatgagatgcacatatgtatattatgataaagcaagtatagtaaaatgttaaaggtagaatcctggtggtgggcatataggtgttcaccataaattctttcaacttttctctatatttgacatttttgtaacaaaattttggggggaaaaatcaagcaggagaactgcatcatggctgtggtaattaattagtcctttgtcaagattccagtcctaaactgaaggtacaggaaacatatcttacactccagggaaagggaggactgacaaaagctattcatttgtacagaatatctaagtatttattgagttcccacctggcagcaagatcaaggtgttaaaaggaaatcggatatagacctgcagagttatagcacaaggtaagaagtgaccatccttgtttggaaatgcaaggggaatgacaggtgaaaatgactgtcccactgattatatcagcttctactgggtatcagtgcaccacgcatcatttcacatgccctgatttctcacttggacaaccaactgggtgatggcatccttaagtgacataggaaaataacataggaatatatttgtggtgggtgacaacttttgaatttgctgtggtatcttgaagtttaggtgtttgtctaagtagagatgaccaataggtccagaattcaggaaaaatcttgagtatttggagattaggagtcatcattataaaaatagtatgagaaacagagaccttgggtaagagcatgcaaagagagagtgtacagtgaaaagaaattatcgtttctttcatttttttatccactcatcaaactgtcactgcgtgtcactagaactacgaataaaaagtgacagaatgtttcccaggagtttgtaacttcttgatggtcaaatccaatgatctatttgcaatcccaaatgtgtttaacataattccacagttaggctttatgtcaaacggactatataaaattcaacagttagtttaaaactaaaacttgtgctggtagtacaacatgagcaatactgaccatcttggggacagaatgatctagtttgtgaggaccataattgctttaaactctcagcgtgttttctcatgtcctgaaaatggtgacaaaaatattcgattttcaaggcgactgttgatgattcatttaccaatctaaagcactagtgccccgcactcgtaatccataacttgagatgaacacaccaaattataaatatcttattcacctaatccgtggaaagtttgtaacaccaaaatattaacttctgttcttgatcactcagcctccatagttattcatgttgcatgatctgattcgctcttttagaatttctcatagcgtcaggtactagctcaaaataacaggagcaactgcttctttccatatcccacattgaggaaaacacattttgcaagccgtcttaaagaaacaggtcaacttagtttagggatgaaacttaaaagtaagcttcgtcacaaaaaacacagttcaacaccacctcgcccggctgcaggcagctcagaggacaggaagtgaggccaagacatatttcacgcagcacagactaaaccccagcttttatctttcccgctggtccttaagggaccaaccgtactgattttccgtcatgttccgcgccacttccgttcgcgcactttaattacgtcaggcgtcctctctcgcggtatcatccggttgctgaggccctgtaataaaggtctcgcgaaatttgttctagaggtccaagtttgcttcttagcttactccaccccacccccaacctgtccctccttttctttccaagtcacaaaattctcccctcccctaccccggagtttacggccctcctcctgtttccgatttcagcccggaaccggaagtgtagtgggcggggcccgtcggcggaaaacgcagcggagccagagccggacacggctgtggccgctgcctctacccccgccacggatcgccgggtagtaggactgcgcggctccaggctgagggtcggtccggaggcgggtgggcgcgggtctcacccggattgtccgggtggcaccgttcccggccccaccgggcgccgcgagggatcatgtctacagcctctgccgcctcctcctcctcctcgtcttcggccggtgagatgatcgaagccccttcccaggtcctcaactttgaagagatcgactacaaggagatcgaggtggaagaggtgagcgaggcccggcatggagacgccggtcccggcctgccccgcccccgcctctgcctggtgccggctctgaaggtgcctcccggggcccctctaattcgcgggaccctgcggggtccacccgggagaccccacagccctcagtaacgtgggagtgggggttactctctgagctcaactgctcgggagtagctgccttttttcctctcttgggtactcttgattttggatttgatattccggtgataaacaggagaatgaactggtgagatagtgtggtccaccagttctcgtatctgtaagtagtagtttcagcgaagatcgtagccgttctggagtttcagtccgctggacgtaatgttcttttttttttttttttttttttgagacggagtctcgctctgtcgcccaggccggactgcggactgcagtggcgcaatctcggctcactgcaagctccgcttcccgggttcacgccattctcctgcctcagcctcccgagtagctgggactacaggcgcccgccaccgcgcctggctaattttttgtatttttagtagagacggggtttcaccttgttagccaggatggtctcgatctcctgacctcatgatccacccgcctcggcctcccaaagtgctgggattacaggcgtgagccaccgggcccggccggacgtaatgttcttaatggccaaagattgtattatattcgacttctacttcagtacctggcatgtaggggatgctcaataaatgcttgttaaattagtagatcatcaagtctaataaagtgtttcccttagcaccgaat

SEQ ID NO: 11255 - DNA, 6000 bp, Homo sapiens
ttttgataaaacctcaaaatcatcagatctgctgctgccagaaccaaaaatagctcggcctagttgggaaagtattggtctgggagttggatggtgtgggggccctcgttttgtactaacgggcttagtgtccttgtaggcactgtgagcgtctctgcatgtccgtgctgtcttctatgcattgtggatgatggagcagcacccctgtcatcacggggtagataggtgtcccgaaaacgatgacagccatgaaaagactgggtgaacaccaagcctcaatcccaggagggagagaaagggagagccgtgataagaaagcagccgcactagaaatgcttcccagttgcccttgtggcaggaataaaatcctcctacactcaggtgtttggtggtcaaggagtggccctttggtgaggaggtaactcaccaaaggtttctgctgccttttaacttgctgtaaattagtcagccgtgctctctcctcatctgcttgacctatgactctgtggcccatgactgcctcattcctggttaatgcaaggaagggcccagtagcagccagaaatgtgaatggctattctcaaacatgggaggttacctacaccaggataaataaaatggttgcctttcctcttttacaatagtcattttgttcttctttaagatttgaaaatatagtaaggcaggtcccagaataacattgtttctttcaatgttgctttgtcataatattggtgagaaaaaaaaaaaaatcaattcctggctggagccactgtctgtgtggaatttgcaagttctcacgtgagttttctccaggtacttcagtttcctcccacatctcaaagatatcctcgttccttggtacgtctgcatggttccagtcttagtgagtgtggctgtgtgtgtgtgagcgtgcccggcaatggaatggccttctgtccagggtccccagcttgaactctgagctgccagtatgggctccagccacccaacactctgagttggaaaaagcaggttggaaaatgattgaataatgaacaaaaattgttatcaaataaaaattcatgaagtctacaataatcatacaggcatatgacaataaatgatgctgcatggaagcgttcagcgagcccatcatatttgttgttgggtttttttgaattgcatggtggtaggaggtgcttataatttttgctttaaaacatttattccttgctttaacccaccaccactatgactgctgtcactcactgattcaccaaacattgggtaaataattctcacacttgtttctattaatctttctgaaatgtacgtatagctcacatttattttcatatttaccattagaagcattttggtctttctttagaagtttagtgatgtttttgtgaccagaactatgtcataggaatttaaataaatcttaattatgtcaattagcctaaggtaaaattggcttcattgtatgttgttttgcttaaagttgcagtttccaagaacatatagataatgttaaatgggggcttattgtataattaaatagtatttattgagctctgactacatgctagtctgtgttaatgtttatttatattctttcatttactacccataataattcagtgaaaatgttaccagaaagaggtttcaatccagaccccaagagaaggttcttggatctcacgcaacaaaaaattccaggcgagtccatagagttaagtaaagccaagtttattcagaaagtaaaggaataaaagaatggctactccacaggcagagcagcctcaagggctgctgattgcctatctttatggttatttcttgattatatgctaaacagggtgtggattattcatgagtttcctgggaaaggagtcggcaatttctgggaacctaagggttcctcccttttttagaccatatagggtaactccctgatgttgccatggcatttataagctgtcatggtgctggtgggagtgtattttagcatgttagcgcaatataattcacgtataatgagcagtgagtccgaccaaggtcaccaccttggttttgttgggatttgactgccttctttaccgcatgctgttttatcagcaaggtctttgtgacctgtatcttatgctgatctcctgtctcatccagtgagttagaatgcctaacctcctccaaacgcagcccagtaggtctcagtcctattttacccagcccctattcaagatggaattgctctagttgaaatgcctatgacaaaaaggcatcattatgcccattttacagggaaggaaactttcagagggactaagttacatgccaagctcccaaaagtactacatgcagacccaggatttgaaccctgttttattttatacaaaacccatccccctgcatattatgccattttgtctcaaaaacaataatagtacccacagaaagaagatgaagaggaagagctgggagcacatatttaaccaaaaataagaagtccataggtcttggacgaatacactcctaccagcactgggcaggcagacagaagagggcccagattaaattaaaaagtgtgtgattaattggcagctagtaaagaacaagatgaaatccttcagaaaacaaatatatgagttttggtgagctgaagagatctgtatctgaagtcagaatatttaatatacatcatatataattaatattattattatttaatgttcttttaaagggtgactgggtcagtataactgagcataatctgttttgtctcagagtctggctatcttttttcccaatatcagtctctcaactaaaccaaacatgtttttaacttctcccacttaatttagtaggttaacaagtctatgtaaaagaagagtatcataatttagcttaatagtcccttgcaatactattttaatattttaaaatcaaaatatcactttaaaacctataggaattatttttgcttcctttggctttggttcttttgtatcatacaattttatcatttaaaatcaaagatcttaccatcagatttacctgggctatagtagtaattttaccacttacccatggccaaatgtgtatgacaatccctacttcatgagattatcataaagatgaaattaaatgagacaatttttttttttttttttttttttttttttgagctggagtctttctctgtcacccaggctggagtcagtggtaaaatctctgctcactgcaacctccacctcccgggttcaagcaattctcctgcctcagcctcccgagtagctgggactacaggcgcctcccaccatgcctggctaaattttgtatttttagtagagacggggtttcaccatgttggccaggctggtatcgaactcctgacctcatgatccacccaccttggcctcccaaagtgctgggattacaggcatgagccaccacgcccagccctaaatgagacaatttatgtgatttttttgcacatgggaggcactcaaaaaataaaagtgtccatttccttcacctctgaattcatactctttattttaaagttgcagtgtcgtgtatacagatgtaaaagagagctttggaatcagtgaggcctggatccaaaccccatctctgctttccaccagctgtgcgaccttgggcaaatgtcctagtctctctgaacctcactttcttcttctgtaaaaggaaaataatggtactactttgcaggaatgctgaggtttacaaatagcatatgccaagtatctggcacatgttaggtgcaaaataaatggttttgcttacacttagataaaatgacttttgttctatgaaatggagctaatgattaggttttatggaaaggctttatttatttattttatgattaggttatacaaaaatgctttatttcacctggaagcttacctgggtgtcattttatggttgtctcatctgaccatttttaaaccatggttggatcttgtggaaatgtttagagctcgttatgaagccaatgtaaacaaaggtacctatcagctgttgcagacactatcccatccacaggggcacccctgacatagctgtagcccaacttcaccctgaagtcttggaaaggttacatgattcagacagatgtagtaggcatgagattacaggccaagaggaagaggccggggctgtaggcagtatacttgacaggctcatacactgcaagccttgttccgggccccttacaaagcacctctttaggatgaaaacaagatggtctttgtaaataaaagttcatgcatttgggtaatgaagtcattttccagcgctgcagtgaaagatattcttctcccaagccctctgggtgaggactggagggaggaagaggggtggccagtgaatctgaagagaagatattagcacaaagagtgcaacagtctatcccccagaaaaaacccgagaaaccttgctcaagaaagtgggcaccctgaccctctgccttcagagatcatctacctttggttcctgccctggaatcccttttccacccactttcctgcaaactagcgggggccacataaaatatctatgtaaatatagataagacatccggtaccttgactacataaataagagtggtgaggaagcgtcacaaaagctgaatattcttctggagcccttggaggggctccaaactgagaggggagggaagaccgcagggaaaggcggacctcagtgtctgaaaagccagcttagagtgggagggcctgggagtagaaggtaaaaagggagtggtgagaatgaatgtgagaaggaagccaggacagcgcagtccccagtcccgaacggccagggagaggaggtggcctagcgctggcggggctcaccccaatccgtctgccttttgatgccgtactgtaagctccgtccatctgtaggttcttgagccagaacctctgcgggaaggagaaaaagtgaaagagggagagggagagggagagagagggggagaaggggagagagagagagggagagagaggctggaactctcccttactctcgcactttccctttatttcctaagctgctggttgcgcagccacctcgggatactgcacacggagaggagggaaaataagcgaggcaccgccgcaccacgcgggagacctacggagacccacagcgcccgagccctggaagagcactactggatgtcagcggagaaatggctttgagctcagcctggcgctcggttctgcctctgtggctcctctggagcgctgcctgctcccgcgccgcgtccggggacgacaacgcttttccttttgacattgaagggagctcagcggttggcaggcaagacccgcctgagacgagcgaaccccgcgtggctctgggacgcctgccgcctgcggccgaggtacagtgtccctgccattgccaccctgctggggcacctgcgcccccgcgggctgtgccacactcgtccttctctctctctccgcctctttcctctccccagtgccttgagagtttcacctgggctaggtcagttcggaaacttgaaataaagagttttcctttgtaagttgcatttggatgttgagagttgaaagttgaggcttcggaatgtgtctgctcaaaggggtgagagtgcatgtgttggtgctctgagttcatccgctagactctcaccggggactgcagcagcacatcggtgacttctgccacttgcgtgtcccagtagtcattttgtcaagccacggcacttaacgtgtgtgccctgtcactggcttcctgctcctctgtgctgttaggacagtgggaacactactgcaggatctttttgtctcatattagacaagaagtcttctgcagcagggaaggtgagggggtgagtgagagtggctggtcatgaaaggagctgttagacaactgctgagagggtatcttaagtagaaacgagccattgtattccagaaacaagatgtttccattaaaatcaagcctcaggatatgcta

SEQ ID NO: 11256 - DNA, 6000 bp, Homo sapiens
agactacaattcaagatgagatttgggtggggacacaaagcctaaccatatcaccaacatactactgactcttactctgtatctttactaagtgattccttatgttctacactgccagaatttcacttctctcttccttcatcctcatccctcatcccttttctctttttttaattaaaaaaattgtgggtacatagtgagtatatccctatcccctttcaaccctgaaaaacacacaaaaaaatcctaggtggggaagtcagggggcctctgataaaggcttagcttgtaagtgactgtctgtgttacaaattaagtgattctggacattgaattcttcatttttaagaattatcagagattattagattatctctaagtcactaaattttggatatgataatagggacacatcctagtccttcaggtcctaagatgaataaacctcaaggaatctacctatgtataatacaagtaggtatagtgaagatggttggcattgccaagttgctagccatatttttggctataacaatttctctaactgaactctaaaccccaacctcttttgagtctttcaagttctagaaacttattcctggctggatgcagtggctcacacctgtaatcccagcactttgggaggctgaggcaggaggatcacttatgtcagtttaagacccaccagggcaacatagtgagaccctgtctctacaaaaaatgaaaaataaaaaattatccaggagttatggtgcatgcctgtagtcctagctactcgggaggctgaggtgggagaatatggggaggattgcttgagcccaggagtttggggctgtagtgagctatgatggcaccactgcattccagcatgagcagcagagtaagaccatcatctcaaaaaagaaagaaaaaaagaaagaaagaaacttaacagttcacctgatcaatagacacaagccaaaaccacaccttccatgcaagttagactttggaatagactgcctgtgtcacttaaatctgaacctacactttctaagttaactggaccttgaaagtttgcctattcttttcttctttaactttagaacaatctgtaccttctcttcttttcttcttcaacttcagaacaacctgtaccttcttggttctgaaactttactctgaacattaaaatgttcagagtaatttgtaagtaagttaatggcttagaacgcttgcattctgagaggcagctaccattacatcacccatcaatgtaaaccgtaaacattcctcatgttacagaaggtctcagtgtccacagaattctggcaacaaatgggttgttgttgtctcagaaaagccctaggggcctgccaacatcaacttctttgtctcaggaacctgcccttcctggttccagtgctagatcttgggtgataggtggacaagctagactgggagagcccagagaaactaatcgcactgaggagggtggtagaggtgaggcggatgctaggctcaggtccaacagcaaaaggaagaaggagtccacaaaggaagggagacctcacataataacataatgccagagatagatgggcaggtgactaacttcagggagggccagtcatgaggaaaaagcagaaaaacctacaaggagattgacaagcacacaaagcaatcagaaagctaaccaggtaggcagttggtataggaaggacagaagctaatcctcagcaagtggagatccaacactgaagctgaattgagaactggctgtcttggtgagactgatgtcagcagtgccaaaccaggtctgagaggcaatggtacacaccaggagacaaagcagacacccagcatggaatagagagcccagctctagtcctccaaacaatgactatggcaaagtagaatcaatggtcacagtttgataccgctgtttgccagtacctatgtgtgtgaaaagatattttctgactaaataagtaaaaatctcattactgatcagcacaatgaacatctataatcaatttggagatgagaaacctgatgtgatgactcctgtggtgtagcaattgttttctactgaacgatcagcattcctaaggttgtctctggttcatggaagactgtttctcttactttgtctcaagtacagaaatattccctagtagtgttagatttctaggagccctttcttgttcattttgaaactcagaaatctttggatttccaaacattttccaggttttcataggctcttctcatttttagtgtactcatgagggcctcatttatgactcaaattctagagatgtctccagaagagacattataaaacaaccatgctgcctgggctctccgaggtagagctcagtgtcacagtgctcccacggtgcccatccatgaagcagaaggtacaggccacgtactgtttacatctctgaaacctggcatgaaccaagttatttccccaaacctttaaactcctctctgccgtgtcaactccgtggtggcaggaactaggtcagtttgagcttacagtcttgttctagtgtctagcacagtggccaacacctagaagacattcaatgaacacttgctgaataaattttgtaacggtttcagaaataacattagaagtataagctaccacatacataaatgtccagtgaacccaactgttataaattataataactttactaggtataactttgtaggtgttccaaatctttctctacatccagcattccagaaatagctattacctcagaggaagtcttgtccataaaataaaggcacttcagatgtttttattctacccaaagtaatgaataatgactgagcaccaccaagtaccagactttatgccaggtgttaggaaatgcaggcatgtttaatttctgtatctactctaaagagctttagtctagttgaagaagtagacattttaaaccataatatagtgtaatctgtgcaatactagtagtgctaataaagtgccaggaggaaagaggaagaaatacaaatttttctacagaaagggatttagaaagatatctacgtgagtttgctcagactgctgtgaatagcatactataaactggggtgattcgagtctcagcaaactgaacgctgagaactcaggcttcttgttccttttggctgcaagaaggttggcagccagtcagaactttacccacttgtaagagatcaggcttcttgttccttttggctgcaagaaggttggcagccagtcagaactttacccacttgtaagagattagatgtatcttccttggtgattcagaccagcctaaggggaaagacctgatgataccaactttggggattctccaagaaacaatgtccccagaacacactataaagatgctcaaagttgataagccctgcccagctgctcagagtttccagttggctctttagtcccccactctaaatcctgataggacaaggatggaacaagaagcctgaattctcagctttcagtttgctcagactcaaattaccccccagtttatagtatgctgttcacagcaatctaagcaaactcccctaggtatctttctaaattcctttctgtagaaaaatttgtatttcctccttttctccctggcactttattagcatcactagtattgcacatatcacactctattatggtttaaaatgtctatgtcttcaactaagctaaagctctttagagtagatacatgggccctaacctgactgatgtccttctaggaagagaaaattacgacacagacatgtacaaagggaagaccatgtgaagacacaaggagaagaaggtcatctacaagccaaggacagaggcctctatagaaactaaccctatcaacctcaacctcagacttccagcctccagaattacaagaaaagaaatttctgttgtttaagccacccagtctgtggtattttgttatggcaaccctagcaaacaataccctaagcctaacttttcaagtttttctccagcaggaaatctgaattatttcttttcagcttttagtagctattgtgtggacaacatggttgcatgtgcatattaaagttgttagaaaactaaatttatgccaggtcagacacttgtataacaaaaccatgaatggggagtcatcagctcatcacttagcagctacaaaggagtagttcatgcttagcagtttgtggcatttcacaaccgtcaaagaagtgaaaggcctttggatgtctatgactctcatcaacaattttctttatgaggcaaagaaagctgatcattcaagacataacagatgttttaggggttggtgatgatggtggcatatgaagaaaaacacatactctcaacaatataatagcaaatagaatctagcaatatattaaaaaggataatatattatgaccaagtagcatttataccatagaagcaaaattggtttggcattcaaaagtcaatcaattacatttgcactgaggttatcatagctgagaagacaccgtctctgtggcttcagctcctggctgcaggccgctgatggaggtccagaaggtcagctgctcacagacatcaacttggtgtcggctgcggctccagcattttccgcaggctgcagcttctgggttccaaacttttcatttctcagtctgcaagcgggttagccccgaacaggaagcaactccttctccagccgggaggtggcggcctgcggtcgacgatgcctccggggtccttgggctcaaggttccgtttgggggcgctctcgtccggcttgcgggccgcccttctccacagacggaaccttctggtggcgccgctggtttctgcggggtttgcaaacggcgcgtaccgggcccttcccgtcttccgtacaggttcctgctgttggctgggctcgggagggaacgctccaggtaaagcgctgggggaggaagcgacgccgaggagctacggtttcctccagaggtctccgcccctctgcccctatattcccagagctcgagtctgatccgggccttgccgggcaccctggaaaggcgggggtgatagtacagatggagacgcaactgcagagcattttcgaagaggtggtggtgagtgcagctgccggccatccaggactacggcttggggacggggagacgcgggggcagccgaccaaggaaactggcctgggcaacctcctctcacgcctccctttttattcccttgttttgacaccgaggttgtatgcggggaagtttagtgattctcaaactgctgtcaagttcattgtatcctttgaaatcgatacagtgacaggccagacaggtattgatagtttcagagctgattaaggtgacttgccctgtgttacattgtaatacttggctaagggaggcgcctttttaaaattaacattgtttacattttgttttttttttttttacagaaaacggaagttatagaagaggcttttcctgggtgagtgtatgcgtggcagagttttgtgtttttatgtgattgtgtctgtcagattttacttagtttcgtgttggaaggttataagatccactattctgattgtgtgtaattacctttttaaaacgaatgacaaataatgtaatttttatttttttagcatgtttatggatactcctgaagatgagaaaacaaaactaattagctgtttgggggccttcagacagttttggggtggtctttctcaggtgagcgcttcatttttaatacattcagctgatgatttttggcctcttctttttttttttttttttcttttaacatttactttcatgctgctcttaagatcttcctgagaagggagaaataaaattgttatcattttttattctggcttccatttgttttaatttgtatatttcagtggaaaacctgtgttgagaagtcaagttgatactgcacagtgtgagatgtttaaaaaaaaaaacctcccctatgttagattaattgagatcattttcatcctattc

SEQ ID NO: 11257 - DNA, 6000 bp, Homo sapiens
ttaagggaaggggcaccaattgctgggacactgtaatccatttatttgggtcagcaacctaggacagtgttcaaatctggtccctctgtcatttgcaggttgtcctggcctgctgttgctctataaaggaacaaaacttgacacagagacagagaaaccatggcctgcaaagatcaaagtgcctcccaccttccctttctagaaaggttttgccaacccctgtttacatagtgactattttctatgatgctggctccccattaggaagaacaggcagggctgggacccaagggaagagtggatgcctctactcaccagcattcctagggtcacgaacaaaacaatgaaagaataaaaaggaaaaatgaaagcacagacttactgaaattaaagtacacctgaccgagtggtagctggctgggggaagcccctcaagaatgcagctggttacagaattttctggtgttggaatacccttagtggtttcccattggttacttggttacacactatgcaaatgagagagtggcctgtgcccaagggaacaatcagagactgaagtgaagttacaaagttacaccctatgcacctgaagactggttgcagaaggggaccaatcagaggtaatttctgcttttcatctgcaagagagttgaaagtggagaggtcgcggattgtcaagggagtatcctctggtccttttgttgcttgggcacagagaggtggggctccttttgattcacttctaagaagtcagagcaaatcacccttaggttccctacatccagaccctattcgcctgcctcactgaagcctccttcaatggatttgggggtgaggtgggcctatggggtgacgaaaggtgacaaggttgggtagagagggagtaaaaggatgtgacttgggtggtggcagtgaacggtgaggggaggggtgggaagtgtctgctgatctcctggatgcaggtaagtgtctgcagcaaagtgcagggggaagttcaagggcagggagccctgggggtgctggagagtttgtgaggtggagagtggatgagagcagagcaggcctgtggctgctgagggcgggggtctggggttgactccctgcggaaccatccactttcccatacccctagccacacaaggtcccccgcctcccgcaccagacatgaccagggaagagtaaccttggtttacagatgctctccggccccagctgtatagaatctgccagaaaacatttcatccctcctcacctccctcttccccaccactccagactacagcttcctgctgctggccagggctcccagttcccaagggcaggtgaggctggagagggggcgctttgccatcatctcgccctctccagccctctcactgctctcctcctgccattactccttcgaggaccaacacagtgatggtggccactgctgctgggaacctggagccaggaggaggacagcccaggaggaagcacagtggcaatgctgagtctcgaccacgtcccccaggcttttacagggctaggttcggcaggttcccaaccaccagctggagccagtccacgccccacccacctgctctttctccagatccagaggaatcgctctgaccctttttttgtatctgcccctcaccccttcttttctccttcccttccctcctgacccttccttttcccatttccattcctgatttcaggctcgttcctttaaacaaagtttaaagggcaaggttttcctgccccaaccactcacaattgtaccctctgggttcaatcaaaggggctaaagagagcagcttgctgtccttcttcaataatgttttctagattttatcctgctggggcccagaccagctgcaaaccaaagttattcttccttggaaaatctttgtggccgcccaggcaggcattcacatttccaaattgtgccagcagtgaggtctccaaccacgatatcctcaccttcaggcctctgggggttacaacctccactccagctccacttctgcacctggggttttcccctgagccccattcactcccacaactgtctcattcattcagtcatttgctcagcctccagccacccttaaatcatgttaggcttacctggtgatggagagtaaaaccaccgtcctctctgggtccagtctttgccttcatttacacccattcaaagagcccccagggccatgaagaggccatggcatgatcgcagggctccagctgtcatctggttgggtctggcctttgctgatgttatggaaggcagggctcacatgtgaaataggaaaccttccctgagtccttagcatgtgcaaggacagggttcctggcataaactgctcatttcctctgtgttcatagtattaatttccacatgtggacatccatgcccagaaaggtgaagaaacttgcacaagaatattcagccacaatgccagctgacttccatgtctgaatgcatgctctctagatcacggccattataatcacctttcagccacgtctatccccatcctgggctggcctgaatctggtggccgagagtctgcagcaggtgtgaggcaggagggcccaggtgtgcacagagtcccctcctactgtcacctggctgtgctgcctgggactcttctgccaggcttctgccttcctcctgttcccccagtcccccggtcactggcccaggtcacccagcctcaggggtgggggctgccagggccttcccagtaccctcctttcaaacgctcctgttcccagccctatgcatgggaggcacttctcacacacagatccctggacctgccaagctctgcccctctcagatctgagaactgcccacccccgtgtgtctgttgtcctccagaccaccctccacatggcccctcctggacagaggctctagtgcatcaggccagaaacttctaggctcctgtgtccctgcacagtcacagaggggctgctatcccatccccctgtgcagaagcagagacagtccctgggcttggtctaggcctcctcccctttcccgcagcctcagggctctggggattgctggtcaccaggtgtgcatcctccccacatgacaactgtgtggagaagaaggtctgtgtctattttactcatttaatagggagaaggctgagtggctgggggcagtgtgggactcaggggctctgcccattccttatcccaacagccagggatcgctgggccccccacctccctctgccttctgcccacaggtctagatgccttcatggtgactaagacaagggggcacttggggttgcccctttgataatgagtccagtgaccatctaggggctgagcagaggtgtgggtgcagccatggattcaggtgtggttggccacggattggtgtgctggaaagtgaaccccacacgtgtgtagactcctccctcggctcctgctcttcgtggaaacacaattgattacatgattgagcaagttgttcactaggtctttttaggaagggatgtagtatattctcaaagacctcatgcttctagcagagaggcaaagaaatgtgtgagcaattgtcacacagggagatctggatgcacccactgtgaacccaggtctcagggagcaggagggtgttctgtattgtgggaacatgcaggacacacatgggagggggtatttgtgcccggctttgaaggatggctggctctttgcccagggggaagaggccagcagaatgcgctgacagttgggaaccactaggaactttcagttgaacctgctctgctgagccccctgtgccatcggtggacctgggccagggcggctgctgaactgggagctcagaggtaatctctctgaggagctttctaaatcagcaagcgtgtcacaggttgagattctagggatgaggtcctcaatgctgtcctcgattttaatgagcagccttttggccagtctgcactgggtgaagcagaagcaagacataaattgttaagataatttttaaagctgcttaattttggtaaaaacatagaacatagaatttaccatcttcaccaattgtttactatacaatatgttgttttgaacctctgaaaccctacctgctgtttctgtaataaaacctagcccaggccgggcacgctgactcatgcctgtaatcccagcactttgggaggccgaggtgggtggatcacctgaggaaaggagtttgagaccagcctggccaacaaggtgaaaccccatctctaccaaaactacaaacaattcgccgggcttggtggtgggcacccgtaatcccagctactccagaagctgaggcaagagaatcgcttgaacccaggagacaaggctgcggcgagccgacatcgggccgttgcactccagcctgtgcaataagagagaaaccccatctccaaatacataaatagataaagaaataaaaaataaaacccagcccggactgtaaccacgcccaccggggactggggaagtagtggaggggacgcgaacaggcccatggctgtgcccagggcggggtgagccagggaccccgcggcgcaagcggaaggagggagagtgccgcggacccaggcggggacaaggagacgccgaggccgctgaatattcctctgcacgtttcttcaccattaataaaaaatgctataatgattaaatgagtctgtcgtggaaggaatcgtgtcctggcaggagtggggcccgggcacgaggccaccaagctgccggagcgggtgaagaagggaagggacactagcatggaaactggatttcgtccagacaatgaaacgaagaggtggaacgcgcccagtgactacgcccagtagcattaaaatctggcttttcagaatcgaggtgactcattccccggtacattccccagtaactaacagtatataagccagcctttcagcacagaggtgatttcatcttccaggatccaccttgattaaatctcttgtccccagccctcctggtccccaatggcagcagccgccatcccagctttgcttctgtgcctcccgcttctgttcctgctgttcggctggtcccgggctaggcgagacggtgagctggtggatggagcctaagcggggcgggggccaaacctgagggactgtggactgcagcgggtttcagaggagggaaggcttctggaaggacaagggagatctccccgaactgcgcccccagctcagttcccctcctgggctccttcccgccgggtccactccccaaggctgttcttgccccagtaggggcgaaaaagagcagggtgaaaacgaggctggcaggagggtggaggggccagagggctgcgagggctaggtggggcccggattcctagtgcagcccggcagtcccacccgcctttcggaaggagaaaccagagcccccccgggaacagagctggggtcaggactgggtgaaggggggtaccacagggatacaatcacagacgcccccaccagccacaagcctgctctgctctcacctgctctctaccacacaaaccctccagcacccccaggactccctgcctttgttttccccgcacttttcctgtagacactcacctgcacccaggggctcagcagatacccgccacccctcccctcaccatccactgccaccacccaggtcacatcctcttactgcccacctcagcccagctggtcacccctgaggtctccccatccatgaagggtacctcaccacctcctacaccacgtcgcaccttctgcctcttgcctgaggacacaccccaacaaacacaccccaagctcccctcagaacctgtgcaggggggatgggaagcaccatttcctccaggatgaccctgggaactctggtgagtagaggcacccacttctgcccttggggcccagaccgcctgttcttcctacgggggtgtcagcgtcatagagaatagtcactgtgtagacaggggtcagcaaaccctttctagaaagggaggaagga

SEQ ID NO: 11258 - DNA, 6000 bp, Homo sapiens; identical to SEQ ID NO: 1195

SEQ ID NO: 11259 - DNA, 6000 bp, Homo sapiens
cagtgcaagctgttggtcaatctaccattctgagatttggagcaccgtggccctcttctcacagctccactgggcagtgccctaataggaactctgtgtgggggctccagccccctatttcccctccacactgctctagcagaggttctccgtgagggccctgcccctgcagcaaacttttgcctgggcatcttagcatttccatacatcttctgaaatctaggtggaggttcccaaacctccattcttgacttctgtgcacctgcaggctcaaaaccatgtggaagctgtcaaggcttaaagcttgcaccctctggagccatgggccaagctgtaccaagcttggccccttttagcagccgtgggagcagttgggacccagggcaccaagtccctaagctgcacacagcatgggaaccctgggcctggaccaggagaccattttttcctcctgtgcttctgggtctgtgatgggaggggctgccatgaagacctatggcatgccctggagacattttccccattgtcttgggggatcaacatttggctctttgttacttacgcaaatttctgcagccagcttgagtttctcctcaaaaaaattggtttttctttctattgcatcgtcaggctgtaaattttctgaacttttatcctctgtttcccttttaaaatggaatgcttttaacagcacccaagtcacattttaaatgctttgctgcttagaaattttatctgccagataccctaaatcatctctctcaagttcagagtgccacagatctctagggcaggggcaaaatgccaccagtctctttgctaaaacgtaacaagagtcacctttgctccagttcccaacaagttcctcatctccatctgagaccacctcagcctggaccttattgttcatatcaccatcagcatttttgtcaaaggcattcaacaagtctttaggaggttccaaactttcccacatttttctgtcttgttctgagccctccaaactgttccaacctctgcctaatacccagttccaaagtcaattccacattttcgggtgtcttttcagtagcacccactctactggtactaatttactgtattagtgcgttttcatgctgctcataaagaaatacccaagactgagatgaaaaagaggtttaactggacttagaattccacatggttggggaggcctcagaatcatggcgggaggtgaaaggcacttcttacatggcggtaacaagagaaaatgaggaagatgcaaaagcagaaacccctgataaaaccatcagatctcatgagacttattcactaccacgagaacagtatgggggaaaccaaccccatgattcaaattatctcccactgggtcccctgggtccctcccacaacacatgggaattatgggagtacaattcaagataatatttgggtggggacatagagccaaaccatatcaccagcattacccaaataaaaatcccagacaagaacatcacaagaaaaagaatcaagaacaaatattcctcttgaacacagactcacaattcaatacaaaacgttatccaattaagatatacataaaatgaataatatgccatgccatattggtttttttaaagggaaagtaaggttggtttaacatctgaaaattaaacaatacaattcacccaattaatagaacaaagaacaaatgttgcacaattattatagtcaatgcagaaaaagcacttgcaaaatcaagaccatttcatgacaaaatagctcagcaaacaaaatcgaaaggaatatcttcaatgtggttaaggacacccacgaaaagtttacagctaccctcatattcaattatgaaaggccagatgcttacttcctaagattagcaacaaagcaaagatgtggctctcctcatttttgtttaaaacaccttacgagcatcctaactagtgcaatatggcaagaaaatgaaataaaagaccaataaaagggccaagtgtggtgcctcatgcctgtaatctcagcactttgggaggccaaggtgggaggatcactttagttcaagagtttgagactagcttgagcaacatagttagacccctgtctttactaaatataaataatttttaaaagaaaaaaaacaatgataggaaaggaagaaataaaatctttctttctcagcttaattacatatgtagaaaacaataaggaattctgaaaaagtctctggaagtaataattaaatttgcaaaattgttcacaaaagatatgtaataagtctcttagacaaacatgacaagatagcaacaatactagtcatcaaagaagtgcaagttaaaaccacaatgagaaaccatcacacatcacctagaataagtaaagttcaaaagacatatgataattctaaatactggtatgaatatggaaaaaataaaaatctcttatattgttggtaggaacgcaaaaaaaagttgcagtcagtttgtaaaataatatggcaatttcttaaacagctacccatccatttaccatatcacccaacaattccacaaatatttatttatccaaaggaaatgaaaatttaaggccatgcaaagacttgtagtcagttatttatagtggtttcattaattacagaccctaaccggaaataacccacgtttatcagctggagaatagagaaaccaacgaataaactggaattccaacaatactcagcagctactcagtgacaaaaatgaatgaaatattattactcttaactacatggaaaaatctcaaatattgttatgacaagtgagagaccaaaggactacataacatatgattgcatgtccatgaaattctagaaatttcattattacagtaacagaaagcacagcagtggttgagtgaagagaagggggtgagggtgggaggcaaggattaaatagaaaaggggcataaggaaagtttttagggaaaagaaactgtcctctatctgggcaatgtggtagttacatgactataaataattaccaatattcataaaacattgtagctaaaactggtgagttttattatacacaaacgccccaattaggaaaaaaaaaggtgggggaagaaggcaaaaatgaagacacttttacataatccaaatcagaaaattcatttcctagggatcttgtactacgtataattttgaaggaagttcttcaggctgaagggaaatgatactagatggtgacctagatatatagaaagggataattaacaacagaaattatgcacatacacagatcacatacacactcattttcttaatgacaatatgaatgcttaaaacaaaaagtattactgtattattgagtttataaagtatattgatgtaatatatacaacaagaatagcacaatggtaggttacatgaaactacactcttacaagtgtcctttattttgctggatgcagcttaatattacctgaacttcaccatgaaaagtcaaggaatcgggtttcaattcttacaacaataaaaaattagtgtaaagaaatatacctaaaagccactagaattaaaaccataaactaaaaaatgtttacttaacacataagaaagtaggaaaggaggaatagaaacaaaaagatacgagacaaattgaaaacatacagcaaaatggtagaccaaaacccaaccattgtaagtgaagaaatgacacgacctgagtcacattagcagaactgctgagcactgtggggagaacagacatgggcaggaagtgagggacagtgttagtgccacaattcaggggtgagagggtggcagggactaaggggaggggagggtgtgagggatgagaggggcagagagaagggctggagagacaggaagtgaggaaaaggagcaagggaaaggactctaaagcagtggaggagcctagcagggggttcttgacatgcattcggtatttaatacattttgtgggactgccaaaaactaatggcctcctcatgattaaaaacataagagtaaaaaaataccaagtatgcaaataaaatgtgcacactgcttagatgtgcataattcataaaaacaagcagtgcttaagcattgatgataggcattttgacttcagtgcaattttgaggctccttgttacaatatacagtaacaaatcctgcttctttgtattgagatgtcctggactcacacagggaaactcgggctatggaatgaagataattttaaatgcaacaacccagagtcatggatccacagtctgggaaagtaaacttagaagctttgtgactcgaattgcaatgctgtttggatacacttatatatgaagcaggcaaaatcaggtcttttacagattagaatcctgatcattcaggggttagattgtgctaaccactgtattaataaacaaacaaacaaaaaaacctggtcactatgagaatctctatcttgtgccttcagccacaacttcaccaggtttaaagagaaaacccctttctctacaccgccattcccaaggcgagctcactctctggcatcaaagttccctggggtgagttttcttctaggatagtccaaggggagaggtaaggagtcggaagtccagttcagggacgaggattccaggatgagcgtgaatgggaaggggctgggcccagcctgggggttctctccctagtttccacagacagatccttgaccaggactcaggcagtcagtgtgacaaagaggctggcgtaggaaaagagaggtcaggacaaagtcccaggccccaggcgtggctctctgggtctcaggccccaagagcgatgactgcactggggagtcacagggttggggattgcccactcccctgagttttggttctcccaaccttcttcctggatacttgtgacataatcccacttctcactcccattgggtgccgggtttttagagaagccaatcagcttcgccgcgatcccggcactacgatcccggcactacagtcccggcgcaaccacccgcactcagattctccccaaacgccaaggatgggggtcatggctccccgaaccctcctcctgctgctcttgggggccctggccctgaccgagacctgggccggtgagtgcggggtcgggagggaaagggcctctgcggggagaagcgagtggcccgcccggcccggggagccgcgccgggaggagggtcgggcgggtctcagcctctcctcgcctccaggctcccactccttgaggtatttcagcaccgcagtgtcccagcccggccgcggggagccccggttcatcgccgtgggctacgtggacgacacagagttcgtgcggttcgacagcgactccgtgagtccgaggatggagcggcgggcgccgtgggtggagcaggaggggctggagtattgggaccaggagacacggaacgccaagggccacgcgcagatttaccgagtgaacctgcggaccctgctccgctattacaaccagagcgaggccggtgagtgaccctggcccggggcgcaggtcacgatccctccccatcccccacggacagcccaggtcccgggtctgagtctccggtctgagatccaccccgaggctgcgggacctgcccagaccctcgaccagggaagaaactcgggcgcctttacccggtttaatttcagtttaggccaaaatccccgcgggttggtcggggcgggagcggggctcggtgttcggggctgacggcgggggcgaggccatggttctcacaccatccagaggaagcatggctgcgacgtgggcccgacaggcgcctcctccgcaggtatgaacagttcgcctacgatggcaaggattacatcgccctgaacgaggacctgcactcctggaccgccgcgaacacagcggctcagatctcccagcacaagtgggaagcggacaaatactcagagcaggtcagggcctacctgagggcaagtgcatggagtggctccgcagacacctggagaacgggaaggagacgct

SEQ ID NO: 11260 - DNA, 6000 bp, Homo sapiens
gcccaccttggccttccaaagttctgggattacaggcgtgagccactgggcccagcctccttaaccttttaaaaaaggttaaaagtatgctgggcacttcttttcatagcaatacttaaaagcaatcttactctttttaatgactgtatagaattttataatataactcttctttgggagacaattgaaatgttctttatcttcactgtggtagtggagatgtgggtgtgtacaacagctaaaattcaacaagttgaacactttaaatagatgcagtttattgcatgcaaagtatgtcccaatatgatgatttaaaaatattatcgtctttgagatttgtactttgcttatgtgaaacaaaacaaaacaaaaaccctgttcttgtgcccaggagacacaccctgacacatctggaggtagagggtcatgctgtctgcaacttaccctcacaggctctgaaataacaataatagcagtatatttacagattcagaaagagagaaagctatagtaaaaatgttcataagtaaaactagataaagggcaaaaataaataataaaactacgtcttttaaattttatctctcctttattttttctctccccttttcttcctatctcttccctcctttcttaacacgtccccctatccttccctcctttcaccactctctgcacttgatccccggtgtattccagcctccaggccaacacacttcaccgcgtccgcctggggcaggtcagaaaagggacgcgaggcggcgctgtcacagcattctatgcgccccagcgccctgggccgcgctggtcttgtatcatttcagtggtccctcccgtctttgacggggccaaactcggggtgtaaattaggatcctcactgaagcggcgggaccctgagaggctttttcctggccccttagttgtgggttttcctgcgggcggtggagcccgtttccatcagaaccgcccagaggcgggcgctgccttccaggggtgaagtgttttcggaccccggaatctgtgggcggcctgcgggaggggctgaggcgcagttccctactcacccaggtccgaatccaccgcggtgctgtttccagcgagtcagattccagatcgcgctccagcctggactcggaattcctgccccgcgggtctgcattttcacagcggcaggtgtgagtgccgcgcagctggagaccagaagcctgaggcagctcggccctccccagcccaaagtgccgttattccgtttctgtatcagtaaacacgtttcattttccgtagaccagggaagggtgatgggtgatcccagtcctcgcagtgaattccgggccacaaaattcaaaacgcttgcgggcaaagccgtgcgcggtggctcaagcctgtaattccagcactttgggaggccgaggcgggcggatcacctgaggtcgggatttccagaccagcctgaccaacatagagaaaccccgcctctactaaaaatacaaaattagccgggggtggcgcatgcctgtaatcccagctagtcgggaggctgaggcaggagactcacttgaacccgggaggcggaggttgctgtgagccgagatcgcgccactgcactccagcctgggcaacaagagcgaaactccgtttcaaaaaaaaacaaaaaacaaaaagctttcgggcgccgagggcagccccgccctgaattttgtgagcgaccgcgctgggccgtttctctttcttttccggaccctgcagtggcgcctaaagtctgcgaggaggaagtcgcctctgtgctcgtgagtccagggatctaaggcaagtgctgagggagaaaacatagttgatggggcagagcagagggggctggaggtggggtggagggggagggctttgaacagaagacctgggaggcttggtgggggaggggacccaggcctcggcgctgagaagcaactcccctggagctcaagaccttcttggcctcccctagcccaggggaggactggcttcatgtctccctgaaaccgcttctaaatgccttagaacaaaccttaaatattcattattattattgaactattaaaagtcttttttggaggcgagctgaatgagaccctttgctggagctggcacacggaggaagtcctggagggagggtagacaccgtggagggaagggcttgggacctgtgtcaggagagctgggtccatctgcctctctgtctcaaactatgcttatgatctttagcagtgaaaataatctctctaaggtggggacaggaccccagtccctgctgtgcttaataaattatgaggatcaaaataaattatcagtgaatgtgtatgggaagactaagaaattgttaaaattctcgaatacattacattttcatccacagaaaagtgtaggctagggatgataggggaatagttagtaatgacagggatagttgaacttaaaaaaaaaggttgtgaggccaacaaaaaagaaatggacacagttcctgatcctggagggttcatagtctaatgggggaggagggtagaagatggtaggtgatggctgggtgtgtggcactcgcctgtagtcccagctactcaagaggctgtggtgggaggattgcttgagcccaggcatttgaggctgcagtgagctataatcacaccactgcattccaactgagtgacacagcaagactcctctcttaaaaaaataaaataaagtaaatgaaaaaaataagattcaagacagggcacagtcggtaccatcaggaaggttcaaaccatgggctagatcagtagttctaaaacttgactacacatcggaatcacgtagggaactttaaaagatactaaggtttaggtccaacctaggtttactgatttaactggttgtggctgtggcctgggaacatggatattaaaaactctccaggtggttctacgcagtggctaggtttgaagaccactgcctagatgtcccaatgactaagaatgtgcgctggggacaagccaattctcttagtagaggctttccagacagaattcttattattgagaattgagaattcacatgccacacataatttatcgttttaaagtgtacagatcagtggcttctagcataatcacaaggttgtgccaccgtcaccactatctacttgggaagattttcttcctttttttcttttttttttttttttttgaggcggagccttgctctgttgcccaggctggagtgcagtggcgcaatctcagctcactgcaagctccgcctcccgggttgaccccattctcctgcctcagccttctgagcagctgggactacaggtacccgccaccacgcccagctaagttttttgtatttttagtagagacggggtttcactgtgttagcaggatgctctcgatctcctgacctcgtgatctgcccacctcgacctcccaaagtgctgggattacaggcgtgagccaccgtgcccggaccctttttcctttttttttttttttaaaggctagtcaagtgaaacagtgggagtgaagatgaaacaaaaacatctataactggttgtgatcaattagttgtaaacaccactgcactcagaccagcctaactgggaagattttgaggatatgctgtggtctgatgggttccaaggcagaggtgacagtaacctggaagagggagactgcttaggcagtggcatcctggtgggatagggtgaggagatcccagagcccacgtttactgcaaccctggggaaatgtcaccagagaaatgggggtggtgccagacaatagattgtgggagctatggtttccatggtagagtagaagcatccaccatgtgtgacattcagcagatggggcgctgtgggtggcttggagcactctggttgtaactgaggcaggcacagtgtttaggaagcctgtgcagtaatccagactgaagggaggggaaagcctagactaagactatggctgtgggattgaaatagcgttgaaggagctgactttgactcccggagatgaaggagaaagaggaaatcagaagggaccaaggatggtgaagttcttaagagaaactgaggaggaagagaggatgatgtggtgggagacgtgtagagagtccttgtagatctgtcatattgaaggggactatggtcccagaggtacagatgtcctaaaacaggctggaaaagggagtctggagagagcttggtgttgtaatgaaccatggggagccgcctcgttggccctgtgattacccaggaactgaatagagagggggccctgggagacctcagacacttagaggatataagggggtgaaaggggggacctggctttgagtcgaagggaggagaaggagattatatagctgaaacgtctaagagaatttgtgatctgagcgtttctactggggcaagtgcttctgaaaggcagaggcggctgagatctggaaacaggtctgcaaatctggtcactggtctcattgcagtaacgctgtgcgcggttgagggagtgtattgggagaaaaaccacgcgttgtctgtcccggaaggaacaagccagtgagagccggcctgatgggaggaccggcgaaaggggcttggtgaagcccgcgctccttgggggtgggaatgcggggatggggtggtcgcgatgcagggagggcgacagggtccaggtcgtgctcataagtttggagctgtactctcagctactcggggctggtccttgattttggctgcgctcgcgcacgctcccccttttctggccgccaggtcccgccttctaaatttccccaggtctccaggccgctagaattttctcttctgaacgtggccccgccctctccactcatgattggccctaagttccgggcctcagttttcactggataagcggtcgctgagcggggcgcaggtgactaaatttcgacggggtcttctcacgggtttcattcagttggccactgctgagcagctgagaaggtggcgacgtaggggccatggggctgggccgggtcctgctgtttctggccgtcgccttcccttttgcacccccggcagccgccgctggtgagtggggttcctggcggtccccggcggagcgggagcggcggggcgtttccgggggtccgggtgggttgccgcgagcgctgtgcggtcagggcggggctcaggtgtgctgtctggagtgcagggagctggacgccgcctgttcccgccacacctcagccctgctttcccatctcccgtctctttttttttttttttttttttttttttttttttttttctttctgagacggagtctctgtcgcctaggctgtagtgcagtggcgcgatcttggctcactgcaagcgccgcctcccgggttcacgccattctcctgcctcagcctccctagtagctgggactacaggcgcccgccaccacgcccggctaattttttgtgtttttagtagagatggggtttcaccgtgttagtcaggatggtctcgatctcctgacctcgtgatccgcccgcctcggcctcccaaagtgctgggattacaggcgtgagccaccgcgcccgacctcctgtctcctttcagtcctcctcgggatcgcgcatcacccgcattttctggtctctcctgcacttgctctcctcgcctctcctccgtctcctctcacttttcggacaaaccagtccttctgaggcccctgggttcccgggctgctcctgtgaatggcattggaaggccgttccagcgcggccgctgaggcagccacttcccccggtgctgggggcggatctcaggtccctgaagtcctgtcctctcccggagccgatgtgttctcagctcctgggccgcagctcctggagttggggccctcctttcttgggacccggaggtggtgcttcttgctgctgtggggactgtggggggtcctgactctcaagctgaggggttggagtctgcaggctccgggcagaggattcttcctgcgacttct

SEQ ID NO: 11261 - DNA, 6000 bp, Homo sapiens
aaagaaaagtgtagacaaatgggtggaacaaagaagtttaaagtttagatttgggggctagagttctggtcccagttcaactaagtgtacaagcttgataatcgtgggccttcctatcacactggcctcttccagcaaaaccctacccattctcatctctagaggccttgacttcccttatcaccctgcattataatatttgataacatgggccgggagtggtggctcatgcctgcaaccccagcactttgggaagccgaggccggcggatcacctgaggtcgggagttcaagaccagcttggccaacatggagaaaccccgtctctactaaaaatacaaaattagctgggcgtggtggggcatgcctgtaatcccagctactggggaggctgaggcaggagaatcccttgaactcggggggcagaggttgtggtgagccgagatcatgccattgcactccagcctgggcaatgagagcgaaactgcatctcaaaaaaaaaagaaaaaaattgataacatggcactttccctctccagctgtgaactctttgagggttgggaatgtctttacctgtattcttggcacatagtatatggacttatgtttgtgaaatcagtgaattggctgtagtcagggaactcctcctgggggaagtgagacttgcacgaagctgggcaattcttggtccaggggggttgaaagaataggtgggggactcccaggagggtctgggacctgaaagtgaacccagattggcagggaggtgaccttatcatgccacctggagaggctgccccttctgactcaggtgggacttgcatgtggctcccaggcttctgtttggcttcctcaaaatagcttccagaaaagtgaataaaccacaaatggttgatttatttctgactctcagcccgtctctcacgaagacagagcctattgaccaaaaacttcaggatctgcatctgagcagatcccaggaaggggaagtcaaagggcccaggtcagaggcccaagttcagacttcagcagcagactagggtcagactttaccaaagtcagaactcgaggttcatgtaagtccttagatcccgctcccaagccctgtctttctcctccctccttctctcctccctccagctcagtgtggccacccgagggggtctctccctcccagccacagctcgggtatcccaagctgggaaatgtgtcactcggggctggggtgctgatctgtagcctagtccttcctggtccctcttgaggacagtggggatgggattggcacggccctcaccccggggtcccagccccattcctggctcccagccccccctcagcagcagtttgaagcccgggctggagatgggcaccccaagtggaaggttgggaggctgaggaccctgcgacagtgacagcaggtgagcagtggatgtgcggtggttggaatcttggaagtgggtgtcacagttctcgcagtactggagggagggagtaggagacctgcagagaaagaagaaaaagcattaagggcaggggaaggaaaaggggaagagttgaggcctcagagggggctggcagggtagaataggatcttttcagcttttctgctaaggaacaaattgccagctaggcatagtggctcacgcctgtaatcccaacactttgggaggcagaggcgggcagatggctttgagctcaggagtttgagaccagcctgggcaaaatggcaacgcctgctttttttttttttttttttgagatggagtcttgctctgctgcccaggttggagtgcagtgccatgatcctggctcactgcaacttccaccttagcgattctcctgcctcagcctcccaagtagccgggattacaggcacatgccaccatgtcccggcaaagcctgctttctacaaaaaatatgcttgagcccaggaagcggaggttgcagtgagctgaaatcacaccattgcacaccagcctgggcgacagagtgagatgagtgagactttgtctcaaaaaaaaaaaaaaaaaaaaaagggacaaattgccttccttcctacttaacagtgagggatccaggctggtccaaaggtggtggtgagttatctgaattaattgttcactcagttacagatcaaactccttactccacttttcccctccttctcactactgcacttgacttgtcttaaaaacaaatttctttaaaccattgtgggatccagagcagaatagttgaaagaaaaaaatggtaaccagacctagcaaactcttgggcaaggggagggacattagtcataatgactatagctaacattcatgtattgcatactatgcggcatgcactattctagcattttacatatattaacccattgaatcctaacaacaattcttactacccccatttctaagatgagaaaactggaacatgtagacattaggttgtttgcccaagtaagtggaatcaggctttaaatccagggagctcatgtttataaccacttgactatactaccctgtcaacctacacatgaggataaggaaagaactcttcagcactgtgctggggcgtctggtgtggtgtggctgggagaggcagaacacaatgagacatgggtctgagctaaagtttccccttaccggttttccgggctccttgtctctccatggctctccctgaccatgcgggctacctcagggaagccagcttcttcagcgagctgagccgcatccctgccactcagctcacagacccccacccaggcagccccacggcccaggagatagctcacagctgccccctggcccgctcgagcagcacacatcagtggggtccaccagaaggcatcccgggcgttgatattccccccagctcctcctgcctcatgcggttccagcagtctcctaagttctggcaggtccccctcctgggctgccctcagtatccggtgagtcatcttatcctcagcctcaagggatctcccttgtccatgtcttcctgatgctccttctgccactgcttctgctgctggtgccttcattattcttcttttctttctctttctttctctggcaggttcagtctgagatctctgggagtcaggagcgctgctctcatccccaatcagggcctcatagaaagctcgggctgcagccccatccagggtggactctggcttctcgggctgtggctgctgctgcccatccttccagaggtcgctggggtcagtggctggggtgaaggtgatgagcaagggccgggacatggcttttgggagaactgagaaaatgataccaggcaagggaaggatgagacaagtaagccaagctcgtggtgaccctgtagcaaccacagcctcagagacctgctgggatgagaaaaagtagtcaaaaacactttcctgccactaaagtaaccccacaacttaggactctgcagggcctaagggagagagactttgcgtaaaaacatggaaccctacaataccgactttgctccttagtaaagattaataaaactccatgagactgttgtccagaggtcctgcgtccggcccccacccccatcctcaccaacaataaacaccagcctctttctgaaaccactttcccaccccgtaagacataccagtaggaaaaaaaaatcagcctggccctttaagtcttccgcgatcccatttcggagtttcctcttcccaaacaaaaatagatgggtcactccctagaagatctcggggagagtctcctatacgtgttgctgtgtagcttccgtaccgcaaaatggcgccattctaatcagaagagttgacacaatcaaatagccacacggcacgaagacgcatgcgtggcgacaacaacaacaaaaaccacaacccacattacttgagggctcgggcgtgcgcaaagctccgggttcagtttcccgcgctggaactttttcaatagtaaacgagcaaagctccgcgcgcccaggtggcgcgagcactaggatctgtcggttggggtcctacttttacataacgcccccacaatgcccttcgccttcctcaacgtggcccccgctccaagcccattttctggagccaggaatccactctgtgggttaggaaaggccctcaggaggcggagggaaacctgtggaatgccgagaagccgtgtaatgaaataacgtcacgcctgcccctcaccattactctgaccagggttcgaaggtcacacttagagcctaaggggaaatggagaagtgcaaagggacgagcagaatggctggcaccacctcaggttagcgcactgggacgttccagttctcacaccgcccaccccaccccacccaagtccctacgcacggagccaagccgcacctctcccctcatgaggcaggagcccggaggaaacagtatgcccgtcaagggtctctggcgggactgattcgcactaggggcccaacaggcaataaggacccagcggattggccgaggataggccagtcccctgggcagcagcgccgcgccgggactagaggggaacgtgaggagagctgcggaaagagatccagcctggctccctcctttccccgccctaagtcagcctcttcacccagtgagcacaaaactgtattgcccagactcccgggccccgaacgccatacctggcttccgcttccggtggcttctcgttgtgccccgcccgcaagcgccctcctccgggccttcgtgacagccaggtcgtgcgcgggtcatcctgggattggtagttcgctttctctcatttagccagtttctttctctaccggggactccgtgtcccggcatccaccgcggcacctgacccttggcgcttgcgtgttgccctcttccccaccctccctaatttccactccccccaccccacttcgcctgccgcggtcgggtccgcggcctgcgctgtagcggtcgccgccgttccctggaagtagcaacttccctaccccaccccagtcctggtccccgtccagccggtgagtctgaagtcgtcgctgctccgagtcccttgtcgctgggagcggcacatggggtctccggactttgatgtgggggcgggggaggaagcgaccaggtccggcacgaaggagggagaggtggcctgaggagcggaggggggatgtgtggattccggtgaaagggacctgacaatcgcccccaacccgtgagaaaaggaggagcccagttcttgcttgagaatgataaacttggaaacccttgggaaaggcgtgggggtcatgcagagacttgtattggtagggagcctgagtcgaggtccctgccggagttgacacagaggagagagggccctggccttcgggagctccagggatgtgggtcgggctggtgggtcaaagtatctgttggcttctttcaagtggtgggaccccaaagaatgtttaacttcaaagaaaaggggctgagatgtaaattagaggagctggagaggagtgcttcagagtttgggttgctttaagaaagggtggttccgaattctcccgtggttggagggccgaatgtgggaggagggaggataccagaggcagggaaggagaacttgagctttactgacactgttctttttctagctgacgtgaagatgagcagctcagaggaggtgtcctggatttcctggttctgtgggctccgtggcaatgaattcttctgtgaagtgagttctcttcaacctccctacttgccagcttcacatatcttcccaccagacgttccttcacatattccacttctgcactgttctcttacatgctatttgaaaacttcctatcagcaaagagtcccccctataaaccccgacgaacctgtgctaaagtggcaaaactggggcccaagtcctgagtctgccaccgtccagcaatataacgttgggctagtcaatttgtgtctttttcttttttttgagactgggtctcactctgtcaccgaggctggagggtagtggtgcgatctcggcttact

SEQ ID NO: 11262 - DNA, 6000 bp, Homo sapiens; identical to SEQ ID NO: 1213

SEQ ID NO: 11263 - DNA, 6000 bp, Homo sapiens
tctgctgggatgtctctggcccttgggcagaccccgcaccgagacacatacctcttctggggagtttaagtaatcaacttgtttttagagcagtttaggttctcaaaacaatgagagaaagtacatagagttcccgtatacctcctgctcctcacatgcacagccccccactatccacatcctgcccaggggtccggctgttacagccggctaccctacattgaggcaccctgtcctgtcatcaagcacacaaccgtcctgagggctcacttttgctgctgagcacgcgctgtctgtgctttgacagacgtgtgatgacatcaactcatcattgtgggatcacacagttgccccactgccctccaaatcccctgtgctccctcgttcatcccctctgtttataaatagggaaaaggttattccaaaactggcttcagttcagtgattagtgtggaggaaaaagggctccatgtaaaataaagcttcttccccaaagcctcggaattttaaccctcagagggcagagggcccacgttggctttcctttctttacttggtcttctctgccctccagctgcagtttgggaagcctccaggcctggagcatggagaggagaagaggaagggtcaggaaagtctggtgatgacccaaagagttcaagctgaggtttctcagagggcaccgttgtgggctcttccgatgacaccctgcctgtcacctgcagcttcctcatgtagccttggatctccttcctggtgggtgctcctgacatctccttcagcctccaagcctttcgcagtccacttccagcttcctgccatgcgtccctccacctccagcaggccttttgggtgggatctacaaccacccatgctgggtgcctcacatctgtgcagcccaacatctggcccacggaagccatccacttccttcaccccaacaaagtcatggagcctgggggcccccacaaggtcacctctcctccattccaccatcaggacagcttgccgcctgctgtctctacccaatacagctctcagactgaatccaactcagctgctacatctcccagactgcaggggccacaaccatctttccaagttgtgaccctatctcaagcctctccctaggtttgagataagatgcaggaatctaaccctctcctcccccagggtcacagcacaactaccagctgtctccaaaagtcctctcccaatcttcacactcctcacaactttctacccttgatgtgtgtgagggattcattcctcaaagaaggtttcaataccttttggcatgtgcttcacactggcctcccacctcactctgacagatagcatatattttcttgggacttgcattagtcaagatttagctgcaaactacaaaatccaagctacggattttaaggagaaagagatttttaaaatcaaacattaaatgctttacagaatcagatcctatgtaatttctgggcatcactcttaaagccacaggatgggctactaagggaccactgcctttgccacagtcaacaccctttccaaatcaggcaactttccaaatctggaagctgccatcacagccctggctaaagaacccctccatctcacccatagtctaccggcacaatggatgcctctcttcccattctagctcacttcctcatttaagtctcatacaaatacattgaatgggtgggacctaaaatatatctggaaccctagctgcaaaggaatcagaaatgatcttgtagaccttttactatagaaagacccatgaaaaagaggtggcagccactcatagtggctcacacctgtaattctagcactctgggaggctaagctgggtggatctcttgagtccaggagttcaagacaagcctggccaacatggtgaaacgttgtctctatgaaaagcaataataataataataacaaggtgcattggtgtgtgcccacactcccagctactcaggaggctgaggtgggaggatcacttgagccctgggaggtcaaggctgcaatgagccatgatcacaccactgcactgcaacctgggcgaaagtgtaaaactccatctcaagaaaagaaaaagagagacagaagaagaaaaaagaaagaaagaaagaaagaaaagaaaagaaaaaagaaggaaggaaggaaggagaaagaaaaagagagagaaggaaagaaggaaggaaggaaggaaggaagggaagaaagaaagaggtggcaatgaatatatagtgagttcacagtgtctacctgaatactctcagccaaaactgagatcacaatagttaaaatttataagttttgttgtttcttttgctgtcaatgaaagtcaaatatgactaagtgaaaaataaacatatagtatttgctttgttatgtcaaataaacgctatttgtaaaaatatagtatttgccttgttacaccaaataaaccctattctgtagtataaacgttatagtaacaaattttcatttacagcaatcagtacatcggacactatgtgtgacatatcacactgaaggcatcaaatgatacagatgcagagaataaattcctattttcctcttccagaatttatcatacttttcttagaaacttcagtgtgtttaagaaaatgactcttattaccatcaagtgttagtaggtgctttacacctagccgtactaagatttcttaaaactttgctgtttgttatgtacacgctgtttgttatgtatcaagtgattattcatatgctttgtgtaaatcgtttctatacatattaaaactaatcttttacacttagaatgctttcagattcacagaagagttgtgtaggtattgcatacttccctgatgtgctatgttcaatgtcttctattattaatatagtccaatagtatgctacatttctcacaattaatgagttgatattgatacattactataattttacaaaattgatgagtagaactcatatatttataatgcgtggtaggatagtttgatgtgtgtattaactgtgaaattactaaatcaagcaataccacatatacttacttgttttgtggtgagaacatttaaaatctattttctgtcattttcaattgtacaattcatagttatgaactgcactcaccatactgtgcaatagatctcttgaacttattttttctgtctaacatattgtgtttcttcaacaatacctacccagtttgtccaattcccagcctctggtaatgccattctactctgtttctgtggtagattttattaattgaagtccttacttcattcagattaccctggcttttacctcatgtactttctgtgctccaggatcccacctaggaagccacattgcttttagtcttcatgtctgcttaggctcctcttattcatagcagtttctgagaattatttcttagttttgatggccttgacagttttgaggaacgctgctcaggtattttgtagaatgtccctcatgtggaatttgtttgatgtttttctcctggggccagcggctttggggaaggagactgcacagctaattgccctgtcatcacatcaagtcaatgacacattctaacaacctgagttatccctgtgggtctgcactttggttgcctggctgccacagtaagtgtcaggtttctccactgtacagttactcttctcttccttcccatgctatcctctggaggaaagtcacctgcacagcccatgcttaagccgtgggaatttatgcttctgccttgagggcagaatacctataagaattgtttgcaatctctctcagtcccttcaggctgctatgagaagatgccttagactggagactttctaaataatagaaatctctttctcaaagttctggagtctgggaagtcaaagatcaaggtgtcagtggatgtggtatctgctgagggctgctctctgcttccaaggtggtgctttcttgcagtaacctcagttgactgaaggcatgaacactgtcctcatatggcagacagcgcaaatctgcttcctgcaatctctggtataagggcattaattgcattcttgaggatgacgccctcatgacttaagattttcccacaagatcccacctcttaacgctatcacatggaaattaagtttgaatatatgagatgggggaacaacattctgaacacagcagaatccttatgcatgggatatttgtctattcccccccccagttctttattcagtcatttacttacatcagcatggactcctagagatttaatatatacattgggtagtaatccagtaccacttggttttgttgctagatagttctcacttcggccattttctttttctgtacattttacacacgcgttgttctttcatccactgatgtattcatccaacaagcactgattgagatgatcccaagctaccataactgatccactcctacctgccttcccctccaactttccctgaccagcactctctttcctccctgctttcctggccccaccatttccagggaacatcttgtaattcctgggattaaaatctgccctctacaaaatgtctcagggtcaaaactcatcatcaacccaccatggctagaccagaaggattcaggggtctggtcgtgcctccaagggccctgaccacctataggaagtgcacagagagaaggaaagagggatgaccccagctttattcaccagctttattcttggccatgctgagagctgcccctagcaatagaggagcagtatgactggctggaaggcataaagcagcagacatggggagaagttcagtgaaaggcggcagagcaacacagcagggctgaggtgcccaggcccagagacagaccctgtagctggtggcccctttcaaggcctggctgcccctcctcccctggtctgcagagcccgccctcccaggccgaccatttccccagcaagacattgacttcctcaattttaccagctgagagacactgggaacctggggcagaatcagacccagcgtctgactcctcctgagagggctcccttttttctcctctcctccgctgtcagaaacagatctgggctggaatggcctggggtggggtccacacctgctgcttccacctgtgctgctgctgctcctggcctcaggtgacatggagggaaagagtgcagggggtgtaaggagtgggatgaagaatgagtggggcagggagcagcatggctgtgtgaccataggacagaatttaggggccctcttccatgtgtgggcatcagaactagttccccctccccttccccagcctgtgatgggggaggttgggtcccttcagagctctgacctgggtttctttctgccggttcctgggtaaagggtgctgtgcctgaagaacttcacaaacacccaggacagaccctcctcctgcaatgccagtactcacccaagagagggccctatcagcccaaatcctggtgtcagcagacatctccaagtcggtgtaccttacttgtcaccagctccaagccctggacagcagttcagaagtctcattacacaatctgggacaagcccaatgctggcttcttcaacatcaccatgattcagctgacacagaatgactcgggattctactggtgtggaatctacaacgcttccgaaaacatcatcactgttcttagaaatatcagcctggtggtgtctccaggtgagctcttttcttgaggaaatacctctgtgccaccccccagggacctgaaggaaatgtcatgcaccccctcccatgcctctatcatcccccatcctgccaggtattctgctgtggtccaaggggagcaaagatcctgtccccaaacatggactctcacctctcctccacccggtacatcctggcctcaattgttgggaaggtaccctcagaggtccctggacagagacacagtctgtctgtcactctgcgtctctctttgtcttacacaggcacacccacaactcttctttt

SEQ ID NO: 11264 - DNA, 6000 bp, Homo sapiens
ccaccggtacataagaaaaaatggaggggaggtatcaattagcgtgagcacctgccatgccccaggcacgcagatgggcgcccctatttcatttctctgccccggcagccttgtgaatgagctttggaagagacagccctgtaaacacatccctctgctgaactgccgcctccagctggctccaccactggcctgctagggtatcttcgccgtttcaacttagtttttctgggcccgtttccttagccggtaacacctggtgggatggttgtgaggattaaattagatatctgggaacgagtcctggccagcgaatgataggttcgcccaagtccagttaaaaggccgtccgcccagggcaaggcgtcttcagggccagcaagactatggggtccgagggagactcggggatctcagcaagaggagaccaatgtgaggagcaggcaaggaacgcttccaggctgcggtggccagggacgcctgagccccgcgggagccggagcggacaggcggaagggtcagctactgcagatagaggcggctggctcgggggcgggggtggagggggtcttcctccttccggttcttgggaagatcctgcaatctgaaagaggcaggagagctctttccccatctgtaatgtggtaaccgagcccgagccagctcctccctgggctggagggtgggagagtcgttagggacacctgccccgctccctccccctcccgggggggaacccaccgcgacggcgcgcacctgggcgcgggctgtgcctgggaacgcgcggggaccgcggcctccaggcagccctgggaaagcaagggccgggagcgcagccctggaggcagagtgttccctcaggaccgtcaggagagcgccatccacaggattattaaaatagccatccagacggaaatcgagtgaggctggcaccagactaaagaagtttcaaggccaggcgcggtgcctcacgcctgtaatcccagcactttgggaggccgaggcgggcggatcacctgaggtcgggggttcaagaccagcctgaccaacatggagaaaccccatctctactaaaaatacgaaattagctgggcatggtggcggtgactgtaatcccagctacttgggaggctgaggcaggagaatctcttgaacccgggaggcggaggttgtggtgagccaagatcgtgccattgcactctagcctgggcaacaagagcgaaactccgtctcaaaaaaaaaaaaaaaaaaaaaagaaagaaagaaggaaagtctcaaagagatatctgtgttcataatggatatcattatgaactcctggcctcaagcagtcctccctcctcggcctcccaaagtgctgggattacaggcatcatcaagtaaactctttaaatgatatttggtgcttcagcctcttcctttgaggtcaataccactttagctatcattaagtcatgttcgtgatagctaaaatgtggaagcagcccagtgtccacccacagattaatggataagcagaatgtgctctatacatacaatgagatattattcagctttaaaaaggaagaaaattctgacacgtggttcaacatggatgaaacttgacatgtgctaaatgaaatgaaccggtcacaaaaaacaaatactgtatgattctacttgaatgaggtagtcaaattcatttatagaaagtagaatgttggtggccaggcacggtggctcacgcctgtaatcccagcactttgggagaccgaggtgggcagatcacttgaggtcagagtttgagaccagcctggccaacatggtgaaaccctgtctctactaaaaatacaaaaattagccgggcatggtggcagttgcctataatccctgctacttgggaggctgaggcacaagaatcacttgaacctgggaggtggaggttgcagtgagccgagatcacaccactgcactccagcctgggcgacagagtgagactccatctcaaaaaaaaaaaaaaaaagaaagaaagaaagagtagaatgggaatggtggttgccacggtacagagtttcatttttgcaagataaattctagagatggatgatggtgatggttgcacagcagtatgaatggccactgaaatgtatgcttacaaatggttaggatggccaggtatggaagcatgcccctgtagtcccagctactctgtagtctgaggccatgagtttgacaatcacatctgtgaatagacactgcactccagtccaggtaaaataacaggatcttgtctcttttttttttttctttttgagccagagtctcgctctttcaccccggctggagtgcaatggcaccatctcggctcactgcaacctctgcctcacgggttcaagtgattctcctgcctcagcctcctgagtagctgggattacaggcacgcaccaccatgcctggctaatttttgtattttttagtacagacggggtttcaccatgttagtcaggctgatcttgaacccctgacctcgtgatccaccccccgcccctcggcctcccaaagtgctgggattacaggcgtgaaccaccgcgcccagctagaaaaaaataattttttaatagttgaacaacaaaccacaaaaaaattacagaggcctttagacaataattttaaggaaataaatgtaaatttgggggactgggtgtggtggctcaagtctgatcccagcacattgggaggtcaaggcaggcagatcatttgagctcaggagttctagaccaacctgggcaacatggtaaaatcccatctctacaaaaatacaaaaaattagccaggtggtggcgcacgcctgtggtcttagctactggagaggttaatttgggggtgaggcaggaggatcgcttgagccagggaggtggaggttgcagtgagccttgactgtaccactgcactccagtctgggtgacagagcaagaccctgtctcaaaaacaaaaaaagtagccgggcgcggtggctcacccttgtaatcccagcactttaggaggccaaggtgggcggattgagaggtcaagagatcgagaccatcctggccaacatggtgaaaccccatctctactaaaaatacaaaaatcagctgggcatggtagcgcacgcctgtagtcccagctactctggaggctgaggcaggagaatcgcttgaacccgggaggcagaagtctcagtgagccgagatcacaccactgcactacagcttggtgacggagagagattccatctccaaaaaaaaaaaaaaaagcaaatttggaaaagcttttatgaacaaagatggccattgtcccaaactggaaacccaaatgtctaacaataaaggaatggctgctgtaacagaatgtctgattaaaaacaaaaggacgccaggcacagtggctcatgcctgtaatgccagaactttgaagggtggatcacttgagctcaagagttcgagaccagactggcaatatgatgaaacccagtctctgcaaaaaacacaaaaatttagctgggtgtggtggcatgtgcctgtggtcccagctgcttgggaaggtgaggcaggaggatcgcttgggactgggaggcagatgttgcattgaggtgagatcatgccactgcactccagcctgagtgataaagccagactgtctccaaaaaatccaaaaggctgaggtgggaggattgcttgagcccaggatttcaagagtgtagtgagctgtgatcgcatcactgcactccagcctgggtgacagagtaaaagcctgtctcttaaaaaaaaaaaaaaagttaaaatggtataataaatgccaggcatgtggctcacaccagtactcccagcacttcgggaagccagagcaggaggatcgcttgagcccaggagtacgaaaccaacataggcaacaaagcaagactccatctctacaaaaaatcaaaataaaaataaattagctgggtgtggtagcgcatgcctgtggtcttagctactcaggaggctgacgaaggaggatcacttgagcccaggagttcaagactgcagtgagctatgattgtactgccgcattctagcctgggcaacaaagaaagaaccccatctctaaaaaaaaaaattaaataaataaaaggagggctgtaacaacatggcaaaaagtttactgggcatctttttttattttttttttttgagatggcgtctcgctctgtcgcccaggttggagtgcagtggcacaatcttggctcactgcaagctccacctcccgggttcacaccattctcctgcctcagcctcctgaatagctgggactacaggtgcccgtcaccacacccagctaatttttttgtatttttagtagagacggggtttcaccgtgttagccaggatggtcttgatctcctgaccttgtgatccgctcgtctcagcctcccaaagtgctgggattacaggcgtgagccactgcgcctggccctgggtatctttttgcctataataaagccagccatctaaaaacagttcaagccctggctctggtacctgtcagctgtgtggccctgggcgggtccctcactctctgtgagcctcagttgcctcacctgtgaaatgtaactcagtggttgagtggatcaagtgaagggctgtatgtcaagcccctgtcaagccacctggtgctccgtgtcctgtggatggtagctgccctgaagcgggactttgcagactgaagtgctgtctcttcagagggagtgcaggtgtccggctcctggtgtgggagaggcaccctgtgctccctggcccgtgagacaagattgggtttgggggccagggcaggagtaggggcccgtcaccaggggaaacggctcgtggtagagcagctgaggtgcagctgggcctgtggcctagaaggcagtcttgtgggtgcctcctcccccagccgcaactcaggtctgcagctgggtcctgcctccttccgagtgggccatggccggtacatggctgctacttctcctggcccttgggtgtccagccctacccacaggtgagccccctctttgccttcctctctgtccctcctcagtctgccgaagcccatcccctcactctggacctccctgggtactgatgggctgcagggaggcaggacaagagatatttagggacctctggggagggtccctctggggaggggacctctggggaggggaccctatatagagggtccccactatactcttcccattgtactcttcctcccagccaccttgctctggggctcctatgtcctcctgccctggagcccacagtgttgatagggaggctgcccctcttagaggtatagagaaatgagaacaaactggatggacatccatagaaggtggggttagggtagccagtgtgtgtgatgtgatatgcaatgatgtcatatgggtaacagtgtgaggtcctgtcctgtccttcttgccctcaggatgcctgccctagttcaataggactcagggtgtctcaagttcactcacagctcacgcttatcagtgggctcaggataggacccaaggcctcttcccagggtatttacccccagccctcccatgatcaaggctggagccaaaggactcatgttttgaggggaaaattccagcttcatctagaagcatgtgcatgtgtgcatgtacgtggtgggggaaggtccatgacttttgagtcaggggggtctccttgatctagagctggccccaagtatctcacaggcactccttcattagggagataaaccacacctatgtggaacacagggagcccatggcaggaggcctgagctcgggaaggaagtaaccagggtaagcagggacaatcctgggatgcttcatggaagaagtggaagctgaactcaacttggggaatgtctctatctatataactgaaaaggctctggaggttgagtcctggagctcgtgcccagccttctctactacctttgtttgcaatgccttattaatattaa

SEQ ID NO: 11265 - DNA, 6000 bp, Homo sapiens
ctgaaaatttgaggtgtccaagaggacagtcaagcatgtacacagaatcaggtggtatgaaatctaacagcaaaatatagggtagcccagtctaacaacaaaatgatatagtggattggctgattcaggtttattttcactcagatatcaagatacacttgagagcacttttcctggactaaattgtaactttcaaggtgaagatgtaatcatgagactagaaccctgtgtaagggggcagcagagacaagtaaacaaagctgactggcaaaaatccccatggtccacacagcatcctattctacctgtatcatttaaggtgccagaagataaacaaccgcaacctattaagaaagcaagaaacaaacctggaaataaaataaaagcctagacggaaagctatacccagtgtctgggttatttgtgagataaaataggataatacctcacttcatttctggaaagtctaaatccaattacttaaaaaaaaaaactcactatagagaacattaacaaatatttatctctttctacttttcccaatcacttttccttaaccctttgctatctggttaacagtaaaacatttctttgaatggtcactaaaaatctgctaaatattacatgcaataggcatgtcttcatcttcaagtttttgacctgtaccatgacattatggatcacctctttttgacaattatacaaactttggttccacaacattgtactatcttaatctttcccttacccctttgagccttttttctgttccttttggcttcttcatttaccaatatattttccataagtatttaattataaagtgtaacaaagtctaaagtgattttagtacatctgacatctttttgaacaaggcaaggaccttaatacacacttctaggttaggtttttttccccctcaggatttagaatgtattattccattctcttctgacacttgggattttaatttttgagatgtttggaattgcccatcataagctgggtactgtcagagacttcaactcaaagtcagataccccaccagaaacagataaaaagataatggcacatctgagacacaagcaccagagggtataagcaagctgcatgagcaagcagctcagacgcccatgccacccaccaaggttgcaccaaaacacctccctcacctcacaccaatggctatgtagggattactctatggccaactgaaggaggaggaaaaaaacctgagcttttatggcaagattatggataggctggcttggtatgcaggtgccagtaaaaaatgagaagcagctgtggaacaacgtcacttgtaaaatctctgaataacagtggagaaggaaaatttccccaaaaggtgaagctttgagcagtgcacctacagatccactttgtgtgaagttctataaattccttcaggctgacaggtataaaagtcagctttaaattctccttctcatttattcttatcagtcttggttttaagataacataaaacttggtcaagctacttatgcaaaaaaaagggggaggggaatttttataaggatacaggaatattttagagaactccagggcaggaatgaaaccaggcctaagaaaaaattcttaaaaaagagactggaattgcatctggactatttttccatctcacctctgatcctcttggaaagtatcattttctctttctctctctttctccccaccccatctctacactttttctatttctctaatagaaaaatggccaatctatatctcccaaggttttacataaatatatatatgagtgtatgtcacagccctgtcacctaagagactaaatttttaaaatttggtgtaaatatagattctcatgtgaaaaattccaacgggttcaactggaattaggtacctattcttagtacaatcaacttggtagagtcaccttattcaaaacagttgctaggggctcagccttgactctgagagagaactgggctactatgagctgaacaaatagctctatgctcttcattcattctcccaatcattccagctgaaaacttcataagtcagtttaggcttatccttctctttcatatactattaatttatagttctgtcacaaagaattaattcattcttctttcaaaatccagtattatctattccttctccattctcacgggctttgttatttgccaaaatgatagttcaaaaacagacattacactgtagttaaatttgcatttcttaaactactggtgaggataaactattttttttttcatcctatagactactaacatttctgctttcttggtctgtattgtggacttgtgttccccaaaattcgtatgttggagtgctcttcaatgtgactgtgtttggaacagggcttttaagaaggtaattaaggttaaatggaagtcacaaaggtgaggctctatgaagagacatcggggtaatgtgcacagaggcaaggctatgtgaggatgctgcaagaaagtagccgtctgcaagccaaccagaaaggccttgggggaaaccaaaactgctgacaccttaatcttggacttctaggccccagaactgtgagaaaataaatttgtgctgtttaagctccaaagtctttgaagccgaaagacttttgttatggcaatagcaatctaatacagtttgcctcagtgttcattatttttcttttgacacgtttgtttcttctagcaacagttctctaagcattaagactcttagccctttatacataataaacattaacaaacatttttccccatttatttgcccccccacctttgtttttattttgctttatataactgattttttttagtatagtccaatttttcaaacttttccttcatggttgctgcacatgaaattatgattaaggccagccttcccatcccccagaatatttatatttacatataggttcttccaattatttttctttttggtctcatctgaattattttcaatgtatgatataagatacaaattctttaaaaatatagcttacaatgggccaggcaccgtggctcatgcctgtaatcccagcacttcgggaggccgaggtggacggatcacgaggtcaggagatcgagaccatcctggctaacacggtgaaaccccatctctactaaaaatacaaaaaaattagccgggcgtggtggcgggcacatgtagtcccagctactcgggagctgaggcaggagaatggcgtgaacccgggaggcggagcttgcagtgagcccagatcgcaccactgcactccagccagaatgacagagcgagactccgcctcaaaaaaaaaaaaatatatatatatataaaatatactatagctatatagctatagtatattatatatatagcttacaattatccctgtaccatgtaatcattttccactgatatgaaatcttttatcgtatactaaatacttacactttaactcctgttgctttttgtttatgacattcactcattcaataatttattttggaggctatattcttccgcatttatcgtaagggaaaaagaatttttcaccaagtttaagaaacattattttgggtgtcttaaataataaaagactatgacggaaagttcttaacgttagtttttaaattaaaattgttttcagctaacaataaacaagatggatatacacaaaattatgttaatctagtgatgagcctaattaaaggaggggggtaccattgatttagttgaattatactaatcgaaaagaacagaaaaaacgatggtgaagaaactacaagaggactgtcagcttttcagggtccttttaaaagaacagttcttgtccttctagaactagttattcaaaattcttttttcccccctcgattctcttgataaaattcagatagtaaagacgtataagtcagtggggctatttttacaaagatcattgcttagtgctaggaagagaatccagaagacgggaagttgagggttgtgttctaaaagttctctgaagaaaagggtacagagaagctccaagttgtgcaggcccagcaaactccatgttggacgtgctttgctaccacctaaatctcttctgtcggaattcaaggcccgaaccattccagggattttagaaaaaaatggggagacacaaaaatgatgccaaagccatagctatcattacaaacatccattatgttcactctgctttccatatgcaacgcactctacatacaatgggcgccttataagcacatagcaaatgtgaaaaatattatcaacattgctttgataatattaatatattatatatattagaatatattatatattagaatatattatatatattagaatatattatatattactaatataaaaaatattatcaaccctgctttagagaagatgatactgagatatgaagaatcataaactgtccaagatcacaggggcaaaaagttcacctcaactgaaacctctcacgaaccacaaaaatgtggccgagggagcctcaaaaagcagtaccccaagcggggacggtaaagtcagaaaagacaaggctgggggtaatcacagagaaatctaaaaacccgctcggcctcgctactcttctccttcctctgaggtgcagaggcgcggtgggacgacaaggagttgcgagaaagggcagagctcactgaggaggcaacagagaaagtccgctaacaatttttgaaggccgtaagttaaacatgttaaaaactgtagctactcactcagccgacatctagtaaaaaagatgcggcaagatcaacaaggcatatagcttgcgcccgccagaagttccgcggcctccacacccatcccggcatactttgcgccgtgcacaggcaagccctggtgcgcattggccccttcggccgccgtcggccggtagttactatggaaacccagctgccatcgctatgtctctgcaaaagacccctccgacccgagtgttcgtggaactggttccctgggctgaccggagccgggagaacaacctggcctcagggagagagacgctaccgggcttacgccaccccctctcctcaacacaagcccaaactgctacccgcgaggtgcaagtaagcggcacctcagaagtgtctgcgggccctgaccgggcgcaggtggtggtgcgagtgagcagcaccaaggaggcggcagccgaggccaaaaagagcgtttgtcgccgtctagattacatcacgcagagcctccagcagcagggcgtgcaggtgagatctccgcgggggaggaaataagagccggaagacacaaaagggttggcagatggtcgggccccacaggcccccctagcgggaagggagatgtggagggtctggagcgtttaggacgcgtttgttgcaaaggtactccgggacgccaggacctggcagagtgaatatttgacccattcttctcctagacgaaggtaattattggcctcaggcaaattaaaaataaaagaatgcaaattgggtaggtttttatctggggatatttgcttcagtgattttgtttttaaatttaaagtgatgaaatgttaaaacttgaaatgttagttgtaaatacttgcccacgtggagtgctggacactaaatattttgttttgttttgtttttattccgcaccatggaattggcaagtgaagagcacgacctgcttccttccgatcatgtaaaactttgcatggaatggttcttgagtatgttccgcaaacagtaacgttgggaagtggggaagaagttgcgtccattttcattttataatgattttcattttatagtgattcccccaaaatttcttcggccttcttaggtttaacttaaaagaaaaaatcaagccagtattgtggataccacatatacgaaatacttctacttacttaacggagatgtccatgagacaaatcactaaacaaatcttaccttaagcctactcctaaggcaagaaaaaaaatgaagc

SEQ ID NO: 11266 - DNA, 6000 bp, Homo sapiens; identical to SEQ ID NO: 1220

SEQ ID NO: 11267 - DNA, 6000 bp, Homo sapiens
gcccatcctttgggaatatctcaaatttcctacatgacattttaattgtaaagaagggtgatacttaatttccaaaatttcttaatactttctagaaattgttttgttctaagtggatttcccacaagctttatggtattagcaaatacttcttgatatattcaaactgtttaattagcattaaaacccaattgcaaggattctttttaaatatagctttttaaagatcttatttacatggataagagtttcgttaatacttccctttggccaagtgcaatgtactgagtctaatgtacttcttggaatgaactacctctcttaataagagcaatccttcaagcatcacaaaaaaggttttgtatatatatctttaaagtcactaaaatgtctaacctagtcataggtaaagaaatgcaaagaccctaatcttgtaatcttgttttttgctcgctcttcaaaatgtgtatactatgccatcagtcaaatgtggaagaaaaagcaacttagcaaaacagcactatttatcaatttagtagtctctcagatcatacagaaattaacctttaataccttaggactccctgtgggtcagactgtacaattttttatacctcttctaccatattactggctctgaagaactgacaaacttttgtacggtaacccttccttctttccactgtccatctgcccttaaaagagtgagctttatagattagcctggctcctttttaccaaggaagacacgcagctaagagcaaattaccagtagagtgtgtgacattttgctgactcttcctttgtagagaaggtcctgccaagtagcagtgtgctacctaagcaaagtaaatgtaaatgtggaagtttcttgcccagtatttagaccatatgaactacagttttctaatgcatttgcttgctggtaagttggaagggacttcgagaaaagaaatagattttcttaaatgttttttattaaaacttgagttttaaaaaccatatcctttctcctttcagccagtacatctaatttgttacatttatatttgaagaaaagggaataggtagcagattattggattctttgaagtttttctagattttttttgttctaggactttaataagggcagtaagaacacagatcattgttttgcatggattttctttactttttcccatattttctttttgtcactatctaagcttccaagaatctatttttcacccaccttcatctcaagtacacaaatgaaatagattattgggattgtgaaactatgtaagacattctaatgcagttcatctgatgttagaagaatacctaaattttacatttcttttaaaaatccaaatgtcaaagaggaacaggtagaatgcctaaatattacaaaaaaagaggaacaacctttttcagtttaacatgtagagtaagagaataagtagttaagaaagcgaattatttttcatgcttgtagcatcagtaatggaagatgggttgttctgctctggagcctttgtgtgagtagttatagcatttaaggaaataaactgtaattataatgcattctaaaatctactggaaaaaaatactgtcatatacatatatacttaccacctataaaagatttaattaaacattagtcttctgcacttctactctgatataaaatttgttgtacatggttcataccggcttgattgcttttataaagtgaaatgagtttcccaaatgtgatatgcaaaagtaaaattttctaaattacagacatttttaatgctattatatcatcatagataaatttatttcttagttcagattagattataatgcttgatttcaagtacttgaaaaccatccattctatagatgaacattgccttgaagtgcttcaatttgagaaccttgaacagtgttgctttagtgtaccttttgttatttctaagcctaaaataatatggcataacattcgagagcaataaaatgccttgaccaaagaggattttctgtcttacatactgttcttaaggatatgcaaaagaagattgaatatacaaatgtttttgagtcagatcttactgaaatagataagatttttgcctagtttcctgaagaacctgaacttaattgatatttattgtttgttatatcattcttaaagctaaaaagaaaccttaggtgtccttatgatttcagccgcatttagatctcttaactgaataaaaaacgcgtattcgcttttaatttcagtcaaggacgtttagctctattgtatattggttttttactaacagtatgataagtagtaaattggagtaagtagaatgtagagaggcccaaacattttaactgaaaaatagatgagtagttaggcttctaatacttgtatcttgttgccctccttcagaagtttcaaatgtcaggtattggcaaataaattatctaggtggggagggctttatagaatgcttaaacaactggaagcagagatgcttttcaaggacacctgagcactattttgctttctccaccaggatgaaaatatcacttttttaatagtatatttggttcaagagccggtcggtaactaatgtttgtaaacctttctttaactggaagcatgtaagttattaaatatttcctccagactactgcagcaccaatatgaagaggcaaagagagaaagaattgagtttttctagatctggcaagttctcacctagcacagatagtgtcattagcagatgtaagcctttgatagggatcctagggctaaggggtgctatactaagatgtactgtactagtttctgtgtatagccacctcactttcaataaaattctctatttgtggcatattaaatagggaagttaatctaactttataatgaatatttaggtggcctttctgccatattgtatagtctaccaagatcactttttgtaatctaaaaaattcaactctaagctaataaagctggtttattggaaagcaaataaaccacctgacggacctttccagtgaaagagccagaatttgttaaaattagtaaagaaatacgaaactttggcagcctaaattagaacatatattttaaaattacatgttcagtttaccatgaagcagtaatgtaatgctagtgtatcatgctatgcatttttttaaatcttgggtattttacacatgaagagaatggtgtcccataatgtgtaatattcaaaactcgtgaatctcaaaatttctaacatttaggttaagagaagtctccaggaaaatgtagtgttgattcttacatgaagacagtcttcaggaagttttaaagtagaaaataagagtagtgtaagtcaaggaaaactatgagcttaactgataagaaaaattacaggagtggctgtctgggacctaagccagcagtctctggaagaaacccgggataacttttaaataccagctcaggaaatcagttgtacttaaaagagcagcttttttgaagaggggctctgttttaatgacattactgtaaaaagaatggaactgacccctaagttgctttctatttgcggtgggcaggagtgcagatttagtatgcactggcaatgtgatgtattcttagaagtcattctaaaaagtggaatttgttctctattataagacatgaacgttccagaattcattacagaatgaaatactcaggatagcatatgcaggtttcagattccttgatcaggcatctgtttacatcatgctgtcctcatttctactactttttccatttacactaccatgtataatataggtatgtacatatcaaaggaccaaaaaaggtaaaatgagtgaatgtctaaattagtattcagttgcaaaaaacttcagaatcaattcaaatttactgagaacacacccagtaattttcatttgaagtaataggaggttgatttttcttacattcatatttctaaattatgacttaaaatttaatattggagcaacaagtatttgttgattgcaatcctgttttgctttgtctgaactatctgccagatggtttctgccatggttgtgctaattaaaatgcattgcctaatactgcttgctttgattcatgcagtagcttaaagatttctcattttatggcatttgttaactgtcagctcttctttaccttacttccttaaaaggttttacttcccttttctcctatccttccacctaaatttaagttcagtttttgttgttattgcaatggtgatgtaatggtttatagacacatgtgtcgggtggttcctcagattaacaaatgttgctgtgttgctaatctgaaaagagaattccagacacttttacaagcctgtctcatcaccgctaattttagaatgaatgtgttgaatgaaatgtgcctaaaattgcttattagtcacggttgtggggatcctttttgtccttgggaaacaggggtagttgaaagtattcagaaaagtaatctagtggatctaattcaataaatgcacagttttgttgttttagtttgtaatgaaaagttgaaatttttggaataaaatgaaatttgaagtaaatgtgaattcagataatgcaaagaattataaaacgtagcttaaaatggaaaaaaactgatgatgtcttacatttgcaagaggagttacaaatttgagtttttatattcactacacatattattctattaaacattcttattccattgtaaggtccttttagtttatctgcagcataataatggggtcatgtgggttaaggtgctaaattatattgctgattggttttaaaaggatgtctctacgaaagattctggaagtctaaaattttaagaatgaattctgtctactaatcgggaaactacaattagagtgagtacatgttctaagtgttgcccactagttgagaaattacgtaatacagatttcagagtcaaaagaattttgagtattgtatcagctgttactcagtattttggtgtttccttttagacagctgatctctcacgttagaagatactgcataaacagctttattcccaaataaaagtgctgagtgaagccattgctcaattcattgttttgctgaggacttatatgtgtagaattctctcataaattgatttttaattaaattaattataaacatagaagtttctaaagcagaattaacacaatagcccatttcaacaagctgtatatttgagaacagagtgacagttattaacatccagtaggaaattaagagttgttgttcacaaataataaattactagattctgacaaagactaatggggattaagtaagcgtgactcaatataacaaatttaagcctaagcatcttctaggccctgaaatgaacaaggtattgctgccagttaaagtcagttgtgtcttacaacctgctagctgtcttgctgtaaaaactgtaacgtaaggcccttgaaatagatgccgtcatcagccccagcccccaagcattcatctatttaaacacatgacagaagatggtggaagagagttcagcagctattcatgtggtagaagtggttattgtattaggacatactctgttgtaggccagcaacttttgagttaaaacaccgcagctgtttctcttcctttctttacatctttctcttcttttttttttttcttagcaataaactcacttttttttccccacaaacattttgtgtagatccaaggagcaacaaattccaactttctgctgtagcaattacacgctttttgtctgtttgactagattttagtattttactttttttcttctttttaaaggcaacggacagccaagacgtagatccatccaagacttgactgtaactggaacagaacctggtcaggtaagacaacattcaaattttctatctttgaagaatactaggcagaaaacaagaattaactgtattctactctgcaaaattagttttatgagttgacctaaagttgtgatagagaaat

SEQ ID NO: 11268 - DNA, 6000 bp, Homo sapiens; identical to SEQ ID NO: 1197

SEQ ID NO: 11269 - DNA, 6000 bp, Homo sapiens
tggtagtcgtcattctattgtctctccccatgaggtccattgttttaatttttggctgccacaaataagtgagaacatgcgaagtttgtctctctgggcctggggcttatttcacttcacatgatgacctccagttctttgcaaatgacatgatggctgaatagtactccacatacacgtgtgcaccacattttctttctccattcgtctgttgatggacacttaggtcgcttgcagatcttggctattttgaatagtgctgcaataaacatggaaaagtagatagctctttaatataccgatttcctttcttttgggtatatgcctaacagtgggagtgctggagcatatgacagctctattatatttttagtttttggaagaacctccacattatttcccacagtggttatactagtttacgttcccaccaacagtgtacaagggttctcttttgctacatcctcgccaggattccttattgcctgtcttctggataaaagccagtttatctggggtgggatgatatctcgtaggagttttgatttgccttcatctgatgacgaatgatgttgagcaccttttgatatacctgtttgccatttgtatgtcttcttttgagaaatgactattcagatcttttgctcatttttaagttggattattagatatttttcctatagagttgtttgagatccttatatgttttggttactaatcctttgtcagatgaatagtttgaaaatattttctcccattcttggatggtctcttcactttgtttattgtttcctttgctgtgcagaagctttttaacttgatatgatcccatttatgcatttttactttggttgcctctgcttgtggggtattacttaaaaaatctttgccagtccaatatcttagagagtttccccaatgttttctttcatagttttcatagtttgaggtcatagatttacatctttaatcctttttgattggatttttatatgtggtgagagatagggtccagtttcattcttctgcataaggatatctagtttccccagcaccatttattgaagagactctcctttgccctgtatgtgttcttggtaactttgttagaaataacttcactgtagatatatggatttgtttctgggttctctattctgtttcattggtccgtgtgtctgtttttatgccactaccgtgctgttttgattactctagctctgtagtataatttgaagtcagataatgtgattccgctagttttgttctttttgctcagggtagctttatctattctgggttttttgtgattccatatacattttaggattgtttttctatttctgtgaagaatgtcattggtgttttgatagcaattgcattgaatttgtagattgctttgggtaggatggatattttaacaaaattgattcttccggctgggcacggtggctcactcctgtaatcccagcactttgggaggccgagtcaggtggatcacttgagatcaggagttcaagaccagcctgatcaacatggggaaaccccgcctctactaaaaatacaaaattagccaggcgtggtggcatatgcctgtaatcccagctactcaggaaagctgaggcaggagaatcgcttgaacccaggaggcagaggttgtggtgagctgagattgcaccattgcactccagcctgggcaacaggagcaaaactccatctcagaaaataaaaataaacattgattcttccagtccgtgaacatggaatgccttttccattttttgtgtcctcttcaatgttttgcatcagtgctttatagtttttattggagagatctttcacttcttcagttaagtctattcctaggtattttattttatttgtagctaatgaaaatgggattcgtttcttgatttctttttcagattatttgctgttagcacatagaagtgctattgttttttgcatgttgattttgtatcctgcaactttactgaatttgttcttcagttctaatagttttttggtggagtctttaggttttccaaatatcagaccacatgatgtgcaaacaaggataatttgacttcttcttttccaattttgatgccctttatttccttctcctgtcagattgctctagctaggacttgcagtattgtgttgcataactgtagtgaaagtagtcatccttgtcttgttccagatcttaaagaaaaggctttcagttttcccccattcagtatgttactagctgtgagttgtcatatatggcttttgttatattgaggtctgttccttgtatactcagtttttttagagtttttatcatgaagggatgttaaacttatcaaatgctttttcagtatcaattgaaatggtgatatggcttttgtcctttattctgttgatacgatgtattacattgattgatttgtgtatgcatacctggaatacattccacttggtcatgaagaatgatctttttaatatactgttgaatgtggtttgctagtatttcattgatgatatttgcctcaatgttcatcagggatataggcctgtagttttctttttttgatgtgtctttgcctgattttgatatcaggatattcctggctttgtaaaatgagtttggaagtattccctcctcctctgtttttcagaacaatttgaataggactgatatttcttgttctttaaacgtttaattgtggtaaattatacattacatacattttactgttttaaccgcttttaagtgtatactcggtggcattagatacattcacatttttgtgcaacccaaaactctgtacccattaatcagtaactccccattcctccctacctctggcccctggtaaccatcattctactttttgtttctatgaatttgaccactctaggtacctcatttaagtagaatcgtgtaatgtttgtctttttgattctggcttatttcacttataatatttcgaggttcatccaggttgtagtatgggtcagattttcattccttttaatgatgaataatactcattatatgtatgtaccacatcttggttatccattcctcagacaatggacacttgggttacttctaccttttggatattggcaaatatttcatttctcttgggtatatatttatttcttttgagtatttcttttgggtatatatccagaaatagaattgttggatcatacggtatttcattttttaatttttagaggaatcaccatagtgttttccattgcaggcgtgccattttgtatttctagaagcagtatacaggggcttcagtttctctacctccttgccaaacttgctgtgtgtgtgtgtgtgtgtgtgtgtgtgtgtgtgtgtgataatagccaccctgattggtttgaagtggtatctcattgtggtttggatttgcattttcctaatgagtactgatattgagcatcttttcatgtgtttattgatcatttgtatattttctttgaagaattggccattgaagtcttgcccatttttctcccccacatagcttctcatggctattttgcccatttttgagtgggttgactgttttgttgtttttgtcaaacttttttgcatattctggaaactaatctctctctttttctttttttttttttttttttttttgagatggagtcttgctctgttgcccaggctggagtgcagtggcacgatctcagctcactgcaagctccgcccgctagcttcatgccattctcccgcctcagcctcccgagtagctgggactacaggcgcccgccaccacacccggctaattttttgtatttttagtagagatagggtttcaccatgttagccaggatggtctcaatctcctgacctggtgatacacccgcctcggcctcccaaagtgctggaactacaggcttgagccaccacgcctggccttctggaaactaatctcttatcagatatatgacttgcaatatttatttcatttcaggggttgattgctttctcactctgattgtgccctttgatgcacagatattttgaatttttcatgagtccagtttgtcagttctttctattctatctgtgctttggcgtcatatccatgaaagcactgtcaaaccctatgtcatgaacattatacccaatgtttttttctaagatatttttatgttttagttcttgagtttagagtttaggtctttgattcattttgagttaatttttgtatatagtacaaattaagggtccaattttatattatttgaacatccagttcccccagcactatttgctgaaaagatggacttactctttgagaccctgtcacctgcccaccccagtggacactagctggtccatccaattgctgtcctggggccttgtcatgctactcttccactttggacccaagcccacatcattgctcccctctgggatactgaccccactataaacttcactggggctacaaccttcctaccccttgtgcctcatgaccaccccctcccttgtccccaccatgcccatgatgagtcttttctcaaggcagctcgccttgcctccatctcaccctcacctgtgcaccacagccacactggacatgggtccctctgagcctgagtcccttcccattcccactgtcccctctggcaagaccttccttccaacactgccttcatgctcctcccttgcccctgcagggcagcctctccccttggcccctattcccttagggggcttgtggccacccagtcctggcacctgacctacaagtttgccatcttcattcccccttcttctgttcatcagccccctcctctatcctcccaccctcacagttttccttgtatatgaaatcttcgttcttgtccttttgcccatgcgcatttcctgcctcctcagggaggtcgggacagcagacctgtgtgttaaacatcaatgtgaagttatttccaggaagaagtttcacctgtgatttcctcttccccagagccccacagtcttcgttacaacctcatggtgctgtcccaggatggatctgtgcagtcagggtttctcgctgagggacatctggatggtcagcccttcctgcgctatgacaggcagaaacgcagggcaaagccccagggacagtgggcagaaaatgtcctgggagctaagacctgggacacagagaccgaggacttgacagagaatgggcaagacctcaggaggaccctgactcatatcaaggaccagaaaggaggtgagagtcggcaggggcaagagtaatgggaggccttctccaggaaagttggagacagagagcagggacctgtctcttcccgctggatctggctgggggtggggatgaggaatagggtcagggaggctcagcagggtggtgagccggaactcagcccacacagggaggcatggaggagggccagggaggggtcgctgctgggctgagttcctcacttgggtggaaaggtgatgggttcgggaatggagaagtcactgctgggtgggggcaggcttgcattccctccaggagattagggtctgtgagatccatgaagacagcagcaccaggggctcccggcatttctactacgatggggagctcttcctctcccaaaacctggagactcaagaatcgacagtgccccagtcctccagagctcagaccttggctatgaacgtcacaaatttctggaaggaagatgccatgaagaccaagacacactatcgcgctatgcaggcagactgcctgcagaaactacagcgatatctgaaatccggggtggccatcaggagaacaggtaccgaccctggccaggggctctactgttcccgcaattctgctagagttgcctcgcctcccagctctgtccggggaaaccctccctgtgctatggatgcaggcgtttcctgttggcatattgtgtcctgatttgcctctcctgttagagccattggataaagacagtgggtctgggactgaactg

SEQ ID NO: 11270 - DNA, 6000 bp, Homo sapiens
aaacaagatggatatacacaaaattatgttaatctagtgatgagcctaattaaaggaggggggtaccattgatttagttgaattatactaatcgaaaagaacagaaaaaacgatggtgaagaaactacaagaggactgtcagcttttcagggtccttttaaaagaacagttcttgtccttctagaactagttattcaaaattcttttttcccccctcgattctcttgataaaattcagatagtaaagacgtataagtcagtggggctatttttacaaagatcattgcttagtgctaggaagagaatccagaagacgggaagttgagggttgtgttctaaaagttctctgaagaaaagggtacagagaagctccaagttgtgcaggcccagcaaactccatgttggacgtgctttgctaccacctaaatctcttctgtcggaattcaaggcccgaaccattccagggattttagaaaaaaatggggagacacaaaaatgatgccaaagccatagctatcattacaaacatccattatgttcactctgctttccatatgcaacgcactctacatacaatgggcgccttataagcacatagcaaatgtgaaaaatattatcaacattgctttgataatattaatatattatatatattagaatatattatatattagaatatattatatatattagaatatattatatattactaatataaaaaatattatcaaccctgctttagagaagatgatactgagatatgaagaatcataaactgtccaagatcacaggggcaaaaagttcacctcaactgaaacctctcacgaaccacaaaaatgtggccgagggagcctcaaaaagcagtaccccaagcggggacggtaaagtcagaaaagacaaggctgggggtaatcacagagaaatctaaaaacccgctcggcctcgctactcttctccttcctctgaggtgcagaggcgcggtgggacgacaaggagttgcgagaaagggcagagctcactgaggaggcaacagagaaagtccgctaacaatttttgaaggccgtaagttaaacatgttaaaaactgtagctactcactcagccgacatctagtaaaaaagatgcggcaagatcaacaaggcatatagcttgcgcccgccagaagttccgcggcctccacacccatcccggcatactttgcgccgtgcacaggcaagccctggtgcgcattggccccttcggccgccgtcggccggtagttactatggaaacccagctgccatcgctatgtctctgcaaaagacccctccgacccgagtgttcgtggaactggttccctgggctgaccggagccgggagaacaacctggcctcagggagagagacgctaccgggcttacgccaccccctctcctcaacacaagcccaaactgctacccgcgaggtgcaagtaagcggcacctcagaagtgtctgcgggccctgaccgggcgcaggtggtggtgcgagtgagcagcaccaaggaggcggcagccgaggccaaaaagagcgtttgtcgccgtctagattacatcacgcagagcctccagcagcagggcgtgcaggtgagatctccgcgggggaggaaataagagccggaagacacaaaagggttggcagatggtcgggccccacaggcccccctagcgggaagggagatgtggagggtctggagcgtttaggacgcgtttgttgcaaaggtactccgggacgccaggacctggcagagtgaatatttgacccattcttctcctagacgaaggtaattattggcctcaggcaaattaaaaataaaagaatgcaaattgggtaggtttttatctggggatatttgcttcagtgattttgtttttaaatttaaagtgatgaaatgttaaaacttgaaatgttagttgtaaatacttgcccacgtggagtgctggacactaaatattttgttttgttttgtttttattccgcaccatggaattggcaagtgaagagcacgacctgcttccttccgatcatgtaaaactttgcatggaatggttcttgagtatgttccgcaaacagtaacgttgggaagtggggaagaagttgcgtccattttcattttataatgattttcattttatagtgattcccccaaaatttcttcggccttcttaggtttaacttaaaagaaaaaatcaagccagtattgtggataccacatatacgaaatacttctacttacttaacggagatgtccatgagacaaatcactaaacaaatcttaccttaagcctactcctaaggcaagaaaaaaaatgaagccatcatttaatccacacaatagcactgttaggcatgttttaatatccctgttttccaaatttaaagaggttaaacaatgctctgaactttaggtagagcaatatttgaactcatgtattcctgaaaccagaatgtaagttgcttccaattctgccgataattagaatgaaagaaaattagaaatcatagggatcaacgatttcagttttctcattttatagagtaggaccccaaaggccagagatgtaacttatccaggatgacattgagttggtaaaagtgcaggcattgttacttccagtctattgcaagaaattccataccccgaaaaagcaagtccttatttttaacaagaaaagatatttgaattgcatttataatacaaacatacaagttattacaaagtcatttggacaagatttcttcaaatgattttacaatttagaaaaatacagataattataaataatgtgagtaaagtgggtttaatatgtagaaaaatagttttaaaaaactgctactagtgctgtagtcgtttgaataatgttaacaagtttttaagttatttacataaaataaaaagagctcacaggtctctaatatataaaacaacataagctgggcatggtggctcatgcctgtaatgccaacactttgggaggccaaggcaggtggatcacttgaggccaggagttcgagaccagcctggccaacatggcaaaacccaatctctagtaaaaatacaaaaattaggtgggcatggtggcacagtcctgtaatcccagctactagggtgactgaggcaggaaaatctcttgaatccgggaggcgaaggtttcagtgagccgagatggtgccactgcactccagcttgggtgacagagactctgtctcaaataagtagtaagtaaataaattaactaagtccaacttagagtaatcaagattcagtgttcaaggcaagacataagaaagacagtaacctcccaattatctctgctaatggatgaaagcagtcaggtagataatttgttcaggagataatacaaaatatcatttatattttcagaatgaattatgggtcttcacaaagtctgtattcattttaaactttagaattctgagctgtaagatttataaacatcacttccctgcttaaagggctcctcataatccaaactcctttgcttaaaagatggagcctgagccgggcgtggtggctcacgcctgtaatcccatcactttgggaggccgaggagggcagatcacctgaggtgaggagttcaagaccagcctgaccaacatggtgaaatctcgtctctactaaaaataccaaaattagccaagcatggtggtgcatgcctgtaatcccagttacttgtgaggctgaggcaggagaattgcttgaacccaggaggcggaggttgcagtcagctgagttcgtgccattgcactccagcctgggcaacaagagtgaaactccgtcccaaaaaaaaaaaaaaaaaaaaaaaaaaaaaaagatggagcctgactatcctcatctcctatcatatcttcctcccctctattgtatttttctttaagaattagcccaagtctgagctatggaagtgagacactgtctcaaaaaaaaaaagaaaagaaaagaatcagcccaaattcaccttcttggcattcctttcctaatataacactaatccctgccatgcaacacttcactccctatacttgtaataaaaacttatcctgtatcataattcttaatttacttgtttctcctccatattctaaacttctccagagccaagaccatttgttctttttttgcctgtatgagttatggtccatacacttcacataatgtgtactcagaaaatgccttctgaatgaataatagaaaaaaaatgaaacaataagtgaacaaattattcagctatggtatagatcatagatttatgaacttgtgtgaaggtataatccttacttctagcgtggttttcattgaaaagtgttttaaagttctaagcaatatttactcattcaaccaacaaacattaagcctttcttttcattgttcatttttgtttttggtttttgtttttttttgagatggagtttcgcttttgtcgcccaggctggagtacaatggaggcagtctaggctcactgcaacctccgcctcccaggttcaagcaattctcctgcctcagcctcccaagtagctgggattacaggcgcctgccaccacgcctggtaatttttgtatgtttagtagagatggggtttcactgtgttggccaggctggtctcgaactcctgactgatcccccacctcaacctcccaaaatgctgggattacaggcgtgagccactgcgcctggcccattgttcatttttaaacaatactttatattgtcttagtttgtttggtctgctgtaatgaaaaaccatagcctgggtagcttataaacaacagaaatgtgtatcttacagttctggaatctgggcatccaagatcaaggagccagtagatttggtatatagtgaatgctaccaagaattaccctgatatctctgcttcccctttattttcttctctctccaactgtaggcataaaatgacctcacaatgtctggtcctccctcacaaaagtgtttcggtcactcaggatgcatatctaagttctagtgcaagagaggactaggagtaaatgctgaagggagtgtttaacccctttaacccattgcagtatgagcaagactactgtaagattcctttaacacagtgcaaccaaaagacagacaccttttctcctttttgcttcacaacagaccacctcagccaccatgacacccagtaggaggtattccacaggaacagcagacgagaacttaccttacatcatgacacatcaaggcatatagttcttgcaatggactaaatgtttgtttccccccaaaatttatagttgaaacctaatcccaagtatgatggtattcggaggaggcttttaggaggtgattgggacatgaggatagggctgtttatagatgagaactccaaggaccagagtgattattggcaggttgcttgcacacggtcacagccaggaagtggcagaattttaactttagggtccatgctcttaaccactacaggatgttgcttctttattctcttgacagtggataattgagattttaggtagggaagatgtcactgatgctattgataccactacttgtatcctttggcacttcacatttgtgtgcatgcaggcccagcttccatctgacaacatttgtaaattctttgcctgaaagtgaaagctttccctggctgccggaatccactctctgcaaatggggccagagtgtaatgccagggaattaaagtcctctcccccagccccagcagccttcatctgaaggctaatgtagaactagaatgactgagggaaatgaatggaaagagaccccagcatcttcaccccttggggtcggataattctgaggtatgtgttccaccctggttcctagagtttctctgcaggattaaatttgagctgaccacagcggtaatttgcttgacaacatatcctttagtgcctttctttccttatctgtcttgcatcccactctgttaatggtgttttttgggatcaccttc

SEQ ID NO: 11271 - DNA, 6000 bp, Homo sapiens; identical to SEQ ID NO: 1199

SEQ ID NO: 11272 - DNA, 6000 bp, Homo sapiens
ggcagggctggcagaggaccaggagtaaataaggccagagaggacaccagggtctgggagtgaaggcactgagcttgggtccccctttggaagacaatgacctgagagctgtgagatttcagacaagttcccgaaccttttgggccctgctttcctcatctgtaaatgggataatatcagtctcaccagcttcttaaaattcaatacaatggagttgggtgtggtggctcacgcctctagtcccggcactttgggaagccgaggtgggcagactgtttgaactcaggagatgcagaacagcctggataacatagcaaaacagtctctaccaaaaatacaaacaattagctgggcatggtggtgtgtgcttgtagtcccagctactagggaggctgaggtgggaggactgcttgagcccacgaggtagaggctgcagtgagccatgattgcaccactgcactccaggctgggagacagaatgagaccctgtctcaaaacaaacaagcaaacaaacaataaaggaaatccctaccacactatcaggggcattttggctgagcgcggtggctcacgcctgtaatcccagcactttgggaggctaggctggcaggtcacctgaggtcgggagtttgagaccagcctgaccaacacggagaaaccgtctctaccaaaaatacaaaattagccgggcgtgatggtgcatgcctgtaatcccagctacttgggaggctgaggcaggagaatctcttgaacccaggaggcagaggttgaggtgggctgaaatcgcgccattgcactctagcctgggcaacaacagggaaactccatctcaaaaaaacaaaacaaaacaaaaaacaaaactcccatttttgcgaggcaaattgggctcacagaggtaagctgcatgtccctgttgatggcagagctggggtctggatgcaggtctgcttcggggtaatccgctcttttgccttccagggtcctgcctcttacaatatgagctgtcaagttagatgcctgcactcagtaaacctactctgttttaagtaaaaacaacaagaaacaaatctgaatatgctagcctatctcaggtacgttaaaggaaatttttaaatagggggttttttgaccatttgggggagttttgggggaggggccttctgtctatacttgagctgggggatgttagggttgttcatctggatctagaggttttcctgtaatgttcttactccagaaggaaatctctagatggggaaagaaggtttcagcttttattctagtaagcagggctctacctataaagagctgcttccaccactcttttttttttttttgagacggagtcttgctgtgttgcccaggttggaatgcagtagtgcaatctcggctcaccacaacctctgtcttccgggttcaagtgattctcctgcctcagcctcccaagtagctgagactacaggtgtgtgccaccatgcctggctaatttttgtatttttagtacagatgggggtttcactatgttggtcaggctggtctcgaactcctgacctcgtgatctgactgccttggcctcccaaagtgctgggattacaggcatgacccaccgcacctggcctccaccactattataatatcaccaggttccccatttgaatccttcagtgccaaaggttttgcagaattcaaatgtttttgggacttgatagggctgacctaaaagtacactcactctatattaggtagcccaggagggcctaggcagcccaagaaccaaacacatgagtgtttctgcagggaaatgtatgaatattgacatcagtaggatgaaaataaataatagtcttactttagttcagattaggtttctgtcaccaaatgaattttggtggcagcctgatgaaaaatgttggttctcagagtgtttttgagtttagaattgtggttaagggagtatggacctgttgataacaaaaacaggaacaaggccaggtgtggtggctcacacctgtaatcccagcactttgagaggctgaggttggtggatcacctgaggtcaggcattcgagatcagcttgtccaacatggcgaaaacccatctcttctaaaaatataaaaattagctgggcgtggtggcatgcgcctgtaatcctagctacttgggaggctgacgcatgagaatcacttgaacctgggaggtagaggttgcagtgagccaggatcgcaccattgcattccagcctgggcaagaagagtgaaacttcataaaaaacaaaaacaaaaacaaaaaacagagaaacaggaacaacaatcgccagcatataccaagtgcttatcgtgtgtgccaggtactctaattatgtactatgtcagttgattctcaaaacatatatggcacaacatgggtactctgaacatgggcacaatcaatgtacaatgctataatgtataacacaggacaatgtagctgttaaaagcatggacactctatctagtccatctgggttataatctctgctctaccagtgaataactgtaactctggcaaatgacttctctatgccctgtttcctcagctgggaaatgggggataatatcagtactcacctcctaagattgttgtgaggattaaatgtgttactttataagaaatgtctggcacatagcaaaggttgttattattttaatttttacacatgggcaaactaagcctcaagtaacctgtccaagaatacgtagctatgaagtgtggagctgggatttggagctggggtttgaatccaggcaatctaactccagagcctaccttctatgctactttttggctacgagcaaacaatctgtcaagaaacaaagtagctactaatctaaacagatgtgaaatttgaagaccagttgatctttggggaatgttgggttcttcagacaatggtagctcagtaatgtaaagggacaaatgacagccacatgccaacttggttaactccttccctaggtcctgatgaccaaataaccagcttatttctcaactattggttggctttcatttcaggtctggtcagctgcttatgaccttgttccccactgagcagactcaccatctgggccctggcgggcagcagcatgcagtgccgtgtccccatggcggtcctggtgggcagggtcagccccgagccgaagcagcaggcacagggcaggggcatcgtggcgggcacaggcccggtgcagtggtgggggctgcccagcatctacatcgaggcctgggtgtcgctggaggagggcctgggcccggaccagccgtcctgcagacaagtaacgacgaaagcgacgttctcggcgttggcggcgggaagtggaggccatggaactcttgggctggggaaggaaaaaaggcagcagtcaggacttcagccttggctggtccttctccctccatctctgacatcccctgttgtttctccctttggttccgtctttttttaatatcttcagcaagagatgaggcctaacctaaccctgatcctttatcagatgatagatttgaaaaaaaattttttttgaggggggtgataggatcagaggtttaatttttttaatgtaaaattcgagaaaagggtaaataattggtttaaggctcaggagcccaggtaaatttttaatttttaacaaagaactttaaaaaaacccaacagggccggatggggaaaatttttatcagcagaaatctgagttttaaaaagtcacagataatctccaataatgatctagaaattgaatatcatgtacccggcagacagatgtggaggcttcttcctctggaacctggggggaggggttactcatcagacctgcccccgcccccccaagtacccccagagccgtaggcccaaggcctgtgtttaagaagctcggagacgggaggcgggaagggcggagacactccaggctggaggaaatggcgcaagcagagacgcaggtggaggacggaagtgaactgtgaggggcgttaccggatgtcgttccgccccgaccgggtagttcttggccagatctcccaggggaaactagggaacttaaattaaaggggccgtctgaaaccagaagactggactggaggcgaggaaaaggaggcgaggggaggggagggagaaaagagagttatttggaggttttttcccgcctcctctaacttggcagagagaggagatggttcagtgatggacgaaaagatgagaagacagagaaaatagaggagataaagacaggataaaaatcacattaaacatggaaaacaaaaacaaaaaccacagtgggacaacaacagggacagatcaaaaaaaaagaaaaaatacagacaaaagacggaagaagactatcgtaggatggggcaagtgagatgcaaaaatttggacttgagaaatatgtagaaaaagatggagatgttaacaacgggaggcaggggagggggcgggatggtggagagagagagaaaggtagagagttagtttagaattaagcccagaatgctcttttcccaacacaggttgcatgatgacatccttaccttttcaccgcattcacaaccctttatgcttcctctgttaccaccaatcaagttctccttctctcacctcagtactcccccgtctccgcccctgcctcatccctagacctttccgactgggatggctaacctgttgtaagcccgcagctttgggcctggtctctgctgctcccaggcggcccctttgggtactgcctgagcaagaagtgctggagaggaggaccagtcatcaataggaggatgagattgggagagacactcggtgcaggaggctgagtgagcaggggagcactaagacccaggggtagtggaggactgcagcaacgagctggaggaggagaagtaagcggtggggggtgggagccatctggtactttgacagcattcaaaacagcatcggccataacaacagaaatggccagtcagtcccaaggtatccagcagcttctgcaagctgagaagcgggcagctgagaaggtggcagatgccagaaagagtgagtctcctctttcctcccttaggagtttggaaagaaaattgggggtgggggacagcaaacattttgggaaaacccaaggctggcgggaagacagacagctagggtctggaggctggttaggagggaagaaatggatggatattagaatctggcacctggttggctgagagaaggctgtataactttctggaagggactgactcctgctattacattgtgtgtgtgtgggtccatccccactcactgtcctttcttctgcctccagggaaggcccggcgactgaagcaggcaaaggaggaggcacagatggaggtggagcaataccgcagagagcgagagcacgaattccagagcaagcagcaggcggtgagttgaggcagagtcgggttgagaccccactgcaagttggtgggtgcatctagtgaggtgtgtaagggtgactcaacaagaaaatatggtggcagagggctgaggctgaggggaccctggcagggaccacaacattggtgaaactttgtgatgatatgtaggagagtctgggagttttgaaggccacatagagcttgtgggcggaatgccacagtctgtgtaaagtataacatctatgtggagtatgattaacatttgtggtggagggtagagttttatggtcatggatggtgaggtggtggggatattacggtctgttttaggatgaagttgcatgttaggtctaaggggaaaggggactgtgttgatctctttggtgttgggatatttctgtgggatgggggtggtttctgagagggcctttcttctaggctttgtttcaggatctttcccctcatatgcctggacccttgtctgtttctgcttttccctttctctcttccacccctctccctaccccccaggccatgggctcccaggggaacctgtctgctgaggtggagcaggc

SEQ ID NO: 11273 - DNA, 6000 bp, Homo sapiens
attttaagtttttctaagcagttttccaggggttgttgtgttatagggtatacatataacacagcaactcctggagatataccttagaaaaactcacaaatatgtacagagggacagtttatagcaatggtgctgtagtaagattttggctataacctgcctgtccatcaataagaaaatgattaagtaaattgtggtttattgagacaatggaatactatgtagcaatgaaaaagaatggattagagctgcatgtatcaatatggatgaatttcacaaacagatgttcaagggaaagagcaagttgcacaatacatgttcatacctagttttcagtttacagatcttgcacatttttgtcagatttatccctaagtatattttaagtgttattgaaaatggtattttaggctgggcctggtggctcatgcctgtaatcccagcatggctttgggaggctgagataggaggattgcttgagcctaggagttcaagatcagcctaggcaacatagtgagacctccactttacaaaagaaataaaaatagccaagcatagtggatcatgcctgtaatcctatcatttagggaagcaaaggtggggtatagcttaagcccaggagtttgagacctgcctgggcaatatagcgagaccgtgttctctacaaaagaggggaaaaaagaaaaaataaataaaaatttacaaaattagctgggcatggtggtgcatgcctgaagtcacaaatactcaggaggctgaggtgggaggatcacttgagcccaggaggttgaggctgcagtggactatgatcattccactgcagtccggcctggacaacacagtaagaccctatatcaaaaaaaaaaaaaaaaaaaagaagaaaacagtatttaaaaaattccaatttctaattgttccttactagtatatagaaatacagtagactgttgtatattaatcttatatcctgtaactttgctaaaatcacttattctagtagctattaaaaatagattccatcagattttctctatatttgaccatgtcatctgtgaataaacacagttttatttcttccttttcaatctgaatgcctttttttccacctaatgctctggttagaaccccccatacaaagctgaatagaagcagtgagaacagacatctttgtctagttcccaatcttagggagaaaacatacagtctttcacatgaagtatactgttagctatgggttgttttttggagatgccctttatgagatggatgtaattcccttctattcttagtttgttcagtgtttttattatgaaaaggtgttggcttctcccaaatgtgttttttgcattgactgggataatcatgttttttcatatggtctgttagtatggtaaattatattgcttgattttcagatgttaaatcactcttgcattcttgtgataaatctcatgtgctcatgatgtacttgtccttttaaatataaagagacatccaatttgctaaagttttgttgagaattattgcatctatgttcatataggtatattggtgtatagttttcttgccttgtaaggtctttacctggttttgatgtcagagtaatgctggaccattcagtgatttgggacgtattcactcatcttcaacttccttgaacagtttgtgcagaatcaatattatttctaccttaaatgtctgactctggggctttctttcttttctttttcttttttcttttttttgaggcagggtctcactgtgtcacccaggctggagtgcagtggcccagtcacggctcactgcagcttcgaccttccaggctcaagtaatcctcccacctcagcctcccaagtagctaggataacaggcgtgcaccatgatgcctggccaaatgttttgcattttttatagagatgaggtttcaccatgttgcccaggctggtctcaaactccttgactcaggcgatcctcctgcctcagcctcctaaagtgttaggactacaggtgtgagccactgcacgtggccaaccctggggttttctttgtggaaacatgtgttagtctatttgcattgctataaaggaatacctgagactggataatttataaagaaaggagatttatttggctcatggttctgtaggctgtacatgaagcatagtgccagcatctgcttctgttgagggcctcaggaagcttccagtcatggcagaagatgaagcggtccctgaatcacatggtgagagaaggaacaagagagaaggaggaggaagttccagactctttcaaacaaccagatattgtgtgaactcataactgagaattcactcattactggggaggatggcaccaagacattcatgaaggatccatgatccaaacccctcccaccaggccccacctccaacattagggactacatttcaacacgagatttggagaggacaaacatccaaactatatcagaaggtttttaattgcatattcaatttctttaatagatgtaggcctattttggttatctatttcttcttgagtgttgttagattgtatttttcagtaatttgtccattttatccatattgtgacatttctatctggtgtaataagaatagtgttcatatcaaagttcaatttctccatatcttttccaggtaactctccctttggtgctttgaagcaatatggcgtcttgactggctgccatggcccccacctttcctcctaggctcagcccttgacataactactcctcactaccctctcatcttccccccaccttgtatccctctagcattcctcacctgaagaacttaggctttcttaagtctctttagttagcaggaaactatctaatttaaaaaccctctccaagttgtttattacttaagggattagtccttccaagagtatttatgtttcagaagagaatgtctagataggattgtgcataacaaaaataagtcaatttttaatggtgttattgtaggctctgtgacaagtaggggagggaagcactttgggaaatggactctcctctctttcaaatattattcaagtacaagtttgcgcctgttactcttctgctttaagactgtctacagggagttctccttgtcctttggtcaaagtaaaatgttcaacacagccttgcaagatcctgccgcttctcggagccatcagacccactcttgatgctctgctctggtagagctctgccctggccctcaaactgttggacttctctgagaaagcgataggtgtgctcagattttaaggatgaggtggagaagttcagagagagggcatttgctatggaactgaggctaccaaagtgacgaagagaatgcatccctgttctctaggaactcaaggtttagtggccttatagagtggaatagcacgccaacagtggggccagtgactgccaggctgactagagaaggcaactctcactgtggatatagtcggaaactggcttttctgcttcagcgctgtggaccagcaattgacctttcttccctaaagttcattcacttgataccttccagaaggaaggtcaccccctgcctgggttggctatgggccaaacccctgcccactccaaagtgtggcttggaatgccatggtctgcttattaaaaatcagatttcgggaggccaaggcggtcggatcacgacgtcaggaaatcgaaatcatcctggctaacacggtgaaaccccgtctctactaaaaatacaaaatattagccggacgtggtggcgggcacctccccgctacttgggaggctgaggcaggagaatggtttgaacccgggaggtggagcttgcagtgagccgagattgcaccactgcactccagcctgggcgacagagcgagactccgtctcaaaaaaaaaaaaaaaaaaaaaaaaaaaaaaaaaaaaaaaaatcagattcctgttccccaggcatcctgaatcatcagggatggagtctcaaaataaatgtacatttatttattttttatttttgtatagacgaggtgtcgctatacgttgcccaggctggtctcaaactccttggctccagcaatcctcctgcctcggcctcccaaagcactgggattataggcctgagccaccacgccggcctaattgtacttttatttttttgagacggagtttcactcttgttcctcaggctggagtgcaatggcacgatcttggctcaccgcaacctccgtctccagggttcaagcgattcttctgcctcagcctcccgagtagctgggattacaggcatgtgccaccacgcccggctaattttgtatttttagtggagacggggtttctccatgttggtcaggctagtcttgaactcccgacctcaggtgatccgcccgcctcggcctcccaaagtgctgggattacaggcgtgagcaagtgcgcccggccttaaatgtaccttttaaaccaagttctgcagtagattcttaggcattaaagtttgagagccatgtttctgaggggcgtcatgctgaaggctatatattcttgcggcccccggaccgagcctagcccttgcattcccaccctgggctctctctcagcgacaacttttcccaggcgtcggggcttccctcgagcgtggcgaccccgcagacatggtgccaagagccagggtgggcggcggggcgggtgggagagcggcggcgctgggggcgagggcaccatgcgaccgcgggcgccgggaccacagcgcgccgggaaggaggccgaggcggcaggaaaaaagccgaagatacttggggggaccgaggggccaagcgacggagggaggaacagaatacagcctcgcgctggtcccgagcactgggacgcgcggggagagcaggaggccgggcggggaggttcggggcggggcgcgctacccgcagtccccggagctcggctaactcggcgcccagtgcacggccgcaccatggggtcccgccacttcgaggggatttatgaccacgtggggcacttcggcaggtatgggggaggggccccgcggcgccacgcgggaggcggcgccgaggggtctgtttctttccgttgcggcggggttctcgcgcggcgctcgcgatccgaaaacatctccacttcctcctcaccccgcgcagtcgggacacgggcgtccagacgccggcccctagctgggcttctcctctaggcctctggcagcgggacctggcatggtgagcagaggcgctgggctcgctcggagtgcgcctgttgccgggcaggagggacctggtgcgtgctctccgcggcagcagatgctggaggcatctggctggagatctggctcgaggggccagatctcactcgtagggggtgcctgtgcctggccgcccgtttctctaatccgccgccacttccctagacggctgctgcccagttctgccctgcgcctccgtagggcctccctctgtgcctggcaggtgttccccagggacaaccgttagtcagagttggttgccgtttattaaaacctaatacgtgccaggtacactgtacctggcgcttacacatagttcttcatttgatgttcaccgggaccctgcaaaggaggtgttcaaatccttattttagtgattgggaaacaagctggcggggtcaaggactcatagccaacgcatggtggaaccacgtttaacctccgtacaccctcttttcatttgtcaaattgatttaaaaaatttaaattattcattcgttcgttcactcatggacagagctcctctatctgactcagagtgttttgagaggggaggtagccgggtgaggggccatgcagcgttatggccggagatttggagctgcgtctcgatcctggcctgctacttacctctgatatgattctggagatactttgtgtgtcagtttcctatccagaaaacgggaatcaggcttagcaaagagatgatgtggtgctgttcttcaaggtggaaggttgcatgcgttttggtttt

SEQ ID NO: 11274 - DNA, 6000 bp, Homo sapiens
agctgagcacaaggtttcgcatttcagtaagctttctgctccagattttccctgagttattcagattatttaaacttggaaagtagtcattttctgtgcagtgccctccttattgtctggcaaacaagggacatgtaatgaaagcagaccagagttcccaacccaataactactgcttgttgtcatgtatgatcaagcaactttttctgacttcatggtatcaaaggcaggttaatctcaaggaaaggtttaatcattgaacagctttttgttaatgccctccatccaagggtcatggcaatcggactgagagagatttttaagttaaaaatactttatttggaaaaatagctaatcaaaggaagaacagtgctcattccacgtagctgggcagtacaaagacagacatgggccaaactaatagatatgacattggtgtgatttaaagggagatgataatttgaacagccccatcagttgcccaaatgtacctttgagcaaattagaaaaagctgccctttcttcaggttagtattgtcatattctggaagatttgctttataaataagcaaacttctgctgtctgcaaatgagaatgacccacttagagttgtactgtgtccaaattgcacaatggtatatggcagccctaagtatgaagaagttttcttcaaatttatatttattatatatacaatctgatagaagcattaagcaaacaacttttaagacagtactttttacacatgatttaccacctcaacctattagttattttcagttgttccaagtttccttccagtctctaccaataggcgcatatattttaagaaagtattgtaatagtaatgagtatgcaactttctgtatgccactttgattctcccacttaaaataattggaaaaacattttcttgcattgctacattgtctttcttttaatgatttatcacatgttatagcaagtgaacataccataataaatttaaccacacttactttgtaatttgaggaactttaatcaacatgttatgagtgataatattctacacctaaggaaagaagtcataatgaaaactttcagatagagaagttatttagatagtataaacagtgaaataataaacatccttccaaacaatcataccaagatgaatattttattgcaattaggctaaacaagaagtgaatttgtatttggaatttttttgtttgcataaagaccatattttcccatttgtgtttacactgtaatgaaccattgtagaaggtgcattccacatcaatgtgcactgcagggtgcactgcagggaaacaatacggtgtagtgaaaagcatttgggttttggaatcaaatggacttgaactgctgtgctctgaaatgttatgttctgcataaaaagacttgtgcaagagtgctcataacagttttatgtgtaatagcaaagaattggaaacagcccagatgtccatcaataggaaaatggataaactgtggtgtattcacccatataacactattcagcaataaacaaaatgaactactaatatacataaaaacatggatggatatcaaaactatgctcagtgaaagactccttacacaaggctgcattctctgtggttccattatatgaattaaggtttagaacaagcaaaggtaatctatgtggaaaaatatcagaaaattggttgcttctggagcttttttgtcttgaaaaaaagaacctagtattgaactctatttaataatatgcattctgaagtatttcaacttactttgatatgtataaaaactaatacggatcgactgatggatggaagaattgttatatatagatgtgaatgagcaagcatggtaaaatgtcgagtgtaggttttcctgtgggattcaaatttttataattcaacattggaaaatgttttgatcttagaaatgtttcataaacttctcggtttcagtttctgcaaaatggaagtaacggtatttacttcacaaggtttttgtgaagcttttaaaaaattgccatgaaaataggcatgctctatggtagatgtttacgagccctgtgaagctgcttgtctttcatcccctcttccccgctgtgccagtttataagtcaggataggtgtttttggatttggtagcattgcctatgagcagtggtccaaagtggtatgtagcaaaattattggggttatgaagaatgaactgtctgctgtctgctgattatgaattccttgagtggaggaacagattttaataatggaagtggctcaaactccagggaagatggatagcctgtggttatacttggtctaaaggaattggcagaaacagagaggaaggacaaaatgtcataggcaatcatcatatggattttaatatttaaaaactaaatagttatttagtcactaaaagctctatttgtgagcactcatttatctaacaaatatttattaagtgtctactgcatgcctggcattgtgttaggagctggacgaatgtgcaagatagaaataggtgcctgccctcttggagcatacattctagtgttgctaaagtttattggatttacagggatcagtctgtcagccagcaaatacttactgagtatttgctgagtgccagacacgcagaatactataataaactaaacaaacatagtccatactctcatagagtttgcaatctagcagaaaaggcagatttaattgaatcaccgcatttaactgtattaaatacattatggtgtgcaaaaggctgggaaggagaagtacagggttcgtaacagaattgaggcagagtttcccccctctagtctgggtgaaaaaaattttctcccctaaacttttctctgagttaagagattgaggtaagtacaaacagagcttgagatagccagtggccccggtcaggtcaccagcagaataaagaacagaattaggagcaccaggaggtgatgttgtcagttgcattgctgagcattctttttgactcctggttggcttactatgcctgtggatctcctgtatggtttggctacacaaaacagagtgagaactgttgaactgcttttaaccatagtaaagtattctggaattagttttgtcttctgtctagtcaagcactatagcaaacactctaacactcccatggggccaagaagctgctagaaacacaggttgtgggatcacgaaacaaagcaatgatacaactaacccattgcaagaacattttccccctaatgaggtcattggttctgagcagaaagaagttagaagccaagagaatatagagaacttatgggaaacatatgtgtctcacagatagaaactgggactcctatataattataatgcaccctgggaacaaataaaatgagttgtttcaaaccatggttgcgttacacattctttagtggggacactgatgtgtgggattctgaacttctcaccctcttaatcataaggggcctggattatgcctggaggacttccattttctagcactatcagcagacatacaacgggtacataataaagactagttgaattattataggtttgtttccatttgctacctgtttccctgaaagataagaaaaatatagaattatttaatgacaagcaaaggaaatgtacaaataagtgaatttagaactttgaagtgattcagttaaaatgttgaaaagaagtaacaaaaatttagcttctgcttatacaagcacaaatttgtttttctgtccagagaaatgcctatgactaaaagccatatttcacggcatcttcttaaagtcgagtaggtctgaaaccataggaagccaagaaaattagagaaggacaaggctgggaagttagaatataggagagttacagctttagacctcctggattcataatctcagctctaccactgattagctgtgagactgtagccaagttacccaacctccatttcctcttctataatgttggtacctgcctcaaagtcatcatctgcgttattgcgcttagcacaatttctggcacataagtgctccacacatgttagtttttattccaaatgatttttaagatgatctcaatttcctctataaggcttttttttttaataaacatgatttgttgaatgaataactgaaggtaaaatgtcataaccctgtaagacttttttataaatatgttcacaaatcagaaaaagatcctctctcatgacctgattttgtttgagattacatgtccaccacacgcacacaatgggccacttagtctggcctctctgagtgaggagtatcctcctcctacctacgcaaacatgaaacctaacagaggattcagtgttaatttgtctcttaaagacaattctgcattaagaaatggattactttgctataacctcagcatataaaaagtctaaagaatctgtgcattctgagtttgtgtatttttggtctcaggctgtgatttatctgaaaggccttggagagaaagatataggcctttacctagaccaaaatcaggttgaaacaataaaggtattttatgctttgtgtaagctggtaaataccatgacttttggaataacagtcttgctgaaaaattgacacacttttccttctggtatgtctttgcataaattgttcctctttctgcaagattaactgataccatctgtgagtattctatccccactctcagcttgcatttaaatctgcatgtttcctttctctgcctcttttcaaaggtgctagaatacaagagctacccttagctaatggccaaacactccgtctgagttccctttcttttaaccccttgcttccaactctgcatctaaaggcaaaaacaatcctctgactcacggccctccccctgcctgtgataggctgcttggaatagcaacagcctgtgtcaccgaaaagggcaaagccttcggaaatagaaacaaagttggtcacaaatcacattagctttgcccgaagtttttccccacactcttctttagcatgctattatggggaaagtgaccactcctgggagcgggggtggtcggggcggtttggtggcggggaagcggctgtaacttctacgtgaccatggtacctgttgaaaacaccgagggccccagtctgctgaaccagaaggggacagccgtggagacggagggcagcggcagccggcatcctccctgggcgagaggtaaagtgagcctgcagtgctcgggtgaccgcagagaagcaagctgtactcatctcccgagtgtactgtctcttgagtcccgtgtgtgtgtgtgtgtgtgtgtgtgtgtgtgtgtgtgtgtgtgtgtatgcgcgcgcgcgcatgtgggcgcgctggatgagtggagagaaggggacagggtctggtgggacgtgggacagctcggagctgtaatgttgtgaagatcgaagtcttggtggaaccttatgtgccaagaaaatacaggttacacatccaccactggtatgatgggtccccttgattgtgtttacataatacaatgtatggatgtttttcatattggaacggtccactggcaaagatagtctcatttgtaaacacacacaagcacacgcttgcttacactttttcatttattgtcacaaatggacactgtgtaaccagttgacattataaccactgttttaaaaatcagtattttaaacaggcttcataaaattattagttatgtaatcaatgagaacacaaacttcctttttaaattcccagcacgtttgtgatgaatttgagcgttattcagagcctgaaacgcttgctttgctgggttctgccttctttaaaactggccttgcaaactgaggtttgtttgctatgatgaccttctgaaggtgaaatttggaaaagttttaattcatttaatgatctttgataaatcagaggctggtcttcacttccacatttacaattcccacaaatacattgtacgctttttgctgcctcttcctgctcatttagttt

SEQ ID NO: 11275 - DNA, 6000 bp, Homo sapiens
ctcacccaagattaaccctcctctctggatttgattcagtgatatccaaagacttcttgattcagtgatagaaacatgagcctctagcctcaacagtgacaattctgaagggccatcccagcttctgcacttcctataagattgtctgaagtctctgttgctaataatgcaacataatttatctctctgtagaatcctgcttcctcactcctgttattattcccaaagagcactctgcaataaatatcaggtggcaaatcttgaatctcagtctgtttccctgtgttccgtgaaagggctgtatatgcaaagcaactgccaaatgttgaaggagccaagaacccaaaaaggcagaaaaatcaagttaattggtcttgggtgatttattaggggaacttacagacagaagcgtggtcttgggtggccgcaagacaggtagatctccataccactaaacccagggctaactctctaaacccagggcttatatcttagggaaaatatacgtactctggaaggaatgtttaggtggctacaggtgtcacagcctgtgatttctgtagcagcatcaaggattgttttggaggaaacttacggtgaataggtgttcctacttaaagagtaatacatcaactagacattttgggagcattcctggacttggggttagtcagaaatgctaatggcagattagcatttcaaataaagtcactctgtccccacatcctggatcagacctatcgatagcagcaaggatacatgctgttgtgtggaatgacttgtgctacagaagtgagggaaatttaacaataatttacaacttcaacaattaggatggtcatgtgtcccagtttgcccaggacagtcatcccaaaaaagttactattagtaccccattccactatcaaaaatgtcctggttaacacaaattatatgatcctgctactgataactttgagtcttaatctagttctcattaagataaactacttaggtacgaatcacagctacttcttactagccctgtgacagtggaaagtttacttacacattcatctgtgcctcagtgtcccctatctcatgttgtcattgtaaagttaagtatatcaaattttaattttgcagtgatcaacaggatctcagaagaagtatgttcttactttgataacttacctgcttccttattccatttgggctgccataacaaaaataccaaaaatgggttgacttataaacagtaaacatttacagacagtccccgacttatgatggtttgacctatgacattccaactttacaatggtgcaaaagtgatacacattaataataaaccatacttcaaattttgaattttgattcaaaaattctttataactttattctgacataggctttgtgttacatgactttgcccaattgtagcctaagtgttatgactatgtttacagtagtctaggataagctataaggctcaataggttaggtgtattaaatgcatttttgacttacaatatttttcaacttactgatgggtttgttgggaaataaccccattgtaagttgaggatcatctgtattcctcacagttttggaggccagaagtccaagatcaaggctcagacaaatttagtgtctgatgatagccggcttcctcatagacagtacctctacactcacatagtggataggcaaggcatttcctttgaccttgttttacaagagcactaatcccatcattagaactccatccccatgatgtaatcacctctcaaaggccccacttcttagtaccatcactttgagggttaggtttcaacacatgaatttgagagggacaaacatattcagaccatagcatctgcttaagtaaaaagaaattggtgagccaatgggttagaaccctttcttttccatcatggcttgtggaggaggtaagctaatagggcaatacgctctctactgttgaggcagcagcttttgggataaaaggaccactgagaagtggattttattttgacaggcagattgggaaagatgccatagaaggtcaggtcttggtaggaagttgctgtggttggcattgcatacaactaatgaagtcagcatcttgataccaatcctattcctccagttctttcctggatatgaaaagccgggacctagaccctgctgagcagaggtctaaaagacaccattatcatctcttctgccatatctatccagagggaaggcatgtccagatagcaggaatcttcttcaggagtatagaaacaagtgcagaccatctaaatgagaacaagcaaagccaaatttatttggagcttacaatagcaagggagtcagccatcatcacttgcatttgtcagagactcaacggcaggcagaggagtgagaaagctttagagtggaaaaaagggaaagcttcaggtatgccaattcaaggctgttggcatggagaagctgcaggtgggctaactaaaagcagggcatcctatgtaattatttaggggtgggtagatatttggctctctctagctggccttgagttggaagccctgacaaaacttacagaagctgtaagttattaatcacgtcctggccatttggggtagattgctacaagggttattgcttggcttcctggactggttgctaaatatagtaatctgatttcttggactggttactggacatagtaggttgccttcctggactggttgttgaaggttgtaggttagtgttctatttgtatatattctctggccattgtctatttgaattcagtctcccaggacggaggagtagggaggaaataagaaagggatagggtggccaggtgattaaggcaaataaactcctatcagtactccaatagtcctgttgtcagaggcgtttgaaccagagtgactccaacttgaacaggtgctgggtaaaacgaggctgagacctactgagctgcattcccaggaggttaggcattcttagtcacagaagattggaggtccacgcaagatacaggtcacaaagaccctgctgataaacaggatgtcgtaaagaagacaggccaaacccaccaaaaccaagatgaagacaaaagtgacctctggtcatcctcacttctcattatacgtgaattataatgcattagcatgctaaaagacactcccaccagcaccatgacagtttacaaatgccatggcaacatccagaagtcatacagtctaaaagagggtagaaccctaagttccaaaaattgcctgcccccttccttgaaaactcatgaataatccaccccttgtttaacatataattaagaaataactggctgggcgcggtggctcacgcctgtaatcccagcactttgggaggccgagccaggaggatcaccaggtcagtagattgagaccatcctggctaacacggtgaaaccctgtctctactaaaaatacaataaatttccagctactcgggaggctgaggcaggagaatggcgtgaacccgggaggcggagcttgcagtgagccgagatggcgccactgcactccagcctgggcgacagagcaagactccgtgtcaaaacaaacaaacaacacacaaaaaaactatatactcagtccagcagcccaagccactgctctgcctatggagtagccattcttttgtttctttacttctttaataaacttgctttcacttcactatatggactcatgattggcaacgctttctggtaacactgcccaggtttcctttgtcaagcgtgcctttctcagccctacatacccacagttaaataatcccttctctcctgtttatttttcaactattgaaaatagcaaacatcttaaaacaatttgtcttcatgtttttcctcttaaaaaattgcaaacgtcttctgggcaggatttatgtattgtttatcttatttattctcttcctattgcatctggaacacagtctgttttcaataccgtttgttgaactccagggtagattacagggctgtgtattataatctacagtactttaactgaagttactcgtttattggtgactacattgctgtcaaaaatacactcatgtggctgggtgtggtggctcatgcctgtaatcccaacactttgggaggctgaggcgggcggatcaggaggtcaagagatcaagaccatcctggccaacacggtgaaacctggtctctactaaaaatacaaaaattagctgggcgtggtggcgcatgcctgtagtcccagctacttgggaggctgaggcaggagaatcgcttgaacctgggaggcggaggttgcagtgagccgagatcgcatcactgcactccagcctggtgacagcgccagactccgtctcaaaaaaaaccccccaaaaacagaaaaacaaaaacaaaaaaccgcagatgttatagaatataaaattataaatgacaaaaagcttgaaataaaacgagcagagcatataaaagttaatgaagctgaagaaaacgtgagcttctccgtacacttaacaaggctgcgatttttaccaacttttttgcactgttgtagccccaataatgtatctaaaatggtacttgacacagtttatatccttaagaatgtatgcatgcacgcacgcgtgaagaatgaatgaatgaggggtcgtccctttgcacacacggaggtctacgggccgcagagtacctacagcatggccaccgcaagcgcaactaaaatccagggcttgtcgcaggcacaggctcctccttcggtgggtgggacggcggcgcgcactttctctacgccccactgctaggatgtgcggccaccactcctcctccgccgccgccgccgccgccgccgccgccgccgcgtcgagtgcaagggcttctgggagccgagcctcggggtctcggagaaggggcgcaggtggccgccatcttggattgcgaactgggtcgctacgcttcacgccaggggcggagtggcggcccttctgttacccgccacacacgtcgccgctggggactgggaaatcagggcatcggagagtgccacattaatgggtaagttggagtgaacacgggctaggttgggggagcctcggttttggtccctttgggaactactagttcctggggccacggtttttatttaccccttactttgcgaaggtctctggaacctggcggtgccgggtgtttctcgtgttttccccagggcgacagcggtcgcgggggcgtggcagccggacctttcccttgcggacgcgaaggcgtggtgagttcagattctttcagcaggtcctctggagtgatgggcagctggtctcatcttcgccgccccgcctcaccgtttctcggtagttcttttcagttaatggaattgccaaacgttgccactcatacctggtacccatcagctgtgtccagcagcttatggaaattccacagtgtccaaagaagagacaggttccatcccgagggcctcctagcctcgccctctccatccgccagcctccctcctccacctgcgtgcaggtgcctctagtgctcattcccgacgacaaggcaagcctgggttccacgcttctaatagtcgggcagctccgttctaagatgaaaacttaggttttcatcgataatacataggagatggaagtatttgaaagctgtgaaatgacagtgatatgtctaaagaatatgacattggcggcgggcgcggtggctcacgcctgtaatcccagcactttgggaggcggaggcgggcggatcacgaggtcaggagatcgagaccatcctggctaacacggtgaaacctcgtctctaccaaaaatacaaaaaatacaaaataaaatacaaaataataaatacaaaaaaaataccaaaaatacaaaaaaaggaaaaattagcctggcatggtggtgggcgcctgtagtcccagcgactcgggaggctgaagcaggagaacggtgtgaacccgggcggcggagcttgcagtgagccgagagcgc

SEQ ID NO: 11276 - DNA, 6000 bp, Homo sapiens
tgataaattcagcaaagttgtaggatactaaatcaacgtacaaaaatcagtagcatttctatatgccaacaatgaacaatctaaaaaagatatcaagaaggcaatcccatctataatagctacgataaacaaatacctaggaatacacttaaccaaaaaagtgaaggatctctacaatgaaaactataaaatactaatgaaataaaatgaaaaaaaacacacaaaaaggaaagatattgcatgttcatgaattagaaaaataatattgttaaattgttcatattacccaaaatgatctacagatttaatgcactctctattaaaataccaatgacattcttcacagaaaaataaatcctaaaattcatatagaattacaaaagactccaaatagccaaagttatcctaagtaaaaagaacaaagcaaaaagaacacatggaagcatcacattacctgacttcaaaagatactaaaaagctatagtaacaaaaagtgcatagtactggcataaaaacagacacatagaccaatagaactgaatagagtacacagaaaaagtttttatatttacagacaacttattttcaacaaaggtgccaagaatatacactgtggaaaggacggtcacttcaacaaatggtgttggaaaaactggataaccacatgcagaataatgaaactagacccctatctctcactgtgtgtgaaaatccaattaaaatgaatcatagacttatatataagacctgaaactatgaaactactaccagaaaacattggtgaaatacttcaggacattggtttgatacagattttttagtaagacctcaaatgcacaggcaaccaaagcaaaaatggacaaataggactatatcaagttgaaaacctcttcacaacaacaacaacaacaaaaaaaacaaacaaaaaaatactaaacaaagcggagagaaaacctacagaatggaagaaaatatttggaagctatccatccagcaagggaagacgtaagagattcaaatgattgaatagcaaaaaacaaacaaacaaacaaacaaacaaaaaacaaattatctgattgaaaattagcaaagatctgaatagacatttctcaaagaagagataagaatggacaacaggcatatgaaaaatactcaacaccactaattattagggaaatacaaaccaaaaccacaatgagatatcacctcatcccagttaaaatggctattatcaaaaagacagtaagaatgttgataaaggggcaatgcttatacactgttgttgggaatgtagatcagccactatggaaaacagtatggagattcctcaaaaaacttaaaatagaactaccatatgatgcaataatcccattgcagtgtatatatccaaaagaaagaaaatcagtatatcaaagagttatctgtgcttccatgtttattacagcactagttacaatagacaagatttggaatcaacctgtgttcatcaatggatgaatggataaagaaaatgtggtatgtatacataatgaaatattattcagccataaaaaaggaaggaaatcttatcatttgccacaacatggatggagctggaggatattaaacgaaataagccatgcagagaaagagaaatatcactttttaactcatatgtgggagccaaaaaaaatcaatctcatgaaagtagtgaatagaatggtggttacaagaggctgggaagtgtagtcaggaacatgggatgaagagggaatggttaatgggtagaaaaacacagttaggtggaatgaataaattctagcctttgataccacaacaggtttactatagttaacaataattcatagcatttttcaaaatagctagaaaagaatatttagaatgttcccaacaaaaagaaatgaccaatgaggtgataaatatcataattacccagattcaatcattactcatgtaatgtttgcatccaaatatcgtatgtacctgataaatatgcacaactattatgtatccatacatgattaattaaaaaatagtcacttgactttttctaaaatttctggtacagatatctgtatggcaacatgtattcttttctgcctattacaagattaatatgcaaccaaaaaaacctgcctctaaattgtggggctttcatgtttttgataaggtttaaaggaatcagaattaatggaatatatgctctacgaataaatatgtcaccatctcatattctttatctagagagtggaagaaataaatgggtatgcacaaatatttcagcacttgtgatctataaagggctaagatgaagatatctaatacatggttcctgctctcaacaattttatgttcttagaatacaaaaggaaaatgatttattatattttagaaaaatacttacacatcctaccactttaaacgtgttttattagatgaaacatatagcaataatttgtaacaaaacaactgtttgagaacatttactagagaaatagtttgcctagatgaaacagtcatcggaattttagctgtaaactggaaataaaatcctaagcacccccacatactgagcagacccccttttggccaagggatgcccgcctcaaaaaaacccttaaaacctgaattcctggccataaaaggaagggaagtcggacatacttctgactttttggagtttagacacaactgacaggcattcatgttaaaatagagattataaaactgacaaaacagactctttgtgtcaataagacaccaaactataaacaagatctaaggtaatgcaaggcaagaattaggccattcatcttgccacagagcatccttttgttaatataaaacatttatgtccagcctgggcaacatggcaagaccttgactctactaaaagtacaaaaaaatagccaggcataatggtacatgtctgttgtcccaactactcagagggctgatgtgggaggatcacttgagtcgtggaggttgcagtgggctgagatcgcgccactgcactccagcctgggtgagagagcaagaccctttctccaaaaataaataaataaataaataaataaatataatttttttatgtgcactccaagttttagacagagccttattcctttaaccaagtgcaaattaaagaatctctgaattcatctataagctgtaagccctcagcttcaagatatcccagctttttgagctgaaccaatgtatgccttccatgtattgatttacgtttttgactgtacttcttggctccctaaaatgtataaaaccaaactgtaatctgaccaccttgggaccactttcccaaggcttcttgggtttgtgttttccctgggcctcagttgctcatattggttcagagtaaacttctgtaaaacattttacagagtttggtttttctgttagcaaagcaaaagagataggccttgacattaagtttgattttagtggtaaagtattagaaatgattcagaggtttctggcttgtacagttgggtgcatggtggtatcagtcacaaataaagtgaaaattggaagaaaagcagttgtgaaggaagactacagtttttgttaaacaagcgcacttgagacaccgaagaagaatcatgtagccgccacctagcgtaggaggccttctgagccttctctgttggatctggtgtggattgggtagaaatgtgctgggctgcagtttaattgggaggggagagagaagggcagggaatatcaagtcggattctcctgctctgtccccaggagaggcaggtaagctgctttcattgctggtcagcactagtaagtcaggaaggaatctctttgggtgaaggggaatttcagagacttcctttaaatactctacttagaaccctcaaggtatttgccattcttggggaaccctgagccagggcaaactgaaaccaaagcccttctgattcctaccgctcctccagttcctgcccttccccatcactaactcccaacaaatgtacacagattgtatttgtgtagatgtggcctcaggaaatcaaaaggtcctagaatgcaggtaatttaaagtcttactaaataatcttctgtccagtttttccacatgggttctataatctattcaaggagatcggggggaaaagcattcttttatttatttttgtacctcattagtaagtcctaaccatactcttccttaggtcccttttccaactcagtctcgttctcacatttttagaaaggacaacgggatctttaaattctctcggtttgtgttgggaaaggacccaaattagtgtgcttcctcattgacagtcagagtagccttcaagcagtatatccagggaaggcatttacacctcctccccgccctctttttcagtttggcctactctagcctgcatttcgctctccctgtaactatgagagaaaataacacacactattcactctcctttgtctgcaaagtctggcatttcagtggttttctttaaggggggtcctcatttgtgaccagctttgtcattaacggaaatcaatctgaatgccccattgtgcatcttttttctttccttgcagtctgagattgcctttgccaagttttttctcaccgaacctgaaagcccttctctcattttcccgttccctgcctccagccccattgaatccctgccgagctttctcaggcataagggctgtagtgtgaggattgggaggaactcgacctactccgctaacccagtggcctgagccaatcacaaagaggattggagcctcactcgagcgctccttcccttctcctctctctgtgacagcctcttggaaagagggacactggaggggtgtgtttgcaatttaaatcactggatttttgcccaccctctttccaaataagaaggcaggagctgcttgctgaggtgtaaagggtcttctgagctgcagtggcaattagaccagaagatccccgctcctgtctctaaagaggggaaagggcaaggatggtggaggctttctgtgctacctggaagctgaccaacagtcagaactttgatgagtacatgaaggctctaggtaggtaacaataagaccggctgttctcttctcaacgtgcagctttagatatttgcagattccatttttcactcatcaggtcagcaagaggcaaagacagatcacattgccctgatcagatgctaggctatgcattttccactgaatggatttttaatgtggcacttgcttgccttcttacccagggccaataaaaacagaacatttgctattccgtggagaatatgaagcttctctgacttttttggttttcttctgcatccacttattatcacagtagtgttttacatgattaatgggctaatcatgttctaatgaaacttacactttagaacgtggattccagaatcagaaagcagattcttgctttgtgagttattttggaagtcgctgcagactgtactgttccctttgctattttaggcgtgggctttgccactaggcaggtgggaaatgtgaccaaaccaacggtaattatcagtcaagaaggagacaaagtggtcatcaggactctcagcacattcaagaacacggagattagtttccagctgggagaagagtttgatgaaaccactgcagatgatagaaactgtaaggtgagaaactgcttcttcttcagagtggggatggggagaggggaataaagataaagatttccaatgcatgttttttttaagatgttggaaagtgtagaatattttcagtatttcaatccaaggagaaatacaccaaagttagtttaatgtgcatatgttatattttgaacaatgggtacttgctatagcataaatctcagttgtatttgtctcttaccatatactgttcacattttatatcaaacttgtatttcagaaaatatttaataaggtttgtttgaaagagagattgcattttgtttaattccccaggttgcctcagattgactaa

SEQ ID NO: 11277 - DNA, 6000 bp, Homo sapiens
catttccggggcacacagagcccatctttcctgcagaggtggtggtggcaaggaggaaagaatgagcatcaccccaaccatagtgtcccagcttcttttttttttttttgagacagagtctcactctgttgcccaggctggagtgcagtggcgccatctcggctcactgcaagctctgcctcccgggttcacgccattctcctgcctcaacctcgtgagtagctgggactacaggtgcccaccaccatgcccagctagttttttatatttttagtagagacggggtttcactgtgttagccaggatggtctcgatctcctgacctcgtgatctgtccgcctcagcctcccaaagtgctgggattacaggcgtgagccaccacgtctggcctgtcccggcttctatttactccattgtatttgttattgaagcccagctctccttgggtttcaagctaccaagcattggttaggcacatctttctccagagggcaattaatacagccactgaattccgtgggccaagcatagtagatataccagctaagaggccagctcttggtgggtggattctcacactttgggcagagactgaacccagtgatgcttctgcctccttaccactcacatgcggatggtagcacgaaggtggagctgcatcggggcagagccagcagccatattgaagacaatgttgtccacagggtcaaaagttgccaactcctccttggtgggagctgcccctgcgataaagtaccactggcccaagtggacctctgggaactggagagacaatgaagggagcaaaagagggtgggttccagcacaggatgggttcaacctcttcatcagtcaaaacagcaagatttaggggtagaggtgttggctgccttcctctttccaactggggattggatccatgacaaagagtcattaaatgacttttcctctttgcccctccccagtcaacctgggtaaccaccccaccccccaattctgccatgcctctgcattgatggccacagtactgatatttttcttcttgctttcattatcacaacactcacacccccttcctctcttcctttcccaagatggtctccagtcatcctaggccatccacccaagtccctcagagcctccaccataggcttcccccaatctcagtccatacctccttcccatccacgcccagagttgtcagttgactgtgctcagggcactggtagatggagttaaggataataccatagaagtagagcagagctgcccaaatttggtggaacatcttcaggcaggagggagctggtgctctgtgtgccttaactgctctctcccctactggctgctcagtccactctgctttcagctcccttgcgttcgacccttgaccctttcacctgctaatgagtaacttcaaccttgttttccaacccaaacctggattacttagtgtttgggacttcctccccctcttccggatgcaaccactccatagtacaccctggcatgtccagggtttctcaggagttatgaggagagctgagctgtccagggagaagcctgtggtctttgaacctgtatctgagctggttatttgttgcactgtgcagcactgaagggaagtagcttgactgggcctctcattcattcacttagcaaactgttttgaatcccaagtcccagttgtttcccaagaactagctaatccccggggacataaaaaaacgaataagacatagcccctgatcttgaagaagtcgttagagggaaaactagctgtgtagacaaaccattgcaatacaacttggtaaatgctttagaacaggtatgatgcaggtgctggggcacggtggattgctctctttagtttacaattagaaaaatatgtataccctggcagtgttcactgacacattcactcaacatttattactacaaagaggctatgtaatctggctgttagagaggatagatgttggtgtcaggcagaatgtgtccaaaccctaactacaggcagggcaggtagctcatgcctgtaatctcagcactttgagaggccaaggtgggcggatggcttgagcccaggagttcaaaaccagcctgggctacatggcaaaactctgtctctacaaaaaatacaaaaattagccgatgtggtggcacacgcctgtagtcccagctactagggaggctgaggagggaggattgcttgagcctgggatgtcgaggctgcaatgagccctgattgtgccactgcactccagcttgggcgacagagactctgtctccaaacaaacaaaacaccaccaacccctaactgctatgtctgttttttcatctgtaaaattggcaaatcatcaatcttataggattaaatgaaataatgcacataaagcccttagcaaagacttgcacatggtaagtccaaagtatatatttgctataattaatagtaatgtttgcaaagcacttagtttctggtgggtaataagttctcaaataataggcagtaagaattgccaaataggttgtccttggatagcaccaagtgactggagcagttaatgctgtgagagatggatcttcctcgatagattatttatttacttatttatttttaagacagggtctcactctgtcgcccaggcatgactttgacttccccggctcagatgattcccgagtaggaggtataggtgcacgccatcacgcctagctaattttttgtagacacggagtttcaccatgttgccccaggctggtattaaactcctgagctcaagcagtcggcccaccttagcctcctaaagtgttgggattacaggcatgagccaccacacctagcttgataaatttatatcccatggactgccacaaaaaatttgccgagggctgaggcttgcgatttagttaaaaaacaaacaaaatttgggtgaccagtatattagagtttattaatactgttctattttggtgtaatgtttgaatttttttttttttttttttgagatgggagtctcgttctgttgcccaagctggagtgcagtggcgcgatcttggctcactgcaatctccacctcccgggttcaaagcaattctctgcctcagcctcccaagtagctgggattacaggcgcccgccaccacgccaggctaatttttgtatttttagtagagatggggtttcaccattttggccaggctggtcttgaactcctgacctcgtgatccacccgcctcatcctcccaagtgtgagtcactgcgcccggccgaaaatttttgtaataaaaagctaaaatgtggttaggcacagtagctcacacctataatcccagcactttgggaggccaagtctgcaagaccaggctgggcaacatagcaagaccccatctctataaaaataaaattagccaggtgtggtggtgtgcatctgtggtccctactagggaggctgaggtgggaagatcggttgggctcgggaggcagaggctacagtgagttgtgattgcgccactgcactccagcctgggcgacaaagcgagaccctctctcaaaaaaataagctaaaatgttaacagctttttattggggcagtaaagtacaagtgctcgatctggagtcctgtaggcctggatttgtcaattctgacacttatgttcgtctaagtgtactcacttaaaaaatgttaaaagctcgttaaaaggctttttaaaataatacacaaaacccgtagtatatgggctggcacaagtgctcattaaacagctgcttattagaactcttaactaaaatataaccaggacctgggtataaactacgaatcccagaaaggttggacaccccaacagcgatgtgtctttctggaggactcgcagtttcgcggggccgaggcccttggcccagggcaggttaagagaagagggcacggagaggcggtaatgcctccacccccggccttcggaagcacgctggccggcctttaaattccccacggtcagggtcttgtctttctgtccactcggactccatttgctcccaattctcaaactcggaagcgcctcttttcttgacaagtcgtgcaacttagtagcacgtttacttttcctaaaacgtgtcatgtccccttggccacacaccgacgaatgtgacgcccacagcccttaaaacgcccacccggcagaaccgaaatctagcccaaccaagcaaccgagaacaaaattgaccagtgccgcccccaaacgcctactgaaagagtaacttccggaggcacagaagaaagggcgcagcgagggcaatagggtggagaagagttttagctggctaggacagtgccgcctgaaattatcagcctgccaagatttaaacatagatgaatgtggcataatcccccatctccaaagtccaaggtccatacgaccgtccatagcccctctcgaggcagtggtagagtcccagctggtgactgtttttcaggcatttacggtagccacctcaatcttctagcgctcaagcgcgcgcacagacgtgaacgccgccagaggggggagggggtggggcgatgcttaagtgtccacgcatccgtagtgcgacgcacgcaggcgtagtacggtcccccgggcgacagcggtggcggctcctcggggtgctcggctccctcccacctaggccggccccggcccgactcgccctcagaaactcactgtttggggctgcggactttctcgtcgtgccccacaaaagtaaagcttggggacctggggggagccggaagtatcgcttcgagatccccaaatactatcggggaaacggaagtggccgtcggtggcaggtttgggggagaccggaagtgacggtccgtggggaagtcgggggcggagccgcggggtggtgggtgtgtgtgtgtgtgtgtgtgtgtgtgtgtgtgtgtgtgtttggctgtgggttagttgtgccgttctgctggaacaccgtgggaaggcagtagacgcgggcagtcagctagcaggtctgtcgccccgtgagtgccgtttcgggtctatagtgagttaggagggttcgatgggcgtggcgcgcgtgcgcgaaaccactttctccgcagagtgtggggcgaccaccgctttcgcgttgtcccaggattttccgacctctggggcgcttgtcctgccgtgaccggtgatgacactagtctctggtctcgtgcttccttcctaatctgactggctccctgcttattgtgattggcgtcgtggagcccctcccacctctcgtcctccagctccctaagccgtcgatctcctgccctttgtgtttctctccctgtgccccggaatcagaagggggatggggacaggtgtgaatgtgtgtgtgtgcaggagaaactttttaggtattggggcagggattaatgctagggagtctttcgggtacactctggtctgggcaacagcgggccttccttccttcgttcttctttagagacctgtcggccatggagcctaatgatagtaccagtaccgctgtggaggagcctgacagcttggaggtgttggtgaagaccttggactctcaaactcgtacctttattgtgggggcccaggtgagacacctcactagttctggaagacacctttagcttttcctcgtttaggccccttagcctgagagatgagcttgattttctggtcaccagattttctttttttttcttttttttgagatggagtcacgccctgtcttccaggctggagtgcagtggcgcgatctcgactcactgaaacttccacctcttgggttcaagcgattttcctatctcagcctcctgagtagctgggattataggcgtgtgccactatacccagctgatttttgtatttttagtagagacggggtttcaccatgttggtcaggctggtctcgaactccttacctcaggtgatgtgccctcctcggcctcccaaagtgctggtattacaggcatgagccaccgcacctggcctc

SEQ ID NO: 11278 - DNA, 6000 bp, Homo sapiens
ctatgtgccagaaacagttctggttgctgatctaacgtggttggaaatagactgtgccttgttcactgctatgttcccaccacttaaaatctccacctgaatgactcaaaaagcccaacatgttcaaatccgaacccattatattcaccagaatatgtgcccttcactctttgtcccatatattagtgaatggcacttccattcctcaaatcaaccaagtcagaatcatcttcctcataccacatgtcagactggtgaaaacaatctgcaaattttatctccttaacatttctttggttaaactcctccttctcatctccacagttactgccttagttccttaggcaatcatctctcacctttctagtatgatccacagcatatagtcgatagtcaacagacatttcacagaataagtttatgaataaatgaatgcaacaatgaatggaaaattctcacaattggtatcatctccttataggccatattgactccattttgcactccaatttatttgctgaactaatgaaaggcagatctttccaaaatttatatctgattatatcattcccctgattatcaccattcaatgaccactactgcctacaggataaatacaagattctatggtcagcatcagaatctatccaacagattggtgatttgccttttgctctaccaccctttcttgtggctttcctcaccctgaaaatacttaacagtacctagaattactgtgctgattcacaactccatatctttactcaagctgttttctctgtcaagattgttcattccctcctgctatgcccacctgaaaattaactactcatttgtggaaactcagcttacacctcacttcccctttgaagcctgtgctgacttttctgcccgggcttcacttctttttcttttctcatgtcactttgtaacctctctctctaagcacaccaataacattgtttcacacttgttcacaggcttgtagtagtcccttgctggcgtcttttccttcctccagagtggaggcctttgccttgttaatttgggaattagcacatattacacactctaataattgtagatggatacatagatgaaggagtagatgataagagtcatggaaatattttaggcaaggggatgatatgataagatttgcattttacgaacaatactatgatgttagagcagagagaaggctgagaacagaaaccagatgatcaggcaggagaatattacaaatcatctaatggagaggtaagaaacagaatggaatagaagtggtaaagaagaaaagggaatgtatttgaaaaatacctataaagtaaacaaacaatagttaatgaccttttgcctgaccagaaggagtaagtatgagaaaaaggatgacttcagagctcctagcttgggtgacttcttcttgtctccttgtttaatatctataattcacatccatagcattaagtcaggcaaagatacattaggcaaagtgatcaattacatgtatctgcaacaccgtttcccatgtaacttctcagaaccacatttgctgcatcaacgcaaatttatatatgaagcctcatcctgtgtccccctactaccctcattattcttcaaaattttccttaaacaaggaggaattaaaaagggacaaacaacattcagggaaatgagccacctcatgtttgaatagcacactaataaaatgaagaaaagttgaagataggaaatatggctgtcaggtaaatcctaaagaatagtaagggcaaggatctcctaatctccactaatttataaagtttaagggaaaatatttgaagtaggtcatcccttgctctgtccagccatcctatcaataggctaggatatgtactcttgaaaagacattttataaccctaaaataccattataataattatttttgcataaataatagaaatttatatttacctcaagcataactttaaacatgcttttcttgtttcttggcagtgaaaacactggttgaccaagtaaattcacccctgaagtacctcattaatcacggtgcacttgttcttggcaagaaccttaatatgctacaaatactgttattaaaataagatttggggattcccaagctggcagggaattagttagttacacctctctcgaaattattttattggggtctagttaaacttacagcataaagcaacttcgataaatgaatgtaatgtgtaaagtctggctattctaaagctcatttaaaatcacaagcagcaactgccaaagatggcctctttcctcagggtctgcttagttgtgcacaatcctcccaaaagatgatactatccattccctctttgtgctaatgtggatatagcacccctatctaattgctgaggcattgcagtttcagactctaaaatgtataatcaaaacttcacatttgctacatctattaagtacacaatttatttcctgtctactactaaagatactgctagactgataaagcctggtagacagagaagtatccaaccttgaacctttggaaaaatcatttattaatgttttaaaattctgtaagcccatacaaacctgttaacaccaacacatggaaaagaaaatgttgtgttgcaagttctcattcatgttcaagaacaagttaggagatgcaaagtatgtgcaccaaccaaggctttctttaactctctctgaatatacaatgcataatataaaaaaaagaaaggctagaaatgttttgagcatactgttgtaaagaaaaaatcataacctatacagtatatatatttgctaccaaattgagcattataattgctaaattattttagtatattctgacaggtcaaaataatttaccaggcttattaagtaatatgtttaattacatatcaggtcagaggagattaacgagaaaagtgtcagttgcatttctctatcattatcctaaccacatttaaataaatgtgaattttacataaaagttatactttttgatgtaatgatgatgcaacacaaccgttctccttgtgtgcattgtaaaacggaaagttggctggaatattctgcctaatgctacatgttcacgtcaatctgggactgtaaaattttccagacaccagagccccacagattgtagactccaccaatttcctgactcctatgtggttgaattccaggttcacctagttacaaaaccagcccttcttccatgttatttcaaaacacgtttctggtgttgatgctaattctgcatcccaggagagagctatgtatggatgacataacttatttctaaaagaaacctagtccgtgtgctcaaaacttattttactaggaaacaaggaatgtatcagcgagtatctgcaactttctctactggtcttctaaggttgatgtctttatatttcatcttaacaaaaaagaagcagaaataataatactaaaaaaagaggaagcaaaaggagaagaggaagaaaaaaagaattagacacgaggtaacattataaaaacaaccttaaaatgcccagataaacgtaactctaataggagactgaatgaatggactttgtgggaaaaacagtagtaaactttaaagccactgaaaggttttaaatgcctaagggaaaaataaacatttgcttccaatcattttctcattaagcattctctgctagatggagaaggcttactacacacacacacacacacacacacacacacacacactctttgactccgcgccacaaacggggacttaacccactgcccgatctctgtcagaggcgacccatttgcgcttctgctatcgcacctccgcccgcgttcctgcgccccaggttccccgctgcctccccgccccctgcagcgcgggagcgttgcttcgcctggcctgctggcctcctctagaccttggccaccttctccgtggcaggaagggctacatgcactgacagattttccgttggtggtggctgggtggtggcgaggcgtgtttccgggcgcgcttaaaacctagcagctctctccaagtagcagcttcccctactccgcccctaggactgaggacctagccctcgatgccccctcacttctccccgtcctaccccgccatcacctcctaacctctccagtatactctcaagcctcacacgggcgcctgtcctccctttgcattccctagctcccgggcgccccgttcggttgaagtttacgtatcttgggacctaattgctcccaattatccgcgcagcctaagtcccgcgtctgcctggctctcgccccgggagcctgaagctaccgggcagttcattgggtgtcctcggggaaaaggttcaagctgtagagatgagagaagtggggctgggggaggggagaggctccagaaggaagaccacgaacacgtgcgaagaaataaaagccaccacgtgtgcacgcgcgcgggggcccaagggcgcgagcgcggagcacgccccagggggccagggacagtggtcccctgcagcgggcatagcagggggcgcgggtactcacacgaaagcgtggtagatgaacgcccagccgcggggtctctccagcacgttgtacaggtagttctgcacccgccggtacttgacgttgcgccggcagctctggctactcgtgtaagagagcggcttccccagcaggctcatccgggccccctgcttgccccggcggctctccctcaggccaccgccgccgccaccgagcgtggccgcgcgggtgcccagcagtagcaggccgtcgcccctggcggctgccgagttcagcagcaccctgccccggccggactccacatccttcatgccgctgcccaagcgccccccgcccgccgccgccgccgctgcgccgctcttcacccagagcccggcggcgccgccctcctctcctcccgcgtggtggcggggcatggcatcaccacgggcaccgcgagggggccgccagcgcctgcggcgggggcagcggcctcatgtgcgccggcgggtttcaaggaggaagccggcggccgacggggcgcccgccagccagagacctctgagccgggggcggggaagcaggcagccagcaaaccgcccgggcttcggggcgggaaaggaggggctgcagaggaggccgaggagtcccaatttctaacagcctttagcttcgaattctaaatccggacctgtttggggcgtcactttgagagggtttctcttgctccctcattcccgcgactaccactccctccttcccaaactgcccccggggatagagtgggggagtgcggggcgctccgaggcgcgctcccacgcgcgcacacccagccccaggcttccccttccctctctccactccccacgccctgcagcgaaacggccccagaagcccctctccgaggcgcgagttcggtttggttctggcaggggctttgcagctgtccggaaggtgaagtcagccttgtgtcctgaggagaaactggagatgcaggtcgctgtgccctcccgctgctacgtcgctgcgccggatcctgccatccttccgcaaggggtgagagcgggaacagccctgccctgccttccaggtattatctagcctggaggctggagcgcaaggtaacgctccgggaagtggcactcgggtccccgcacacgggcgagtcctcagcagttcagtggacagacccgcaggacgcggctgccaagtccgcgaggcaaggaccaggcatcttcccgcgcctcactccagcctgcggactgtgactttccatcccagtatcagacaagctcgcgagtaactgaacatcctttccagtccatgggtggggtgtggaaagggcgtaaaactccaaagtggctcctccgcggtgagcgagctgccccggggctctgcctgactgcagcgcgaagcctgggagaacaaacccagttccctccgtcaagaaatttccatttaagtccgagaaagtcatatgattgagaagttcagca

SEQ ID NO: 11279 - DNA, 6000 bp, Homo sapiens
ataatagatggtgatcaccatgcacagggatgagctgctgatggtacacttctctgagcctgaaatgcatcctacagaagggtcttctacgaggcagaagtggcacgtccggatgtcgggaacaggaactggggaggcagaaggagggatggaggcactgggtcactctcaaataccctgggccagtaggaagcccgattatccatggccacgctccacccccttcctggactcagttaccccttcctccctccctgcccctgggccccacttaccctttcctactgtgaagcccaccatgaccagcacacctacaagcatatggaccttcattttggaattctggggagatgggcagttcctgaggggatgccctgaaaccccaccttcctgtgaccatgctccttaatcctaagctgcagggtggttttgacaaggtctgagcaggagctgctgtaaatgcagagctatattcctacttggggcaggatcctggctgggaaggaagttattacttggcaggagggacagcatgtcctcacccacaacgtctggttcctgagtgtgggagtaatggcccagatggggtaatacctgggcactaccgggttctttatccagtgtctacctttgtcttgcataccctccaaagacctattccctcccttggaaagtccatgggttagtatctatctctgccaccatgtgctgtcttcgtcatacaacagggccaatccccactgtgctgggacaacctggccaggaaatcaagcatccccatccttctgagatgagcagtctcagctccaccagcggcaggcacacacacatcactgagcagcaattccggaccttgtcccacctcgttccaccctttagttatactgactttaggctacttttcctttagaactaaaactaaaagatggagctgctgattaagccccttacagtataaacagacagtcatagatatccaaacaaatatttctcatctttgaaatatgctttgtcttttccttttgaccttgcatttcatcacacgcagtcctaggaattctgttctgctccatactaaaaacaccacccaatccactgagcacaaatctgtcctggttttcaatctggggagggtgggctgggccatgagggcccctggagtccaacacaccatcaccttcccttccccaacagcaagcaccagcagactagctcatggccttttcttctactttatttcatattcccaccacgataacgactcctttaatttaaactaaaaaccatacagggttcctgaaagggtggcaaaaaagaaaggaaaagtcaaagactgcaggacaggtgggggagggaatcagcgaatcgtcttgactgggctcttgaagttgctggcggcttggagctgcagctggtaggccatcggatggatcttgaaaccgtagagcctaggccagggcagaggtcagagaggcagcagcatgagccccatccaggccctgccagtcacctgcattcccacctccccacctgagctcctctatggacctgctcagagctaaagcctcgtggttcccaacttctcagctcaagaacattctacaataaggtaactcaagcacagataatcaaataactttcccacagtcactcagcagggagatgccctgattctgggagaagcagacctcaagaaagggccatgccctgtcctcccctctctgggggatcttgggcctttcctttgacccttaatgactctccctgctccctacctgggcacaaactggttggcaggtctcttgggccggtactcgggatgcaccatgaagagcatgtgagggaaaccagtgccgaagtaggcgccatccgtgtgatggtgtcttgatgacttgggtgtgtacacatccatgcacttggggcagtagagcttcaccatggcttcacctgggatgtctgaaaggcctgggagacagccagactcagcaggccaggtatccccctattcctacctaacctcccctcaggactcaggctccaatgtgttgagccccaactccttcccataagactgccacacggtgctttcctttcccttcttcaacactcaccaatgggaagcattggctggttctcacagtacacacgaggacagtaaccaaagtctccttgctggtacttttccaactgaggtgaatacaatggaaggggttggcaggtagatgtaaagaagaggcaactcccttcgcagcccaacccataccactctgtcccccactcctcccacctctgtccagaggccccttctctggactagatgggctctcaaacttctgtgttgcctttcttccaattaggcaggctacaaaccatcagagccatttgttgtttgttccttgaggaagaggcagtctatcacaactctctgattcaaggtctgtctccctccctgaaaacaatcccttcaggatgacccccaatcagaattcaattcccaggcccaagttctggggttcttcccctcttctcagctagcttccttaaacagggcttaaacatgacttcttgctgcaggaacctgtgtctcttactgctcagaaggaggcaggtaggagcagagaggcctcaccatctgggcgatgccacggttggtaaggatgtagcgggcgtggatcaatccataaagcatctcggctgcctgctcaatcaggtcactctggttggggttgtcttccagttcttcatctgaaacacagcccggccaaatgcaactacttgtttttcagctttcctaggtgccctgcccatatccaggggctgcgggctattcagtttgcctagcacctacttttgggccttaccccatccaacatctgggcatgggacccagaaacctgggcttctgacccttgcatcaaacgaagacagctctgccttcccttcacaccttttcagcctctgctccttgctctccctcccaactccctcctcaatacataactgcaacaatgtcaatgcagaagatgaaattctagactggaaggtgcaaagcaggagaaacagacaacaaaccagacccatgaggaaacgcattttggaataggtctgaattgcggatttagaaaacatgagaacaagtgatatacgtcacaaaactagacaagagtcaggtggaggatcaaaataaagcatgaatttggggttaaagaaatcagagaaccaaaggaaatttcaaaattcaggcaagtgaatagagatttgaagagaaaaatagtgcacgcacacacacaaaacaaccctgagggtgcctcaccaggctccaggtccaagatcatgtctagagcttgtcgatagtgagggacctgctcattgagtccagtaagattaaatttgtcctggatgtagtcttcatccacctgtcaggacatggaagccaagagggaacccatatcaaaatcctcatctttgacctgggcaaaatgctctaagtgatgccttatcatcaacacaactgcatctgttgtgcttgtttctcactcccaactcagcagaagtacttgtgtctctccctagttcacctacactctctcccataaaagctttggcttttcttttctaaggataagtagatacagcaatctttttcttagacattcttttcaagatctttgtccctactccactcctgtatcccgtctctaggaaccagttttgtcctctcagctggctaaggaaggtggaagctgaacagcatggtttctgaacaaaacatttcaatgtgtagcatttcagttttcctaaaggccacctgagacaagtactagcagtgccactttagtaacaaaagatacaggccgggcgcaatggctcacgcctgtaatcccagcactttgggaggccgaggcaggcagatcacctgaggtctggagttcgagaccagcctggccaacatagtgaaaccctgtctctactaaaaatacaaaaattagccaggcatggtggcaggcacttgtaatcccagctacttgggaggctggagcaggagaatcgcttgaacctgggaggcagaggtggcagtaagccgagatcgcaccactaccctccagcctcggtgacagagtgagacccagtctcaaaaaaaagaaaaagacacaaattgactagcccaacgttatattgctggacggtggcagactcaggacttgggccccagttttgccactttagcacaggttcgtcggggtttataggggggactctttgctgataggaagttttcaaatagcatgtaagagaacagtgcagaagtggaatatgtgaaggaacgtctggtgggaagatatgtgaagctggcaagtagggaggttgaagagaactcacttcacagaagaattcattgccacggagcccacagaaccaggaaatccaggacacctcctctgagctgctcatcttcacgtcagctagaaaaagaacagtgtcagtaaagctcaagttctccttccctgcctctggtatcctccctcctcccacattcggccctccaaccacgggagaattcggaaccaccctttcttaaagcaacccaaactctgaagcactcctctccagctcctctaatttacatctcagccccttttctttgaagttaaacattctttggggtcccaccacttgaaagaagccaacagatactttgacccaccagcccgacccacatccctggagctcccgaaggccagggccctctctcctctgtgtcaactccggcagggacctcgactcaggctccctaccaatacaagtctctgcatgacccccacgcctttcccaagggtttccaagtttatcattctcaagcaagaactgggctcctccttttctcacgggttgggggcgattgtcaggtccctttcaccggaatccacacatcccccctccgctcctcaggccacctctccctccttcgtgccggacctggtcgcttcctcccccgcccccacatcaaagtccggagaccccatgtgccgctcccagcgacaagggactcggagcagcgacgacttcagactcaccggctggacggggaccaggactggggtggggtagggaagttgctacttccagggaacggcggcgaccgctacagcgcaggccgcggacccgaccgcggcaggcgaagtggggtggggggagtggaaattagggagggtggggaagagggcaacacgcaagcgccaagggtcaggtgccgcggtggatgccgggacacggagtccccggtagagaaagaaactggctaaatgagagaaagcgaactaccaatcccaggatgacccgcgcacgacctggctgtcacgaaggcccggaggagggcgcttgcgggcggggcacaacgagaagccaccggaagcggaagccaggtatggcgttcggggcccgggagtctgggcaatacagttttgtgctcactgggtgaagaggctgacttagggcggggaaaggagggagccaggctggatctctttccgcagctctcctcacgttcccctctagtcccggcgcggcgctgctgcccaggggactggcctatcctcggccaatccgctgggtccttattgcctgttgggcccctagtgcgaatcagtcccgccagagacccttgacgggcatactgtttcctccgggctcctgcctcatgaggggagaggtgcggcttggctccgtgcgtagggacttgggtggggtggggtgggcggtgtgagaactggaacgtcccagtgcgctaacctgaggtggtgccagccattctgctcgtccctttgcacttctccatttccccttaggctctaagtgtgaccttcgaaccctggtcagagtaatggtgaggggcaggcgtgacgttatttcattacacggcttctcggcattccacaggtttccctccgcctcctgagggcctttcctaacccacagagtggattcctggctccagaaaat

SEQ ID NO: 11280 - DNA, 6000 bp, Homo sapiens
gatatctgggaaaagcatggagtagggcgactgtggtttacaataatctattgttatattttaaaatagctagaagaaaataatttgaatgtttctagcataaagaaaatttttaagatgatggacatcccaataacactgatttgatctttacaaattatatgaatgtattaaattatcacatatatgcccaaaatatgtacatctattatgtatcaataaaaaataaaattaaataaaaaggctgaggcaggtcctacaggcactaaaagttggaggctgtcagccaactacattcctcatggctgaatatcaaggtctttcttgaagggagatcagagagacacactccaaggtcacctcacagatcaattcctccactgtctcatctctgcagtctcaaacttcagcatcctcctctcccaccctaacatcgtatctttccaacttttactcccttactctcattatatttgcttttcaattgtaaaagttccactcctttattcccatgaccttctctccacatttcagctttgccttgatttaactgctttttccagataggctacacccagtttcccatcacttcatctattcttctgccaatatccttacattctttgcccctttttcctgtttgagtgcccacactgcaaaaccctgtttatctatctgccttctttcttcctacactcaaactgctggctacagctaaagaaaaccatataccaccgcagattaatgtcacatggtttccagtcttagctgaaccctaacactatacagaaatcctatagttaggtatttccttctcatatggcatctgaaaagaaatcttctaatttttatttcacagcatgttgaagagcatggcggaaaaggcatgggctttggagtcacatggatcagatttgaattctagctctttacttcctgtgtgaccttccctaacttctctttggtcttttttccccatctgtaaaatggaggtattactaactactcaacataaaataggtaactggtttagtgagaagtctcaaatcattggaagtatatactcaaagttttttctcccccaataacactgccagctgtacactgttgaaaatccccttttccactgagtacatctcaatccaattccccaacattttgaacattttcagctttcaacagtcctcttccccaccagggcaggtcaggtaggaggctgtgtgtgggtttgtgtgtgaaggcatgatctgctttcttgaatccacacttccaaccttctatttactgttccagtgtctgaaaaagcaggcagggagggaagaatttgtcttcttatgcactgtccaggttgctgtcccaaacaagtaaatgatcttgtctcttttcatacgctcaggatgaccaggtggttaccataataagttccattgacaaagatgtcagtcctaagcagttcctgaaaacattgatggtcctttggaagacttcatctgttggcagaattctatccctcccacacccacttcctatcccaaggactgcttcagtggtccatatcataccttctttcttattggttattgcaacccaactctggagtcaaaggtacaggtgagattcattttctgtacctcccaggaatcagggacttgagataaggtgtccttgtcttggcctcgccataccacctagctacctctccctaattttccttcctttattttggtagcactgggtaggaaatcacagcctagaatgaaggtttctatgaacttggctcccaaaaatttggtatatatttgttaagagtgtactatttcaccataattcctggactaattagtaaccccaaagggtcaggaaaagatcccagtcactactttattctgatacatgtatataaattatcatctacaactgacctggcctataccaatgaatgttattttttcttggtgagctataacagttacatttctaaattgtatgtttgtctgtattaccaatataggatgtacacatacactgttctaactattttacaaagattaacatgtttaaaccccacagcaatcctgtgaggcagttatcattataatccccaatttacaggtaagggaattgaggcacaggttaagtaacctatttgttttccattcacctatttgaattctacctgccagggatccaattaagatagtcaaatccatcttcaaaagaaagagtgtttttttaaattataaatgatttttgggattacaacaatccacaaataattggataacttgtcacctttgtgatctggaagaggttgtatagcatggtccttgatacacacttgatatacaagaattgtctagtccttggaatcttttagaattcattcataaatctctttctatgtagtagcaatagttctttaggaactatttcaattgttattggttggtttacttttcctacatattgttgggttcttttgctatttatatattttatatttttgtaaatataaagctctcttgagctttcctcatattatgcatggggtttccttctcattttatttattttttagaggcagggttttgctctgttgcccaggcttgagtgcggtggcacaatcattacagctcactacagcctccaactcctgggcttaagtgattctcctgccttggtctctcaaagcactggattacaggcatgagtgactgcacctggctcttctaatttaaaaatatcacttttattcattgtcatatccctcttcagttctgtagatgatgtttgcacaatctgataaatttgaatcagaaaaacacatgtaagatagctcaacttaatcagttcaaagatttatatacaaatttaagaattataaatgcaacacttatttttcagttttaaataatgtctttttttgaaatgagacattttaaacaaatagtttaatatagtttggtattaaatgtggcatttttagtactattttcttcttttgtgatctagtttatattcttaaaaagtcccctcccaaaacattaaatatcctaatttcatctgagcaatgatacttatacacacacacacacacacacacacacatacacagagtcactattttcattacttatatctgcacagaacaactgccaagattgaggtttattgaggttcaacgataactgtctttgcttttaaaattctccttgtagtcctaacacactgtcacaacaaaacaaaaatatggcagtttaccacatggggtttagtaatggttagatagtccttaggttctccaacttgtgttatgataaattttaatcattctgaaaaccatggctgtatcataccatgtacatatcatccatgtatcatggatttggggggaagcattagttcagtatatactcagaattcatatgattaaaagaaatggatactttagcaacataatattctcacttagtatttcaattagttctaattgcattagccctctatcctcccaagtttaattactagggacacaaaaatttcatatttggtgccaagtgccaaaagagcaacatgtttttactgtttgcttttactctgtaatagatattgaaatattttagatactttcaccttcgcatgtactttttttgtgtgtagtagcatgccctttatattgataaaaagatgtagaaaacccgagtaaacgattttctttaaacactgtttagaattaggaaattggcagttttgaaataataagtgtattttaaactcgcaaaggccaagatatttctgtaatattttatacacttcttagaactgcatcacaaatgaatttcaaaaattctgttcctgagactgtggtaactacaaagcatgaaaaaaaaatctatacatagtgctatagcttctgctaattttctttttgggacttaaaaaaatctatcctcttcaagtgttagataaaacgagctagtgcacattaaaataataaaaaggaaccaatcacattcgtctttcatgtttctgtatctttttatcatcagaaacagctgacccttggctaacattacatgatttggagaaataattggaagtctaccacagggagactaaatgtaaaactccaatcagataaattacaacacggatgtggtaagtgatagaacacacacctaaatctaatttaacttccaagaattttaagtagtatttcccaattaaaatgtctttaagggaaaaatgcaaatatgaggcctttgttagcaagattccagaacaggaaaagcggaactcaaagcctctctagttaagcgacctgcgttccgacttacctctgagtgatgggcctactgcagagcccgcctcccaccacagtgctggcccagaattttttatacgaactagttcgtaactaaacgttggaagcatcaccatattgccagtgagaagtaagatttaaaaataaaacgatgctgtcccttttcgcccttccttaggacgtctcctcctgcactaagggttcaggtgaagggtggaaactggccaagaagaggaagaacgtgaaggagtagggggcaaggaggaaagggctccctttacagactttggtgccatttttactttctgcttgctaatctgaaacgttgtgcgattacaatgacggcccctctccccctcgggtactaattacccccgggccttttccggtgcacatcccggtgctatattctggtgcctgtgttgcccccacgcccccattaaattagtaaaggaaaaccaccccttttctgcccctaaagtaatctataaacgaaggaatacagatgaggatttaaatcccaatcctaattccaagggaggctggaagccccctcagccgcgccctggcttggctttttcatctcgagcggttgtgacgccaggggcaggtcttccacgtgtcttcacagaggtgcccggagggagggcgtgagggattacccaagggaggggcgagtatcgcaaaataggccaagtcgctgccctctactcaactcgcagggcgggaggatggagacagagggatgcggcgggagggcgggacagcccagtcgccgccaaggaggcgaagcggggtcggggtagctcacccgccccccgcagtccccgccccccgcagtccccgccccgcgcggcgccgcgcacgcctgaagtcattgcccgaggccccgccccctcgcggccccagccccggctctggctctgccggcggagggggcggagagaacccgcagctgcaacttcgcctggagcctttgagcctgggctcagccggggatctagcagccgtcaccgccgagtcgccgcttccccggcgcgggcctcagcccagccggcttggccatggcaggcgccggcagtgcggcgaatctggcccctgcgctccccgcccgtagctgagcagccgttaaccagccatcccgcctttcctcctgcccgtgtcgccgaggcccacgctccgcgcaagtttccgccgccgaagaagcaggaggacggacgtgaggagtcgggcgtccctggcccacccggccctctcgcccgcgatgtgggggcgcttcctggctccggaggccagcggccgggatagccccggcggagcccgcagcttccctgccggtaaggaacgggacagcgccccggctggggtgggggtcacggccgaccgcggcgcctcgggacctcgccgccgctcccctcccgcctcaggcctgtcttaccccggccgcctccccgacgccgccgcgtgcccagtgtcctccccgctgtcagcacccgggctgacatatggcttgccgcgtcccaggcgcatcagccccgcatcccgtcgtccccgccgctcctccttgggctgcagccccagcgcccccaacttccagctcgcttgggcccccgcgggttgggctttattgtctgcccggttttttccttttactcgtggggtgtgtgacctgcgtg

SEQ ID NO: 11281 - DNA, 6000 bp, Homo sapiens
aacgcctcagcctttctctaagatggtccccagaacgcccagaactccctgtccccgcccccaaaccgagtatgcccctgccccctacctgcacggccttgaagatggcaatgatgccagtaggccagaagcaacagatggtggtcagcaccgcgatgggcatgtagtcgtgtggcgggcgcctcggctccagtagggccagccctgggccctggggcggcggggggagagtggaggtcactcctgttccccccggggtcccgcctgcatatggctgtggaaggaaatttggggggcaggggcatcactctgaccctctcccagcctaccagcgttgggcggctggcagagtggctttaaaagcacaatttttacctatggcttctcaaaataaagcacccattacccttccaggacacccataaattccacctaagcccctctcctcccttccttgcttcattaaccaccatattcttgggctttctacattctctcccgcaaggtatggtcccactggggctgtcctggcctcaggtcagaccttctttcttccctccagacacctaccaggcctcccctacccccttagtcccaggcttctcccacatccctcttggttcccagcttccattccccccgtcccccgccaggcggtttcctactttcagacctcctctgaacctctaggctccgatccccctcccaggccctgactctgggcaccagtagactcctactcccgtgtctctccctagtccttcctgtctcaggctcccttctttctagggcttgtcccgggaacactacctgttccctgcccttgttcctctatcctaccagcccccagcgtatccccaatttcaagtcctgtatcgcgtccccctctttcccatgtccctgtctgcccggcactcaccgtgcccaccgggtagaccggcacgtaagcagtgcaaggctgcagctgcagggggtatccgggcgctacgtagccccccagcggcagcgtgcccacagtccccgcgtgcgtgggcaccacgaagccaggggcctgggcagtctgggctggcgccggcgggggcggggcggcggcagcgggcggcggcgggggaagtgggccctcgaagcgagtctcctgcaggtaagggtcgggtggcatgcggggcaaggtagcgcagccgggtgggggtgccccggcagcagggccgggaggggcgtggtgggggggcctcggcagcgtggcagaggaggagggaccgcgctgagcggtggccgcggaagaggccaggccccctgcccctaagcgcgggagggtggcggtgccagactgatggtagtggtggtggtggtgatggtgtgaggaaggggctgcctgtggcggtggggctgggggttcggctggaggctgaggggcattgtagggcggcggagaagtgtgagggactgagtctgggagtcctgggggaggtgagtggaggagagtataagaggaaagatgacacagtgatgagttgaggagggggtaaggggaaacacagccggtcagggatggagaaagataatgggagagacacatagagagagacgggtgagaaaccatctctaatttgaggggcaagagaggggctgtatctaggccatctgcccccctccttcttccttccaatctagttttgaggtcacaactctggtctgcttcttttctgtctttttcatcaccatgcacccagctctcacctgcagacctaatcccctctcctttgctatagctgcctttgggctggcctatccgagctagtcctgtgtgtgcgtatgcgtagacatgcaaccctgtgttaatatgtgctcaattcaacagttgtataaacacatgtgggatgacatgtgttccactctgctgttccttcagtggggggaggagtgccccagcctctgtgagaatctcgggacctcttttagggcagattaagaagagccctctggattttgctcccttgacaacccccatctggtcatgtctccatatttcctcacaggatgtctccatgccagccagtgattgtccatctgtcactcccaatgatgccatccctgcaaaacctggctgtacctccttcaccctctcaacctacccccctgaccatgttgttggcaaggggcagaggctgccactggaaagaggaaaggaagagaaagggggagacagaaagaggagggggactgggggagtgttgagagctggagagaaggggaatgaaatagaaccacagctgaggaggggtaagggagggggttggggcaagggggacggagagtctggagacagtggagggggtgggaggttttgttattgtttttacctgacttttcggatgacatgcctgcggtctcgctgggacagggtccctgcagccggagtgggggtcctcggccggtgctggagtctgggtgctggatggcgcagccggcagcagcgcagagatggagagatgaaggcagcggcggggggggggggcggggggggcgggcggagggagagcggggagggggggagcttaaagggaccgaggcgagggagggggagcgcttcagatgtttcccactcggtctctctctgctctcggaccacctctctcctcctcttaccccggcattcaagcccccagtttgggttcctttggagttgtcatggaaacacggaggctagaccaggcgaggcgggtgggactaaggaaaggaaggaaggagaactctctggagtctcccccaccaagactcagtgattgtattgtgggaggaagtgaacaggttctcagtggagttaataacccaggtgcctccagaggcaggtcgtctccccctcttagctccctgcaaggtgccagggtcttctcccaaatccttggccccagtttcctcctctttagaagagataaatacttgtgtgtgagagagaattgtgcagagttcagaactgcgatggtctgaaaagttcccagggtttggtgaacctaccaacctagcagtaaagagggaggcccaggtctgtaaatcagggggagctgggccttggagggaaaagggagagagagtttgggcggtgtgcatacataccttcttcgtccaggactaaggagctgaagctcttttggagggggtagggggtatgacttaactgctcatttctggcagctctgttggtaatgtgtgcttgttcccccactttccctttgcttttgaggctgcttagagtctctgggctggtcaatgttcagatccattccctaaacccccctactcccacccaccacctcccaccaagacgcatctccagctcctgagtcgacctgcagtacagcgttattagtctttttatttgcttattgcatcttgggagcgcgtgggtgggtgaagggagcgaggataggaagtctatggagatttacaccagtttttttttttttttaaacaaaaacacagccagataattattattcttcccttacgtccccccagcccccacctggggcagtcgctctcccggctgcgtcccttttcgtccatgtcctagcagagactacagagcagtacagaggctctcgctgaaaccagtcccaggctccacagagtcagatcacggcttcacaccagtcgttctggtcacttaggcgttcgcgtgagcgctcaaccccttaccgccacctcatcgtcactctacaccattctgagcgcaaaaatgttttgattgagacaaatttagaccaagcaatgaccttgtaaacagagagaggggctcagacatgctgagaaatccttatctctagagaaacgtctttaaatgctaagtaaaagccctagcaagtaaaagccctgaggcactagggtgtcggttaggggtcacaggcggagaggtggggcgcctgggggtttcggtagggagccacccacagataactcagacagccagattctgggggtcgttcaggttgaaagactggtcgaaattacgcgggcatgagtcagcgcatccctacgcgccctccgccccttgagggtgggtcgcttatagggaggggagtagagtagggcaggagaaactgggccaggctgcacttagctcaaggggcctcgaggactctctgcgtctctggagacaagggcactacacgcacttcagaatgaagagttgtaagtcgctgacctggggcggactggagggtggggtggggtgggtgttgaggggcacgcccgggctggcatcagccctccaggccaccctgccactcacccagcacacggcaaaatgcagaggactacctttccctggtccgccccctggccgccccttggggaatgcaaacttcgtgttctgctgcggagccagacgcctgtattgggaagtggggagaatcaaggcggggaaatcggacttttgggtcgctgggggcaacgaagcctggagaggccttctttccattcccagaatatgtttgctgctttttcctctccccactggcctaaatggatcgctccgcctgtttcctccccagcacctagggcgcaatggaatattccattgcccctcctgtcctgggtctgtgttgcggggaacgctcgcgcggttgccagagaaagccccggacgtgacggatttgcgcgaccccaagcagcccgcccttccccctcccatccgtcattcccctgcgctctctttcctcacccttccccccgccaccgtgggttccagacttgggataagtaaacagcgggtggagcgaggcctacggacccaggccaggtgggagtctgcactcttcaaggggcctgggctgctgctcacgggtattaaagaactccgcgttgttcatggctgaggcgatgcattaggaagatcctggacctagagaacaagtcccccgaacgctgagttggaggcgggacttcgggtgcgcgttggtgcgtcaacgtggtgggggggtgtgtttgtagggagagggctggagtaagttaaaagtaggctattttgtgacacggacctggtgtgggagcgagaggaggtggcttgattgccgggcgtctgttccgagggaggagggtgttgccatctccctcacatgcccttatcacccctttctcaggcgggagcatgctggggctctgcgggcagcggctccccgcggcgtgggtcctgcttctgttgcctttcctgccgctgctgctgcttgcagcccccgcgccccaccgcgcgtcctacaagccggtcatcgtggtgcatgggctcttcgacagctcgtacagcttccgccacctgctggaatacatcaatgaggtctggcaggggacacctgggtgcagggcgttagaggcgtctactgtggcaggggagggagagcggggaactgaaagccacccctctgggcctgcccagttcctcagggagctggtgctggcgtgggggagagttgggggacgggatccctggttctagcagggtacaatagacctgtggacgcgggccagggggtggcgtgtgggagcttcttagcctatccccggtggctgcattgcccccttcccacagacacaccccgggactgtggtgacagtgctcgatctcttcgatgggagagagagcttgcgacccctgtgggaacaggtgcaagggttccgagaggctgtggtccccatcatggcaaaggcccctcaaggggtgcatctcatctgctactcgcagggtaggcgactcccctgcccctaactcctaagccctatctgaggcttgatccttatctgagggacacttcctagcgtccctttttctgaaccacattgctccaggcacaaccctggtacctgagcccttcctttctgacttccctcagcacctgggtctcatctctgtcttgaatgggagggaggctccctacactgctgcccttttgcttcctgttacccatggttcttggacataagggctaatggggcaggtaaaaacatcct

SEQ ID NO: 11282 - DNA, 6000 bp, Homo sapiens
aaaacggttcaacttgatgattttttgacttgatgatggtgtgaacacgatacacattcagtagaaactgtatcgataagggctgctttattcaccagaagtgaaaaacacgatggttgtgtgagtatctgaagtacacaaccattctctttttcactttcagtacagtattccgtaagtcacacgagatattcaacacattataaaacagactttgtgtgagatgattctgcccaactgtgggctaatgtgagtgttctcagcacatctgaggtaggctgggctaagccagcatattcagtaggttaggtgtattaaatgtattttccactttcaatatttccaactgatgaggggtttatctggacacaagacacaacaccatccgaagcagaggagcatctgtacctggttcttgtacagaacacatggcacactcaactgtgtgttcactgacttaaaatccatgattggcacctgctattagtctggctggtggctcacacctataatcctaacactttgggaggccgaggcagaaggacagcttgaggccaggagttcaacaccagcctgggcaatatagcaagacccccctctctacaaaaaaataaaaataaaaatgagccaggtgtggtggtgcatgcctgtagtcccagctactcaggaggctgaggcagaaagatcacttaagcctgggaggtggaggcttcagagagctgtgatatcgtaccactggactccagcctgggcaacagagccagacgctgtctaaaaaaaaaaaaaaaaaaaaaaaaaaaaaaaaaaaaaaagcctagagactgaccttgggttattattcttaatcaaagaaaataatgtatatgaaatgttttataaactataaagggctgcacaaaagaaactgacattaatgttgtcattattttgaaggcattgcagattctgcgatgcaaattctggtaccaataacaaatacaaaggccaaggcaaaaaataaaaagatcctaacgggagagatctagaaactcaaaattgttaagatgaaacctaagtcatggtcatgctacatgagcctaaaactgagaaaatcctgatttcatccaccactcccaggaaaacaacattggaggggttggtgatcatggtctggaagcagaagtatgtcatgtctagtttaagcctaatgaatcaactctaggttgcagtaggggaaggacagtatccatcaatcccctctttgggttagaacacacagggcctggctgggttggattctgggtaccatgcttaagagacacacatgccaaccagagcgataagtatggcaaatttttgcacgtatggaatagcttaagtactgtagatttttcagccaggaaagaagctattgaaaacacattttatttaagaaataattttttaaaaaaaattattctgaggagcaagtggcacaaataggcatgagttaacctgagttttatttaccaaagtgtgccttcctgcaaggaaaagcaactacgggatggactagctgccttgttaacaaagcactccctttccatcgatggaagtgttcaaactaggatggataacttcatgttagagatatcatgcagaaggcgagagaggctggtcagccctaagatcccttttaactacaataacctgggattctaactggcttgacagtttcacgtgtgtaggtaggtgctaggataccagcagccacatgagaaagaggtccagaactgtgcctggtagctcttctgtcttcctctccctttctgacacctagggacagaatggtgcatatattgtagggcacacacacgctaaaggatacatactaaatacaggatacatgctgaagacagcatgaggcttatttgcaagagaaagatcatggaacagagcaggaaagaggcacaaaaggcagcttctcaaaccctgagcttttatccactgaaagaaggcaaaggctccttccactttctgcttctacttgggatgtgggctgacaagcacctgacccctggaactcctgcactcaccatagtgtacatcccacattagtgcatctgatacagtattcaacatacacagcagcacaggaaaagtctgccttccaacatgccaaaatgtgcttgaaaagctctttgaagcatttgttatgtgcttgaaacacacagaacactgggaaggcagtcctttatttagatcttttttgtctgtgaaaatcaatatgtcctttctaggctttactgtataagaaaatgtgtgtctaattattgttcccaggtttcccctctcagtctggcccagtaactgcaacgtgtcatcaagcatcacccaaaacatgccacacacatgagggctgtctgtgaccctctcgaatgctaatttagaaaaactgcccagctctccaatatgcctccatagtctgcttttaagaactatttttgttctctcctcccaccgtgcatggctgagtgtgaatagctgtttcctgggtcctcactgccaaggtaatggcactctatcccatctcatcactttcaagttcacctctactttgaccccaggacacagcgctcttcacacatactcactttgatccattattctccctctgctctagaaagacacttgaaatacttaacaatgttgccaaatcctcagtctgtcagacatacacagtgatttaaatagtcattgttcttaatttttctttgctgctaaaccaacaaagaaatattgccctccgtgaagggaaaacagtcacagaaacacctttagaaagcagggggtaggaggtgggtgggatcaaggtgaacccagctagaaggaccttccccattaccttgcagggcagcaggggcagctcagtcagacagttcccacaggacagagcatttctggccaggttggtacaagattaaaacaatgattatgatgatgtaagagtttatcttacacatccatgagctacaactgttaaccaatgcacacggggggaggaggttacatgcacattgactatttaaaactgtccaatttcatacatttcgacaaagcatttaaaactctgccagaacagcccagaatgggtagcgggtggggtggaggagagtctgtatttactttaaaatgtgaattaattagtttagacacaaggagcaaaactacaaatgtcttgatatctcttatatgttaagaataaaattacagctgtctaggggcattgagtgtccaccattgcccactctgtgtttaggccttcacacttgtctcacaactcccttctgctacatttcacaccacgcaatacctctgcaagggagctttagctacaggactcagaggacaaggtgcatgtttcagctaaagcacacccccgttctcagtgcctcagcccaaagcagctgctgtgtaagagcggtgacggccggggaacacccaaatgacatattctccgcgtccttcctatactgtagtgatgtttactgaagtgctgagaaaacatgggaggagacactggggtagcaaagcctaaagtcagatatctttggggaggactaagcatcggctgcgggttggggatttgcaggagtctttgcttctctggctctccagttctttagtaggctttacctgtgtcaaaatcaagtgcgagatggaagactattgctttgtgggagacccagggacaactagccgggcagaacagggctgtggtcccgactcccccagcagaccttgaacgacgccagtccgactcctccagagggggctggtgacaggtcagctgcctcgccccgagggtgggggaagggcgcgctttccatccgcgtactgggacaggagtttgggtgcaaactagtaaaggctatggtgctccctttacacccaagtaaaggcatgtggtttgggggacggaaggagattaagccaatgcggaatgccctacacacactctagcaccaccactttggggacttcggttctcccgctggctcgggcttggacctcggtctgcagggagagggttggagggactgggcggctgcggcccttaccttgctgaccacgttctggacgaggccggcgcggatgccgtagtcccatgcgcggcagtcacagttggaggcgttgtcccccttgtccggaggggatggcaggggtggtgtgtcgcctccgtccgcgccgctgctgttgctccggttgcccgcagcctcccagggggcagtggcgaagggggtggtggggaggctggtccagttgcccatgtccccgccccggcctgtggtggtgacccctgccagctcggtgcctttgccggccccgcggcaccagaagttgggctggtccaggaggaacgagtccgagaactggctgaagccgatgaacagcgccgggatccaggtgagcagcacgagggtcttctgatagcccccgcccaggcccccgaggaagggcagcaccgacccgtcatagtccagcaacaagaggctcggggccgcagccgcggagcagcagctcgggtgcgggccgcctccaggatgcagtgggggcagcggctggatctccgcgccgccgccggggcccgcgcgtcccccgaggggcgccgaggccgccgcgtccccgggcggcagggagccgttctcctcggccggggccggctgccgcccaggcccgccgcccgccgcctcgcgccgccggtctatggccatggcccgggcccgcggctcccgcagaggcgcatagagcgcggcggaggctccgcgggcgccccgggcacagcgcgccgggccaggcgcctgcagccgctgccgccgaggagggcccgcggctcgagagagagcgctcggcggctccgggtgcgtcaggccgcccccatgtcacccgccggaccccgcgccccgggcgctgcggccccgctcgggcgccgggcagaggcgggcagaggccggccgggccctcagccgccgcggctcatcagttccgcggcccgggcgccggctgccgagcccgccgctctccgctgctccgcgccggacgcggcaggaggaggagccggcgccgcgcccggcccgcgcccttgccggcggttcagggccctgcgggcggcggtgcgggcaaaggctgctgctcccggggtggccgcgctgtatttctccgacttcgggcgcctcccggaagccgcgagctctggacccagcctgccgagccggccgcgctctccagctcctggagccggccccactcctcctcctcctcctcctcctccccctcctccctgccccccggcccgccccctctccccccgccgaggtggaggtaaccgcggcacctgctgcgctcggctcctgctcgcgagcgccccctccagcccggacgcgcggccgccgccgcccgggatccacgggaggggggcgggggaaacgggacaccccgggcccgcctggctggaggatcccctgcccgttgcccgtttcgcgccgggcggggcgggggaggaggagacgcgcgtagcaggggtcgccggccggcgacgggtcccggcaaagtcggcgtgcgctgagaacgtgtgggccgggtcttctctgaggctgggctcccgcagccgcgcgggccccccacccactccgcgcgcgccaggtctccgtgacctctgtctcttcagaggtgcccggcggtcccgctgcccgcgccccgctcccagtcccaagcccgagggtcttcagccttcgggaacaaccctctgcgctttttccaggagcgaataaggttgatttttgtgtccgtggagcagggtcaaggaggcgcctttgccaatttcaggtcgccagtcccccgcagtgtctggccacctgcgacccgccgcacccactcccaaatcgccatttcttcccccactcctaagtgcatgcgatgtaagcacgatgctgggatatatctccaacacaagttataatacacacagtataaacgtgatgg

SEQ ID NO: 11283 - DNA, 6000 bp, Homo sapiens
ctgataattctcctgcctcagcctcctgagtagataggtctacaggcaaatgccaccacacttcactatttttattttttgtagagacagggtctcatgaggtcttgaattcttggcctcaagcaatcctcccgccttggtctcccaaagtgctgggattatagctatgagccactgtgcctggcttcaacatgccatgttaaatcaaatgttctttactgcttttaagtagtccaggatttaaattttcaatgtgagtgatatctactactgaatcttcacatgcaaaataatgtaatatggtgtgaatgtttattttgattaatttaaaaatgtaatgtaaaatcagcacaaaatcaggaattgttaggtggaaaaaatcatatattttatataaatgtaagttatataatagccttactattctaatgtgccatgatttgttttcaatatagagcatttctcttgagctttgaaactcagaaagcaacaaaattcacatatataactcagctaagaccaacagcaaagtgagacctcatctctaccaaaaaaagtagaaaaaaaaatttgtgaattatatttagaaacaagaactctttgaactatcacatcatagtaaactatagtcaagatgaaaacttttctccatatccttgctttgtaccctaaatgactagcacttgaaaaatatactgtaccatattaccatttctatttagttttaatatcatactaatttctcttttttcacatatcttttatatttgacctcaaattttattttatttttatctttatttatttattttttgaggaagagtcttgctctgttgcccaggctggagtgcagtggcatgatcttggctcaccacaacctccgcctcccaggttcaagcaattctcttgcctcagcctcccgagtacctgggactacaggcgtgtgccaccatgcctggctaatttttgtatttttagtagagacggggtttcactatgttggccaggctggtctggatctcctgacctcatgatccgccctcctcggcctcccaaagtgctgggattacaggtgtgagccaccgtgcctagccttgacctcaaattttaatcaatacttaaagaaattaaggcaacaatttatctaaagctgtcgacagacttttgctttacactcgaatctaccccggccccactgcaatatatggagaagtggaaattagcatgtactcaccaaatgcaaaaacaaaaagtgccaaatgtctaaatacataccttggtcctggtggttgttttattctgtcttctttcattccacacaaatgcaatggcagccataaagtgaacaccatgattcattgaaatggggcccaacaattcaagaatctgttgtctcaagttctaaaacaatttgaagcaaatgaaagtgaaacttttaaaaaatgaaaaaacatttacaactagactgcgtttttggtttctttgaaataatatagtacttataggttttactatctaaataacactagaggaaactttaataacgttaagagctacaatatgactataattctaaaagaaaaacaaatcctataaaatgacggctaccaatcagccaaataaaagtctattcactgtgaaaagatactagaaaaacacaacacatataaaattcaacttagtaagtctgatatagagtcctttaaaaaaaggtgagggattctataattataaaacaccttctgttttatttaagtaaaacgaaacataaaaagtatagtttaatccaagcatcaaaacttagatcaaatgttctaatggttcccacccttacccttttcccacttccctatgtgttcccttggatccctgatccaggtggtctggtctaggagcaaaattaggttattgaaggatatcaatttgacagcttgacatggcacagcatttggaaaatatcagagtgcaaggaagaaaaaaaatttaaaaatcaataagttatcccaccatcctgagataattactgataaaatgcaaactttctttattcctttttctgcagataacattttttacataattgaaaatatggtatttgttcaattatgtaacatccctgtttcactgagcttttgagcccttctccatccaataagaattcttcaaaaccatgaatattagtggctatgtaatgaaacattgaaaggataatttaaacattccctaattaattgtttaggatctctgttttttctgccattaaataatactataatgaacactttgtatatacatctttgtataatttcaattaccttagaattcattcctaaagtagattactaggtcaaagactatgaaacctttaaagctctctatacatattgctaaattgttttctaggagggctttgcatattaaaatgtcaatttaaaatgccctaaaaaaaaaaggaataaagttataacatgtatgaatgaaccttaaaaatatgtcacgtgaaagaagctagacacaaaagaccaaatattgttatcattccatttatatgaactttttcagaaaaagcaaatcaatatatggagagaatagattcgtggttgattgggattagggatgggaacagggagtgagtgcaaatggccatgaggaatctgtggtaaagaacatattcaaaaattggactggggtgatagttcacaactctgtaaatttactaaaaaaattactgaattgtatacttaaaaatgggcaaattctatgatacgtcagccatagcccaggaaaactgttaaaaattatttgataattagcagagtcctgtaaatactacacaaattattcacatattctgaatataatctttgggaaggtcctcagactcttgagctctacagattaaatatgaattgtctaacctttgtagctccaagattaatagtggtaagagatgcggatgcggcaatagtcatcttttctgaagaatcagcttgatgcagtatgctccaaagcagtgtcacagaggacatgatcatatgaaggattgagaggattccactgcgtgcttcaaacaagtgtttctggtctacactgaccaaaagctattaacagttgggggaaaagaaacatattacttactgagatttacaaatggaaatttattagacctcacagtctttcaaaagaagtcaaatatttgtgcagtcttacttggtgatactgtgtagttggatccaacaaacagtaatggataatggctgtaatcccttccaaaagagtaagaatcatatctggtggaataattgatgccatccacagaggcctgaagtaaaatgcattcatttaaacacaagttttatgatagtatagttcatattttatcactagtaaatactcacaatgtgtcaggtacacagaagatgtgcaataaatactagattaacaaatggctaaaagaataaatcaggggcttttatttcctaatctataaaataagtgagttggactaaatgtactagagttctttttggctaaagaattctatacaaaataaacaaatgatggctagtgactctctagccactgaggaatggcaggcatattaatattaaacaatacaggcagttttcttattattttacatgtagaaactaaggttattctgaagaaaaatgacagtctactggaactaatttttcagacttcattttgagcatagagactcagatcgaattttgtcactaaaccatgaaaatccaaaacaagaaataaaattggatggaaaagatttgtaaatttaaattattttcagtctgaaattgatttgcacttagataaaacagacaaaacctgggaaacccttttctaagcttcccattagttttgccagctcaggcaagaagagaagagcattgaaattaattttagatcttggtagaaaataagcctgtttaaatattccttcccttttccattctagattcttttactgatactcttcctcaagtcaaattttcttttttgtggaaagtaatacactatttgtaacctaccaaaaaccattactttatttactcaagttgtgaccaactttccagacattaagcagtcatatatgtgaaaaatgtcagtaccaataaagttaaaaatcacctcttacctactatcagataatcctgtttcgtatttgtactgctgaattagattatctaaatttctgcacagttgtagtgtcacagaaacaaccactctctgcagaacttttcccatgtaaggcagagtagatgtgattaaaccaatccattgtgggtgcatcttacatgcacagtgctgatgcaaagctcgtatcactgcacagaggaacatgccttgacatgtgattggctgagcatgcaaatactgaagagaagtcatgggttgatggggactgatgtgttctaagtcagatacaacaaaatcaaaacctgtttcattctcttcaggaatagtcattactctgtgttctagaacaatcagcctctgaagcaccttaagaagttgtgactgcaacgtgctgccattgtcaaattcatcctctgagaaattaataaggctgtcctctgagaaaccttcttccacagcaaccaggttcttacctgccattttttcactatgccatttctgagcactaaagatagatgacagcaaacaatgaagaatcactttctgaactttgcacttagataacatatcagaaataaaactagggaaacccttcgctgagctttctattacttttgccagctcagtgaagagtagtgtcagaatttctatgctcatcatttgcatgtttcgattgcctattaaatcttgtgcagtaaccttgacatgagttgggtaatggctacgcatgtaatataagcagagagaaataagaatttctatgtacatagaactccggaagttatgatttgagtccactggaatgtgactataaaaatctttgcccataacagaaatccggtgtctggccaatagattctgaaggagagacaactgaggagtatatgcattatttacactagtagttgaaatggcatttacaaaagctatagggttagttttcaagatggctttgatggcagagaaagcatacaaagtcctggatgaatcatacaactggagatacaggagcacatgttgatagagaggatgaatgttgaaattgggagattttcgagatcctggagaacccatgtcactctcaatttcagaaatgtctccctctccacagctataccagttctctaaatccagaccatcactgaagaatacactggtttgtttgagtttttcatttgaagattttttcttgtcatcatccttttttctggcaagttttactttaggttttgctcctggttgtttacctgactccttaactattgtttccttctccgaaactttttctgataatttttctttgaagctgaattgaatactactgtgactcctttgtctagatttggtttctatggaagcaacagaagagtcatgaagagtgtgtgtggttcctgaaatacaaggtgaggagctattcctggagattccatttgccacacactcatggcctccctctgcagacacagacagaaactgagaactttcattactcagcaaagcattctgactctgttgaatggagtcatcttcaattttaatcgtctcttcatctggatctatatcactgcactttgggggcatagcttcaatttctaattgagatgtaactgatgcagattccacttcgaggccacttacaactttacatatcaggtcaaatactacctgttgaacatcatcatctggggagctttccttgggcatttgagaatcctcttgggcattcacggtttcaggatcaacttcgtaactcaagttgtccccagcagaggactgtgaacatcccgagtcagaactctgaagtatttctatctgttggtctggaagatcaaaatcaga

SEQ ID NO: 11284 - DNA, 6000 bp, Homo sapiens
gtacttgattcatgccagttattactcacagaccacacaaagtagaagctattattagcccattttacagaatggaaaacagactccctcaatacgattctgcctcacaacaatcaaataaaaaccattatggtttgggaaagggacattccagctcccgctttatgctcatgccgctttacaactatttaagaatattaacaatatagtaagtattgcatttaaaaagtttgtaaatgcctcaaattttaaaaaatggtataagcatcaatagaataattctatatgtaagaaagaatgaagaatgctccttcagcctctcagcaacatattcacacctaacattttattcatcatataacccttcacgcctaacatattttattcatcattataacgaccatatgagattaaagctgttttagagactaccacgcaaagcttctatttcattgatactctactaaaaaaggaaatagtaactctactacaactacacacatttactttattacatgttcacccaaccccaaaaaattataataatcaagtgttgaaactatgttatcttcaatatagaatgggaatccctacttctaaaacatttaatatgatatcttttttttttccctgaaagttgtctctaggttttataccttaactttcacattaatcagcacacactaaataaatgtatacctaagatatatacttaaataaatcctatccatcattcctattcatctctgaatttgagaccaacaataatgaaaactagtacttaaactatgatggaaatcatggtaattttggggcattttacaacgtagttagtgtctcaaatcatctttgcaacaagaaatgatattaccaccaaagaatggcactatgaaaagcatttatataattttgtaacctatgtgatttctacttttctgtgttttggaaaactaagctctaagaatgaaataaagcttagttcttaaatacaatgtactgctatttctagttcaaaatcacagattttcagattgaaaaaatttcaatccacttatttttcaaatgagataactgggacaaagagaaattccatgacttgcccaagattacctacagtttaactgtcagcggggcttaaaaccacaatccacatctcctgactcccaatcctttcacttaaaacaaacaagcaaacaaacaaaaaagatttctaataaagtggaataattttaagaaaggcaagtatcactattttacaaggaaaaaattaaatcattttaacagattggcaaaacatgaactagttcttggggggaaaaaagagaagtcttacaagaaaaaatgtaatcaagagagtgccaaattcggtaaaatgcttgaaaattctgcctctagatctcgtaaatatgcaatcatcattaagtgacaactagaaagcagacttaataaactaactagattcactattcaaactaagaaataaacaaatgacaaagctttcctttcgtccaaaaaaagttttttattctacagtttaagaattctgatacttggaaaaagtgccccttttctttaaaataaatctcatattttaaaaaatgtaaaatctaattaaacgtataccatagtaccaaaaacaacttttagcttcctatccaattccatttactttgttaaaaatgttttaaatcttaaggtagatggtgataatcagtcatgttttataccagagacagaaacaaccataagatacgaccatttcctttctcaatcacacttgaaatgaacgcatcaattttaacctgcaaacttttaaaactgctcttaaaattctactttcctcttgattaaaattcaaccattgcgattgtaactagactaactacagatgatcagtgactatttttaaattcacatctacaaatattacaccccattttaagcagcaataatttgaggtttcctagaaatttcaatgcgatgtgatatatgagttctcccatttaaaatattgctcagtttattagttaatacaacaaatcatttccaggtagagtagaaactaatgactcaacaagtaattttcaaatcaatgttaaataaattcaactcgatatacaacaacgtaaaactttttaagtcagaataattaaaatagaaaatactgtacaagagactttgcatgtgctgacttagatattaaacagcgagatcaactattgaacaaaaaaatccagtgttccaaatgtttttagacctaactaaatctcaactaaaaaggtaaaataaagttaactcacacacctagatatacagtttgatggatgagaaagcacctcaaatggtaccttgcatccagtagatatagagtaagcaatatgctgaatgaatgaaaagagaaaacgagtcaaagaactccaagttctaataagatttctaaactgtctgatgagtatgccaacgttcctgttctagtaaggagaaaactccaagcaagaaaaaccacttccattcaaaataggtgaattttgagcataatacatagatagaaagaatgcttactgtatcttaaatctgcgatgcagactagggatagaaattcactttactaataattcctccccccaccctccccccaaaaattaaattaactcaaaatcaaaattgatagctcatttttactgaaaaaaaaaacaaaaaaacaaaatgatattcctacgaggattagccattaccataatttagccagataacattaagctgcttcatttaaaaaatgtaacattaccaaaagattaagaaaatgcagcattcctcagtgacttaaggtttgtgggtttttaagagatgcacagatgtaaaagcagatgcaaagacgagttttgtaaaacctgccccatcttaaaaatggagtattataatctttgcgataattttttcaaatatcaaggaagacatgtaaattcactgaagacttctatcaagtatttgtaaacctaaaaattaatttcaaattagtaaatcttggagtttacttccagctccattcactttggccaagaattgaatgaaagtaacccaaatcactccttgaaaattaacacacgttcagtgtgaaaatgaatacactaatacactgttaaatctccattagatgtattaaacctcagtacccttgcttatttcaacagccttgagcggttatcaacatcttatattaaaccacaagagatttatacacaaaagttaggaaatacactacataccaaaaaaagcgccattataatcatgtcctgctttcacctcacaaaagacactcattctaagctcgctgaaacttcctagtcattagagaagttctgatgaagtaacattagtaatcataactatctcaaaacagttacaaaagcctcataaaatcaacacactacataaatttcaaaggcttggtgggtccggtgcgactgctttaactgccccacacacatattcacacaacgaacctgtatcagtttaggagaaagtgttacagaaaatatagctcctttaaagtaacttccaatcacaatactgaagtgataaatccacttctgaaaagcaatttttaaagattcctaaaatactcattttgacaacccacaaaattaaggtttttaagctattaaacaaaatatgtcccaatataaacacaactttcataggccaagttccatcccacagtaaatatgtggacaaaaatcaaaactcttcagtgtactccaataataatttttaattaaacgagaggcataccataagaattaaaaaaagcctactaaacttctggttttagggaattacaggctttacacttctgcaaagatgtgttttagtaaatgcaagacgaagcactgaccaactatcatcacacatcagaatccttccaacaaaaaacccaggactgaatttaaggaaaacaaaataaacgacagagggggaaaaaataatgtcttgccacggtaccgcagcggctggatagcctgcttgtgaaatgctaatgccacttcggagcagttagtcaccagctattgtgtagggcaggagaaagccgagccggccgcgcgtgcagagcgagcaagcgaacgagcgagcgcgctctccctcttcgcgccgctcccgccgccgccgactctcgcgcgcccccgcgcccgcacggacgcgcgcgccggcccctcctcctccggccttgcactgcacaacactcatgacgtatctttatttctagcacattaacaaaatatcacaaataaattgtccgcagcccctgcggccccgaagtacgagtacccccggccactggcccccgcagaccccgcgccggcctcccaaccctccccatggcctttggagctttcacgttctagggccaagtttttgtctctgtaaaaaattgcgggaaattcaatttttattcgactcagggaaaagtttctttgctctgcgacgtgaatgtctcaccagattctggtaggtcctgggatgctccttcccggtccagtcggtgcgccggggcagcagctgcggggagaggacaccccgtgagcccggcccccggcccctacccgcccgctcccctcccccgcccgccccgcgccccggcggggaccccgagccccgcgccccgcgccctgccggcggcggcagcggcggcgcagcggcccagaggcggccgcgcggcggcgggacgcgccgggccgccgccgcccttacctccttctcggccacctcgcggatcagcacctgcaacaacaaagcggggagagctgagccccgcgccccgggccgcggccccgccgccgccgcctccctcccccacgcccgcgagcggcgagcgccggcccggcccgcgccgcgcgccgccgtacctgagccgcctgctgacagggtccatcttccaggaaccgggcgatgaggaagtagagctctgcgcgggagagagggacggggagacacacaggctgagcggtcgggcggcggggggcgggggaccgcgggcggaatcgcccggtgccagcggccccggcagccccccgacttacccgatcgcagctccgagaggcctttcctctcacaagacatgtttatgggtcacttcagggccgccgacgggacaccccgccgccgaggggaagcggggacggtgccgccgcctgccctatagctgtcagtgtgtgttcacgagccgagcttcggctccaccattcaagcaacggcggcggaggcggaggaggaggaggaggaaacaacaactctcaggcagcgactacggccgtggccgcctccgccgcggatccctccgccgcagaaaggagtccgccgccttcgcggcccagggctcggccccggctctggcccgcgcccccgccccccggcgctaaaaaaggagtgcctccgacccctcgtccccagcgctccgcacgcggcacagtgagacccccacccgctcctccccgcagggcgtgcgatttatttatttatttccagtcggagaagatgtcggagcccaagccgccggttggctggaaggcgctttctctgtggaggccgatagtggcagggagggggccggggacggttccgcggagggatctgacgcacacggagccgcagcacaggctctattcagcggcgctggctggagctgagatggaagttagtttctatgtagcagaaatatgaaacaaatgaagcaaaactgcccagagaggggaaatgccccaaggatgggtctcactcacgcgcgtacacagacacacacgcagagagcactctcacgctgggcaagctcgggatcgcgctacccttcccgagttgaatgatagtgtttggtttctgtctcttgccatgtgcatgtgtataaatgctgcggattggcatctgtgtaagtcttgtcctgcgttatttctgcagcctatgcaagtgttgtgtaatttattggagtgctgtatattgcaatagagg

SEQ ID NO: 11285 - DNA, 6000 bp, Homo sapiens
gcctccacagccagatgccgacaaaagccatcttctccttaccaccagaagaaccagaactttccctaaaggatgagcagggttgaactaggggaggagggcacagaggagggaagagttgggaggggaggccctctcatgtctctgactgtgaacaggtaagctccccgacttcttcttttctagatatttagccctcagaatctcatgatcccaatgttcctacacacacaccccatccttctttcccacagccatgtagctttcctcatactcttttatagaggggtggtgccaccttccaagtccttgtcttctgcagctatttggatgccttcctctacccagatatctgacaccaacttctctgtttttctcctgccaattttgcggcacctctaccttattttcctgaagtagatggagagctccttcatctttctctgcccccaaacgtgtaccttctctgtcatataattcccatccctgaacctctgcatttcttcccccaagtctccagagccttctgtgatgtgatcctctcctcttttcccctttgtataaatgcttgtcttgtgttcctttagagttgccaggtgtctcactttcaactgtgatctcctgaaggccggtagggtccccttctcactttgtggactctcttcttgccattttaggcctctgcttccaaatgcatagagcctcccttactgtttctgtgtgtctctgtcctccagatgtacggggaccctctatgcaccgaacccaatacgttcattccccgtatgatcgtcctggttggaaccctcggttctgcatcatctcggggaaccagctgctcatgctggatgaggatgaggtgagtgtggtgagaaggctgggaaaacgcatgtgggagaatggggagagtcctcattagtgaaggggagagagacacaaagaaggcagacaaagaagaaacatttgcaaatggcaggagggtggccattgagacttgggttggagtgtgacaagaggggtagtcattctctcatcttgggcagggagtctttgagggttatgagctgtgttggggaggagatgtggttctgaagatttcgggggtggggaggctcctgttttcacactgtccatattgtaggataggttagaatggggaaggggaactgaagggtttggagaaggggtgaagacatggaaggccctcccaaccaaagcaatcctcaggacccctctctgctttgcccactgagcaagactcccagtcctttctccatcagggggcagagtgcaagaagagaaattgcaggacgcagagaaaaggcaggggatagaggaggttttaggtagctggaggatactgggaaagaagactgaggtcagtggatcttggcatgatggggtgaagactgggagagtgattgagatcaaggtttagagagacactgagagggcttctgcaagggagtggttggacatcaggaaggaatataagggaggggaactgggagtatgtggagttatctaaaggagtacaagtggagtaggggcagggactagccagagtaaaggagatgaaacggacagaggcctcttatgggaggtggtggccaggtatggagatctgagagccagggaagtgtgggttctgatttgggagctgggtcagcaggagtgtccattggaggaaatagaggataaaaactggaatggtgccccacaagtgtgagtcagggaatgggggtgatttgggggacaagctttaaaaaatggtagggtagcctggaaaaccaaacgtggtgagagatggaccctgaaagttattgggaatggtgtgatgaggaagggttagaatttgagtcagggctaactagagtgtcaagggacctatgggggcaggtgagagtgtggagagatggctgggtagacagcttccaggccacagagtaaagtagaggtgttaaggagaggatatggtgactttgaaaggagaggtggcttggggagtctaagttttggacaccattgggagacatttgagtgactgtggtcaaacccctagatcaaggtttggagtctgtaggagaaatgggggaaactggaacccagagtggggactgttatagggatgaagagggaagacaatggattggggtaatgaaggaatgacagagatagggacagactgaagggaccagtggccagcaagttgaggggcaataggaatggccggtctggagcaggaagggcgtgtgtgtgggaggaggagtagatagaattgggaaaatgagcagcctgaacagacgcagggagttggaattggatgggtggtggaactggggctgggggatagtgaggggtctgttcctgtggctctttgtagaggtggaggagactgcaggggtggaggtgtatggaggtagggatggaggtggacagggggagctgggtgtgaagcttagggaaaggtgatggctgaggggaagaagggaactgagagatgctgggtcgggtgatggaaggagatgaaaggtgggggaaggtgaccaggccctctggcgggaggggaggttgggtcccagtctggccgcaagccgggccgtgggagggagacaagctgtggatcctgattataaatgcagcttctgctacccccgtgacaggctcggagggagagaagggggtaagggaggtgggaggttgggaggaaagcagggagaatggaggaactgaaggtcaagggaaaactggattcaggaagtagctaacttctgaggagttgcagaagagctgagtagggtttgggagaattctccggaaggtgtttcaagacaaatggagggagaaaagagggtgggacggcaaagaatgagagagagagactgggggagagaagggagagatccagtcaccaagtgtggaggggccggggcagaaaaagtgggcaggcttagggggaaaaggaggcccgcccttcctgggaggaggcggaggggggaagagggaggggaggggcggcgtgggccagggaggtctgacacacccccacctcccctagatacaccccctactgatccgggaccggaggagcgagtccagtcgcaacaaactgctgagacgcacagtctccgtgccggtggaggggcggccccacggcgagcatggtacggcggccgagcaggctctcatgacccggacaggcgcggggagagggctgaagatggaccgggctggcggggcgggggcgtcggggagcggcgggagctggccgggggcgggagaaggcggagacaaagtcttgcttcccgaggggagatggcgccctcctctggaaggtggagcgggacaggggctgtgggtgagaggcccctgtgggtcctcgctcggcttcgctccctttctcctctccagcagtgaagtttgactattttcctggtgcttgtaaaaatagtctccttagatctttagcttccagtccgtgtgttcctgcccctgcccctcccagcccctggtctgggatcttggaaagaatgacctagttcctgccctccccccagacctcttccccacccctatgctcctgattcttcttccggaccttcagtccttgaggtctccttttattaccccctgttttctcctctcatcagctgcttctattttctgcaattgtatcaccctttctctttcctccctgatttctcttattttctgtacccctcttgattaccccgtccctcccctctgctcccggcgaaagtccatcagactcccatctcatctcctttctgtctgtagagctatctgcgcggtctgtctctccaactctctccctctctccatctgtctcttcccctccctccccctttctgcccccccaaccccctctttagtcatttaaaaaaagatttttgtcttcctgagaagttcgcttaaaaggtttccatgggaacagtgaggggagatgaaggcagagaacagagatctgcagccaaggtgcagagagacgccctcagcccccggaaaccccctcgtcactgcccccttccacttcatttcccttcccggacctagcgatccaggttccccattcctccaacccccaggtgacccctttttcccaccagctccccctcccttcaggaattcaagctaccagtttctctcccttagagagccagtgacctgtccccatcctttggctccttccagccttctgataggtccaggccctactagccttgtgggccggtttggggaccttgggtgggtgggtgggtggtcagggatgtgtgtcattgtcatggaaaccccataccatcggggtgtgtgggtagcacatctctgtgaggcaaagtcaggtggtggtggagtgtatacagagaatgtgtgtgatgtctgtcacatctgtgtgtatatgtatatgtgtgtatgtcatgttcatgtctggggaagatgtgtgtgtttgtgtgcatgtgtgtacacctgcgtttccaggccagaatggtcacatgctcacagagcatgtttatcatgtgtcctgtggttggcagatctgcccacttattccccatctttctccttatcctgagtcctcagggtctaggggtctctggcgggggtctcccgtgtgttttgggtggggacaccgtgtgtgtttggagttgaggtggcatgtggaggttgctgtattggggttcagtaggggctgggaggggttccaggggcatatgtatttggggggagggcttagtgaaagttgatgggggtgaacgtttagggtcttcaggcagacatggaatgtgtaaagggcatggaggatgtgcagtggacataggggtcgttgggaccttggggacttggcaatgccaaggtgtttgctgaggctgtggactctccagcccgggagaggtcgccggacctttgaggggcattggaatcctgggctcctcctctgctgggtggagccgcgaaccctcgttctctccgcggttttgtgtgtgtgggggggtcctgctcaggaggggatggtgggtggcctggtttgttttgggggtccccttgcccccctcccccgtctctctcgcgctgtctccgggcgacagggctcgtgacagaggcggccacggcagcagcggtcgcctagcaacggcggcggggcccgggcaacggcggcagcggcgggagcggcggcggagggagccgttcccgcggccgtcaccgcgcggccgtcccggccgtcccgggccccgccgccgcccccaccgcgccgggcggcgcgagccgggccgtaccgccccctctccctccgcaccccgcccttcccccgcgcaggggcggggcccctcccccaccggggacacccctggcccccccggggggcggtgcgaggtaagggcggggccgggcggactaggagcgcgcgtagaggggggggcgccgcgcgcgtggggcgggggcgcgcgtgtgcgtgggcgcggggaggggggtggggaagccgcggtggcggcggcggcggcggcagctgctccctccgcatgttctcgctgcatcttccgagtggggggagttatggtaaccggagggggacagcggaggacgggagggtcggggaccggcctcgtgcggacagggtcttgagcacgcgggggcggccggtgtgtgtgggatcttggagcccctggtggaaggggcagcccgtgtgtccgcgtgtgtgttcgtgcccatgctcgtgtctcctgtgtgtcggtgccatgtgcacacgggggcccagttcctcgtgcacacatgtgcagccatccttgtgcaagtgtgtcctgtcttatcttgcctctgcctgtttcctgcctagggggctgttgggccagccacgggcttgtggggcagtccgcggccttgctggtccatgtcacctctgaccctgagcatgcatatccctggctggggctcacctcctgtcaggcttctgtgtgtgggaatgtgtggccctatgagcaggat

SEQ ID NO: 11286 - DNA, 6000 bp, Homo sapiens; identical to SEQ ID NO: 1196

SEQ ID NO: 11287 - DNA, 6000 bp, Homo sapiens
ctgggagaaagtaaatatgaatgggtgctaatcttaaacacacccttggacaaaggcaagacagacagactcagacctcatttgagttctgagatgggtactctaatccctctaagtcatgccactgaatgaccttttacacactaagatagcactttttccacaacagaccatgtcctgtgggtgtgtgaggtgtggcagaattggggaaatgataatccctgtagatgggccagcagaatatttgagatcaccttcagagcaaagaaaacgcataatctccccaaacatcatgacttatctgactggttaaaatgagtatcactgtctttcctccgtcatcttaagtgcatcacaggctttatattttcagacctttcatactaactttctgcctagtgagcaatgactcatacaaagctcagtgtccattggttcttttctcagactctgtccaatcccagggtcacagaagactacttgggttcatggtctctaatatttcaaacaggagctccctttagcgagtccttcttttcctgactgcagctcttttcattttgccatccttttccagctccatgatggttctgcaggtttctgcggccccccggacagtggctctgacggcgttactgatggtgctgctcacatctgtggtccagggcagggccactccaggtaagagccgaactgccattcttggagggtctggctcagggaacaattcctaggggacgttatctttaagggatcaaattctgagacaggctgcgggggctcctgccctaaggcagtgtcctctcttcccagctagagaaagaggttcatcccctataggatagcttgctaccctactggcctattctctctccaaggacatgggtacagtaaacagagagaggtgcccagtggtcagtgtctttggggaaaatgggaccaagaggtcctggataaccttggacagacaaggtttgcagagagagaagttggcaagtgcaggctcctgggcgtgttcatgtctgcatccagcctggaggggactcaggcagagagccctaagctggagtgtccaggctctgaggatcactgaggattcagtgctcacgaagaatgcctcttattccccagggtggagcaggagcccacatcccttggacaattaaggagagaagggagggagggggataggttttagcccctgaaggcattctcattaaaggtacttctcccagcctccccagaacttggttagggtactagagtgggttgcgacttgtaggaagaatgagatgaggttgtgtgggtgcatgacagggattgagtgtaggttatcagacagccaaggaagcagtaaccaagtgaaaaatctcttcttcctgctgcctccctgtggctggtgtaatattatggcatctatgatccattgtttttctctcaggatactctcaggatatttctttttatatatatatatactttaagttctagggtacatgtgcacaacgtgcaggtttgttacatatgtatacatgtgccatgttggtgtgctgcacccattaactcgtcatttacattaggtatatttcctaatgctatccctcccccctccccccaccccacaacaggccccggtgtatgatgttccccttcctgtgtccatgtgttctcattgttcagttcccacctatgagtgagaacatgtggtctttggttttttgtccttgcaatagtttgctgtgaatgatgatttccagcttcctccatgtccctacaaaggacatgaactcatccttttttatggctgcacagtattccatggtgtatatgtgtgcattttcttaatccagtctatcactgatggacagttgggttggttccaagtctttgctattgtgaatagtgccgcaataaacatatgtgtgcatgtgtctttatagcagcatgatttataatcctttgggtatatatccagtaatgggatggctgggtcaaatggtatttctagttctagatctttgaggaattgccacactgtcttgagataccatctcacaccagttaaaatggcgatcattaaaaagtcaggaaacaacaggtgctggagaggatgtggagaaataggaacacttttactctgttggtgggactgtaaactagttcaaccattgtactctcaggacatttctagtccaaatttacaccaacactctgagaggaaggactgcaaagtaggtaccttagttttccactgacttccacttttcctgcttacacccttcctcctagacctctccacacccctcctaggacacacctagaaggtactgacatcatgtcacctcctcatctttcagggtagcaaggttggaatctcctgaatacagcccctcaagccctaaaacctcttatctattaccttgggttcattgtccaggaaggggaggagaacttgaacttgtagtcacagaagggtgctgagaactaaccagcaggacggctcagccctgggaactgcagaggggtgaggctggggagagaggaggctggagcagcactggtgacactgaacagtgtcaggaggaagtgacggatgcagcgcccccatcccataggcagagctgtcatgtgggatgagggacagtgttgggagccaccaaggaaacccagaggtgggggagcagagagcagaagggggcatgtgatgctgggcagtgaaagggaggacgggcaaaggctgggttgaggtttgtagggggaatgagatgaggcagtggagccatgtgacagggactgagggtagattactggagctccctgcgtagaatgaatgttcaatcaaaacctgctggagggagagctggagccataggggagtgggtaaagtgggcagggctgattccacaattccctgcatgctcccccaactccacacacatccccaacctcaaacagggcacaagaccaaagggctgaggagccaggctatagcttaaagaggctgggggagaaaagcttggctgagacaacccatagggagctagaggtttttaatatatcctattctgaataagagacgaattcattcagatcagtggtttcaaaccgtgctctgggcaactcaattgctaagggttccacaaacaggataaagtttcttatatacaaaaaaaaatgaaggtttcaaattacaccataaaacccctcattgcttatgtctacttggcaggtaaaattccatttcaaaagttaaatgtacttaaaaaattacctaagactgggtaaattaaaaaaattaaatgttgcaaagaaaaaattcaaaattcttattcttgaatgaaaaacgttctcttactggtgattgaggaggagaaacaaagactaacaaatgaaaatgggagaatccacactcagagtggggcaattgaacaggcaggggcggatggatggcagaggaggaggaatctggactcaaggagctggggggctctgggcctggaattttagggtctggggcccaaggcaccaggagaagaggcaggtcaggatatctgagtcaagacctgggatcttgccttagcaatgacactggagactaaaggtggactccatggtgcccttgagcccagccctaccccatctccactatcctctgccaccagctgtgcaacttctgctaggggtgaggttaataaactggagaagttaatttgtggagcatgaaacagatgagcagaacaatcacagcaccttaatttccccagtgtgcccaagaacagagcaggcctgaagatactcaaacagaaacaaacatgtgccgtgtcactgataattctgtgtagacacacacctgccagacactgctcatggcactccctaggaagaacagcatgtgggaaaggctgccaaaattgttcatgtaaaaattacatcaatgctgtcttcctcggtgctgcctatgcagctggcagccatctcttcctccacatcatggcctccctcagactcctcatgaaggataagatcctcaaaaagaggaccaacaagttcatgaggcaccaatcagactgaaatgtcaaaattaagcataactggcggaaacccagaggtcttaacagtagggttcgtagaaggtccaagggccagatcttgatgcccaacattgcttatgggagcaacaacaacaacaaaaaaaacatgctgcccagtggcttccagaagtttctggtccacagcctcaaggagctgaaagtgctgctgatgtgcaacaaatcttactgtgctgagatcgctcacaaaatttcctccagaactgcaaagtcatcatggaaagagtcacccagccggccatcagagtcaccaaccccagtaccagggtgcacagctaagaaaatgagtagaaagttcatgtccacgttttgtgtgtaaataaaaccataaaaactgccaaaaaaaattacatcaatgcctctaaacccaaaggactctacccccacaggtccctggttgttgtggtgattttcattgtgtaaaatactttccacatcttttgacaccaagtctttctgcagccatgtttgaaaattaactttcaggctacagagtctttcttataccaaagttgaagaaagttttaagaaatatatttctacatctcctacatgcaaaacaacaggagcaagttgaggaattctcaagaaactggtcgagaagagagagcgcttagctatggaaaagagaaagaaggaagggagggcttcctggaggaggtggcatttgaaccaggactgacatcaggatggaaatgtcagtcagggagttaagtagggggagcagctccgccctccacgtccccagctcctcccgcccctgttttttctcccagtgaccccacgtgaaacgtctccgcctcctccagccaccagcagaagggactgccttcccctcagtgctcgcccctccctagtgatcactcagtgcccctgagctcattcttttcagtaaattctctctctgcgtggtgagaaaacaggcctggagaggctctgcgacccgcttaggaccacagaactcggtactaggaaaactcctattttaaaatccagccctgggtgggaagatttgggaagaatcgttaatattgagagagagagggagaaagaggattagatgagagtggcgcctccgctcatgtccgccccctccccgcagagaattaccttttccagggacggcaggaatgctacgcgtttaatgggacacagcgcttcctggagagatacatctacaaccgggaggagttcgcgcgcttcgacagcgacgtgggggagttccgggcggtgacggagctggggcggcctgctgcggagtactggaacagccagaaggacatcctggaggagaagcgggcagtgccggacaggatgtgcagacacaactacgagctgggcgggcccatgaccctgcagcgccgaggtgagtgagggctttgggccggcggtcccagggcagccccgcgggcccgtgcccagggcgcaggagcagccgggttggcctaagggaccttagtgccgggcggaaaggggactttgggttggggattcatggggggagcccatctggagcttgtcaggggagcgagcgcggggacctggactgggctgagcatggagtgaggaggacgagagcagagagacccccgggacttcatcaggcctggcagctgactgcatgtggggtgaaaaaaggaagccacaggacagcgcacaagggtatggtgtggagatggaggtggagatggcacagcaggccacacagagaagaaacctacagggaggtagctgggtttgaggtgcttgaggggcagatgggtggtctgatgggcaggtagacagaagggtctgcagccggggaggagactgagatacatgagaccatccagggagaggggacccagggggaagagcaaaggaccggatcctgggaactggacagttgtga

SEQ ID NO: 11288 - DNA, 6000 bp, Homo sapiens
cgggtggaccatctgaggtcaggagttcgagaccagcctggccaacatggtgaaaccccgtctctactaaaaatacaaaaaattagcttggcttgatggcatgcacctgtaatcccagctactcaggaggctgaagcaggagaatcgcttgaacccgggaggcaaaggttgcagtgagccaagatgaagccattgcactccagcctgggcgacaagagggagattctctcaaagaaaaaaaaaaatttatgttatgttacacttttacccatgaagatttggatgactcataatttaataataggatatataagctttcacctctgggtcactgactctagggtgactacagtagacagtcattttaggactttatcatctagcagctgttttgttcacaatctgtagaagaaatgtgttgcttgtatctattaatactcattggacaggtgtatacattccaagttatatgcatctgccaatctctagcacttttaggcagagtggtggaatccacaacagctgtcaccttcagcaagcccctttggcatcctcatgtctcttcctttcttcatctaaagtactaaatattaatatttcatatttatgacagatttttctgtctaaaccaaatcataaaagaaaaatattggtggaagatttctgaaatgaacatagtaccattctgtgaaacaaagaaggcaacagataatatttcctcctaggaaaatgtggtaaaggccaagtcagctgagaaggccaatacttaggagggttaagggatgtgcaggatattgcagacatccctgggactacgtactttagccatattcacacacgcatacacaggtcactgggaaatgtacttctgaaatgaatgttccagatttatgtacacgagcaatataatatgaataatataactatctctgccttggatttagagctctaaatcaacatatactgtggtgctaaagattcataatctgtcagctcacctcttcaccgtggcgatcagaaactggatggcagctactgcactgtaaagttattccactaagatgggctgcctagccacagtcatggcaataactggagaagaactatgttttgaaaaacaaaactataattttatacagagcatagaggtatttaagtcaccatctaatttgctatgtctatattgaaatattgatgacacctaccaattggcctttgtcacagattagtccatggcactgctgaaaacatactgtctaaaaatccatattcctatcttccaagttgacatcttctttcaaagaactgtgcatctccttttacaaaaatattcagttaaccaggcaatagtccaactcacatttaatatgcaatttaatgttggcataaaatgtttaatagggactcttttattttcttaaatgatgttaaataatgcactatgtggcacaaactaaaagaaatggtggaaaaaagtcactaataactctttatctcaatacatcatttttttcaaaaggtcttaagaaccctgaaagtttaggcttgacacatttgcttctgtcaaacctaagagaccttttaagatgagaaagaaagcactcactatgcccttttgatgtggttcagtagggcaacaaaataaccatgcagtttgactttgttttgctttggaactggtgggttattacaggttgtctgcaattacatttcattgatgaggaaattaaggcatagagaggttaagtgacagagaaacacaacctttgagtagagggaccatagaattgacacagatcaaaaatattacaaccacaatcctgtatttttaaccaactaaaaaaggctattttatgtataagctcaaagtttatctaagctcttaaattctaagtttaataaccaacttagcaaacctgttacttttgtccgctttaagccctttgtcttttgtcttaagtatcaagaagctcagaatagaatttagtgccaatgcagaacaccacttcctagccttggtttctggggcaatctcaggcctttcaaaaattcagtaggttttagttgcccatctgttatataccagacaacgctgtagatgctaaagatacagacctgtacaaataatgtgaaaacttctgtcttgacttaattacttaagtgtaagacagagtatgttagtgctatggagaaaataaaaagcaggaaaaaagagagagagcgtggggtgaggctcaatttttaaaagggtggtcagtgaaagtcacagggcatgacatttgaatatagccctgaaaaggagtgcagtgagcagataagagggccatggagggaaccttcctggaacagggaaaaccaagtacaaaagccctgaggtgaaagcatgcccggtatctatgactcatctttttgttgctgtttattattttaaataatgtatattcttctttttttttgagaggagtctcactctgttgcccaggctggagtgcaatcatgtgatcttggctcactgcaacctctgcctcctgggttcaagtgattcttctgcctcagccttccaagtagctgggattacaggcatgcgccaccatgcccagctaattttgtatttttagtagagacggggtttcaccatgttggtcaggctggtcttgaactcccgatctcaggtgatccacctgcctcagcctcccaaagtgctgggattacaggcgtgagccaccgcacccggccaataatgtgtattattatttattgaaagtcccagcaaatactttggaagaaggtcaggcacatacatacaatcagaaatgctgcagacaagcttcagatactgtgtcactgcagaggagtttttagtggttgtactgtacactgcaatgaccacttgactatgtccctctgtctccctactaccattactaaaacttcctaaaactaacttatgaggtttaataaagaaaaagaaaactgctttggggaaagggcccaccataaggaaatcaaactgctaggtaaagtaccccaagccacaatgactacctcccttgaatttctggaatgtgtatccagcatttaacaggaagtgctatctggaattgttactctattgacatctcatcccatgctaccttgtattgttcttttgtacacatctgctctcacagtgacttccctggaggcgggcttatattttggaaatgtctgaatcccatcgcagggcagcgaaatctgttttgaggatgatgatacagaaactaccacaaccagcagcagacattcctcctgttttaagaatctctgtagataaagcatgaaagaaacaacagtctctcagaggcttttaaataatcccaactattttagccaacttactgtttatgtaacataccgttttaagtctttgtttgcatttttagttagggactgtacacactttcagtctagacccaagcatgagttagccaaaaaacatagaggaatcacatggtacggagccctgttcagtttgtcccagccaatgttattaaaaacactatgatgggcaagggactcaacatgaagctaccacatatgggactctaagacattgtccagacagtctaacaagacaagcagacacgaaagaaacaacttcagtgcatgtaagataatataagatactgtgaaagtatataagcagtgacttggagggtgaggcaacgcttcacagaagagttggcacctgaacacacagggttttgaaagatgaataggcctaggacaattggacacaggatcaaagggcatccaggattgtgcaaaacactggcagaaacatcacagattgaaaactgctggaagaacgcattcaccgtcagtgaaggaaagctggtctggtgcactctcaagctttccaagaaaaaaaaccaagttttcaaataaaagcagaggaggaaagtttcaccagtgcttgttctgagaaacctcttagcctctctttgctttgttttgctctttctgttttgcttccctcttaaagagtgctggcttaaaacctcagtgaaagaaaagtacttcaactttactgtggaaaaaggaaactgaaaagtaggcaaaggccaagggatacatttttttaaacattcactctttcctggaatatacaaatgaagcaaaattacaaattcatgtattatgggtctgaaatatttattccaattcttttctccaccagctccataaatatttattctatgcccactgcttgttagtttctgggataccaggccgatgaggcagtctcttcctctcctcctttgagcaagcttgtgcttgcaatcctgtataagaaataagaggagggcaacaacttgtatcttgtgccttctacacatgccaaccatagcctgaagttcacagcaaagttaaattccagttaagtaaaccagtgaggtcataatacacttaaataacaactgagacgtgagaaactaacagagatcctcagtaagtgtgtcggtcacctcttcgcgcgagcagggagatcagatcgagagcaggacctcctcgccagtgatttggaatgataaatggggaagagaagggggtgaagttacctgggcgctcaggtagactttgaggcactcctcgcacacggccttcttgcagcaaggcaggggcttgatgggcttgtcttccaggcacacccggcacatcagcaccatgaggggcacatagggatcccctacaccgcccaggccagagtagggtggagctcccaacaggctgggcatggagaacggctcgggcgccaggtagaactccagctcgatgctgccgccgtcgggggagagggaatccgttgggagggacagtcgggggctggggaaggaagagcgggtgctgggagggttcaacactggcggagccccaggtggcgacgcgggcggcgagagctgctccgaggcgggggcctcgggcaggtcgctctccacgcagtacacggagcagaagacttgtctcttggcgagggacgggcgccgctgacccagcacgtccaggaccagtccgtcggcggcccccacgcgggtcctgggctccagctcttcgccggggggcgcctcctgctgttcatcccctccctcttttcgatccccagcttcctcctcttcctcctccagctccaactgcagtggcaaggtctggggattgagaggcccggtgagtgccagtcccgcaggctgcgccggtgctcggctcttactccagcccgggggccccaggctcctcgcgggctctggggcgctggtgtccgcgcagccccagtcgcttccgcagccaccgccgctcggctccgcggaggcggcgcgcagcgggggcgcccgggcgctgtccccctgaggcctcgggggctcagggtggcccgcagtgccactggccagggtctgcgactcctggggcccgccgccgccgctcaccgtgctctgctcctcgcccatcgccgcccgcggcccgcgccgccgctgcccatccagccgccgggacccccacccggcgcccgcgggcagcgggggcagtggctcggctcgactcgcggctccgcttctgcttccgggtccttcctcctgggctgggacgccccaagtcccctccggggagcccgtgctccgaggctgcggcgcgtggggagcctggcccggcccgccgctcctcctcgtactctggcgcggcggggcaccgcctcgggggcgccgagggccgctcgctctgggctcgggcgcgcccgccccacatgcagctcggggcggcgccgcagccccagcgagccccaggcgggacagaggggtctgggaggagacggccgtcagtcccgcgccatcaccggtcccggctgccggacgcgcggcccgagggcggtggtcaaagggtcgaggggcctgtggcgccgccgcggcgcgcaccaggaggtgcagccggagcgctggccagccgcagggcccctgggggagaggccgg

SEQ ID NO: 11289 - DNA, 6000 bp, Homo sapiens; identical to SEQ ID NO: 1198

SEQ ID NO: 11290 - DNA, 6000 bp, Homo sapiens
tattttctggatccccatcatagttctatcatttaccagctctgtagcttccggaagactatgtagcatttctaagcctctgtttcttcatctacagtgtgggtttatggcggggactaaatgagtttatataggaaaacccggcaagtcgtaagcgctcaatagctgttaatcactaccactaccattattacaactgctaatgttactgcagtttttgtaaccagcctccatatcgatcctaaatccatcagtaacaataactttccttaaaaagaccattctcaggccagatgtctccaaatagctaccaactgtttgtaatatcatgtcttaattccttccaaatgatgactgagtaggctcttctctggttgcctgttgcctgcccattctgtcttcctagctcattacgagagaacccacccttcccaatggccccggggcaatccaggtgtacatctctcatctgagcatgattttttttttgagacggagtctcgctctgtggcccaggctggagtgcagtggcgtgatcttggctcactgcaagctccgcctccctggttcacgccattctcctgcctcagccccccgaatagctgggaatacaggcgcccgtcaccacgcccaattaatttttctatttttagtagagacagggtttcactgtgttagccaggatggtctcgatctcctgaccttgtgatccgcccccctcggcctcccacagtgctgggattacaagcgtgagccactgcgcccggccctgagtataattattaataccttccctttcactctcaagtgtcctggcatgggtgttacttgtttcccatttgcttagactttctgctctcggtggaaaaaccatcacacacagttcacttgctctcaccttcaagttatttccctcctctagaatgctgtacttccaccactgccaaatcgtgaactttctctccttcaatatcccactgagaactcacccccaggatgggactctgctcaccccgtcctctactcaagcagaagcctctcagcgatcatgtaaataactgtataactttaattggctctgtttataagcctcttatatctttttttccctctaggtatttttccatgtgtttatcctgtctccattaatttgtaatcttccagagggcaaggcctgaacacaagcttctgttggtgtaaagtggaggcacaggtaaggctgattgctagacactgccgtccttctttattagtaatctgttaaaaaaaaaaaaattctttgttgtagtgttttgttagtgatggtcccgagactgctaacctaatgaaaaactatatccagtgtctgctagtgtccagacaaaagaaaatcaacagttacaagcttttcataacgtgaggggaaagtgtgcggatattttgacccataagggaatttatggtgtatggaaagcatgttatagaatttgttgcctttagatttttattcttgtcttttcaaggctgcaggactgtctcagaagggaaataatatttaccttccaaactgagatctaaaacccgaacaaagcctcaggaaacatactccaccaccatcttacaagtttgtgctacgggtggagggaaaatgaatctaatgtaggaggcctcccgctgtgcgtctagcaggaaagaccatacggtgcaagtctccaggatcactagaggggtggattgttcatttcagtccaggtagcaacaggaagcccgtgcaaatgttcctctctcactgcggggctaaggagtgtgggtcctttcccgcgactacctgcttgcctctctcagaacctgcaagtgaagtgcggaagatctgtctatcttctcggcggcgcagagcccaaggtagaaaccgatggaggcggtgcactagataacatcaaagccccgggcaggggccagaaaggggggcacaggcagcccggggaatgaagcgcctccctctagcatttcctctcacgcccacttccaacctaggaggcttttggtttctgcttttttgtttttaaaattaaaagttaaacccaggaagctttggatcagacttttgtgttgcagttcgggtaagtttttctctcggttcttttgtctggcgcctggcttgggaagagcctgggcgtggggcagagttggcagggcgtgcggggaaggttttgtcgccgggttgcccagaggaggaggggattcggccggtggatgggaaagcccagcgcgcgcggagggcggagggcggagggccgaggggagggacgagcggcgtgacccggcggccggcggggaggaacctccgggatctccgcgtggcggtggcggcggcggcggcggcggcggcgctgccgggccgcgcgctgggcggagggccggggccgcggggccgcgccaggggggtgcctgagccgggcccggccgggcggccgcgtgggaacccgagccgtggacgcagcggcgggggcgggcagggtggcgcggggcccagtggacgcggctccggggtggactttgtgccctctccaaactgttcgccaagaaaaacgtgtgttgagcttttcagtgacactatcctccctcgaaccccactttccccaaggggggctccagaagcgttcacgcggacggtggggatggaaccatagagaaatggacctccaggagccccctcttttttgggggcagagaatggtcacttgctcctgcattgtcccaggatttttgacagttgaaactgcagtttaccattcacattcatcctccacattcaccctctgcttcatttttttcccacgctgtgtttatttgatacattttgagaaaatatattggatttgccacaaaacaagcctaaagaagctactttatagtatagccaggtttccctgcatcctgatatctgggaagaattgtaggcagaattaggaaaagaaactgcatttagaaaattcaaaaacttactaggaaactattctgtattgtatatatttcaaataaaagtttaatatcggtttgctgctcaaggaaatagttgaaatgtcaaaatttacctatcgtaattcgaaattgcatgtatgttttgttagaaagttcgtagtaatgctgaatcctacataaacattgtgttgacagtatgttgtgctcaacaattattgggttaaacgttattcattcagttagcatttttcacttccaaagtgatacaaacttcactcattatcacattacctttctcctgacagattaatagctatacgttcacagttaaatgcatgtttacttttggattcaaataacccagttgggaagttacattatatacttttttggtgattgcaacctattggatatcatttcatttcacaaatgagagatggttatagcacaatgaaaataaaaattgcattatttcatcgtagggttagcattagtatgctagacataattgtacatgtacacagttggatgatctttgcttttataaccaaatttactttgtagtaggcatatttctccctttacatgatattatttttggctacacactcgccattactgagtattccatttttaatcattcccattctggtggtttgagcttttcttagctcaaatgagccagaggtacgatttcctcaggggaattttaggggtcaactccagcaggaaaaacctagacgtcgttatggaagcccaagggaacaaaacaattcaagtttgcacagatggccagctgtcttagtggttgtatggtcgtttagcatttttattccttaaaaggggaaaccagtttagtttcatcagggatttttttttttttgcatcaattttgtttcaccttattcctctcaagtttgaggtggcccgttaaaccagccacttttgcttcttgaggtggacctgtggaatttctgtgccccaaactgcgaacgttctttaggtctaaccctgaaaaccttcgttaccctggtccagcccctcttcactgctttgccatggatttccactccttgctttctctactgctttctagcagccggggtcacaccttggttcatgctaattactccctcttcccctttcacgctctcccctcttccctggagcccggtccgacgaccagccccgcaccccccttttctgtccccgaagtcccctcccgggttggccctataagctgtcaggctggcaggcaggggttaattgcgctcgcagcttcggcactgggaagcaccagcggggctttggagcggcctctggaataaccttggctttcctcgctcttttaatagaacatccgccaccaaaaagtggtttcagttcagggttaacatgtccccttccactctccaaaccaacaccctgccccctccgtttttttaaaagttgtttttcaaagttaatgagttttaagtttcacaatgactttccccttccttctacgcgttgctgaggaaacccccttggggtccccccccccccccgcctccccctcccccattctgcccgggcgaggggcggggccgggagaccccatgacgtcagcggccggcccacatcctgctgtagaaagtaaagagacggtaaagagaaactacggccccgcccgtcccgtccctcttcccggaccaaccgcccccaactgagcgaccccgccaggccttcccggggccgcgtgactggccgggcccgcccctccgcccccgccgtgtgctggttccccaggcgtcgcgacccagggctcccgccccccgcgtccctaaccccgcccctcccccccgggctgcgctgccacctcctcccgcgtccccctcccgtccctgcggcggctcggccgggcggggcggggaggggcgaagcggcgggtaggtggcggggccggcgcggtctggggcccgccccgccggggagacccggggcactggctccgggttcgtgccgggccgggcgcccatccagtccctacacccggtcagagctggcggccgcgccggcccagctgggccccggcgcctgggcgtcccgcgcccctcgccccggcctcaaccccagcccccgcggggacgccccctcccccgcccacgcgtcgccgcccgcggcctcccctcctcccgcccccggggatcccctgccgccccgcccacccgcgggaaagcctccgaccttcgccctgcctcccccgcgccgcccggcccgcgttcctcccgccggccccaaagacgctaaacgtgccctactctgccccgggggagaggtaaagcccgcgcccgtccttcccgccccgggccccgcggccccagggtctgtccgcccgccccgccgcggcgcgcgccccccagcccggctgcccggctccctggcggccgcgatcatgccgtggctccgggcgccggcgagcttcgccgcctcctccgcccggcggctgcggcccccgcccgcgcgccccgcgctcccccccccgccccccggcccgctcccctgtttaatatttcagtgctgggtggtgtgagcgccagtcgccggccttcagcgtggcggctgctgggcggcggcagggtggcggacggagcgggggaccggggagcggcggccgccggaggaggttatgtttgtgtttggggttgtcaagtgaaggagggatcccaggcgccgccgccgccgccgcgcgggggtcgcggagatcccgagccgcggccgccgccatcagcagcgcagctccagggccggctgcagcggcagcggctccgccgggcgtcctggcagcaggttcggcgcgggctccgcggcgggggcgctgcagctggggagggcggcggggcggaggggggggggggcaggagcacatcccttcggcgggcggggggcgtgcgggcgcgcgtgtgtgtgtgtgtgtgcgtgtgtgtgcaaccgccgaccttgcagaggggatggctgcgtgcgggagacccttggcacttctgggcgccctcgccgcgc

SEQ ID NO: 11291 - DNA, 6000 bp, Homo sapiens; identical to SEQ ID NO: 2460

SEQ ID NO: 11292 - DNA, 6000 bp, Homo sapiens
acctggaggcggggttttgtcagagctggggcggtgcttatagaggaggcggggttttagggaccaaaccgaggttgctcggttgggggcgctacactttgagggtgagggggcctggagcgactgagggtccggcgtttggccgggatcccggaaagcggcgtccctgggggtgtgggttttggaggggttcctgaggaactggattccgagcttgctcgcaaggcgagacgttccgtggaggcggagtttacgatgtatccaagtctgacggccccagaaacgggtgtgcagggcgcccattgggtccgcggtatgactgcagaaagagcctgggagatcgaggggcgcagagtggggccggaccaggggcgtttttagggatcccagtagttctcgtggtgctgcgcggcgatgatgatgactacggtgaggatggtacagagcaccatggccgcgatgcccacggccagggagatgaaggagaagttccgggcctcgcgtgaagcgatctcggccgacaccatgtctccgcgggccaaggccgtgcgcacctacggaggaggggtgggggaaggaggtcaaagagctgcggcctcgttcgaacgcctcagcctttctctaagatggtccccagaacgcccagaactccctgtccccgcccccaaaccgagtatgcccctgccccctacctgcacggccttgaagatggcaatgatgccagtaggccagaagcaacagatggtggtcagcaccgcgatgggcatgtagtcgtgtggcgggcgcctcggctccagtagggccagccctgggccctggggcggcggggggagagtggaggtcactcctgttccccccggggtcccgcctgcatatggctgtggaaggaaatttggggggcaggggcatcactctgaccctctcccagcctaccagcgttgggcggctggcagagtggctttaaaagcacaatttttacctatggcttctcaaaataaagcacccattacccttccaggacacccataaattccacctaagcccctctcctcccttccttgcttcattaaccaccatattcttgggctttctacattctctcccgcaaggtatggtcccactggggctgtcctggcctcaggtcagaccttctttcttccctccagacacctaccaggcctcccctacccccttagtcccaggcttctcccacatccctcttggttcccagcttccattccccccgtcccccgccaggcggtttcctactttcagacctcctctgaacctctaggctccgatccccctcccaggccctgactctgggcaccagtagactcctactcccgtgtctctccctagtccttcctgtctcaggctcccttctttctagggcttgtcccgggaacactacctgttccctgcccttgttcctctatcctaccagcccccagcgtatccccaatttcaagtcctgtatcgcgtccccctctttcccatgtccctgtctgcccggcactcaccgtgcccaccgggtagaccggcacgtaagcagtgcaaggctgcagctgcagggggtatccgggcgctacgtagccccccagcggcagcgtgcccacagtccccgcgtgcgtgggcaccacgaagccaggggcctgggcagtctgggctggcgccggcgggggcggggcggcggcagcgggcggcggcgggggaagtgggccctcgaagcgagtctcctgcaggtaagggtcgggtggcatgcggggcaaggtagcgcagccgggtgggggtgccccggcagcagggccgggaggggcgtggtgggggggcctcggcagcgtggcagaggaggagggaccgcgctgagcggtggccgcggaagaggccaggccccctgcccctaagcgcgggagggtggcggtgccagactgatggtagtggtggtggtggtgatggtgtgaggaaggggctgcctgtggcggtggggctgggggttcggctggaggctgaggggcattgtagggcggcggagaagtgtgagggactgagtctgggagtcctgggggaggtgagtggaggagagtataagaggaaagatgacacagtgatgagttgaggagggggtaaggggaaacacagccggtcagggatggagaaagataatgggagagacacatagagagagacgggtgagaaaccatctctaatttgaggggcaagagaggggctgtatctaggccatctgcccccctccttcttccttccaatctagttttgaggtcacaactctggtctgcttcttttctgtctttttcatcaccatgcacccagctctcacctgcagacctaatcccctctcctttgctatagctgcctttgggctggcctatccgagctagtcctgtgtgtgcgtatgcgtagacatgcaaccctgtgttaatatgtgctcaattcaacagttgtataaacacatgtgggatgacatgtgttccactctgctgttccttcagtggggggaggagtgccccagcctctgtgagaatctcgggacctcttttagggcagattaagaagagccctctggattttgctcccttgacaacccccatctggtcatgtctccatatttcctcacaggatgtctccatgccagccagtgattgtccatctgtcactcccaatgatgccatccctgcaaaacctggctgtacctccttcaccctctcaacctacccccctgaccatgttgttggcaaggggcagaggctgccactggaaagaggaaaggaagagaaagggggagacagaaagaggagggggactgggggagtgttgagagctggagagaaggggaatgaaatagaaccacagctgaggaggggtaagggagggggttggggcaagggggacggagagtctggagacagtggagggggtgggaggttttgttattgtttttacctgacttttcggatgacatgcctgcggtctcgctgggacagggtccctgcagccggagtgggggtcctcggccggtgctggagtctgggtgctggatggcgcagccggcagcagcgcagagatggagagatgaaggcagcggcggggggggggggcggggggggcgggcggagggagagcggggagggggggagcttaaagggaccgaggcgagggagggggagcgcttcagatgtttcccactcggtctctctctgctctcggaccacctctctcctcctcttaccccggcattcaagcccccagtttgggttcctttggagttgtcatggaaacacggaggctagaccaggcgaggcgggtgggactaaggaaaggaaggaaggagaactctctggagtctcccccaccaagactcagtgattgtattgtgggaggaagtgaacaggttctcagtggagttaataacccaggtgcctccagaggcaggtcgtctccccctcttagctccctgcaaggtgccagggtcttctcccaaatccttggccccagtttcctcctctttagaagagataaatacttgtgtgtgagagagaattgtgcagagttcagaactgcgatggtctgaaaagttcccagggtttggtgaacctaccaacctagcagtaaagagggaggcccaggtctgtaaatcagggggagctgggccttggagggaaaagggagagagagtttgggcggtgtgcatacataccttcttcgtccaggactaaggagctgaagctcttttggagggggtagggggtatgacttaactgctcatttctggcagctctgttggtaatgtgtgcttgttcccccactttccctttgcttttgaggctgcttagagtctctgggctggtcaatgttcagatccattccctaaacccccctactcccacccaccacctcccaccaagacgcatctccagctcctgagtcgacctgcagtacagcgttattagtctttttatttgcttattgcatcttgggagcgcgtgggtgggtgaagggagcgaggataggaagtctatggagatttacaccagtttttttttttttttaaacaaaaacacagccagataattattattcttcccttacgtccccccagcccccacctggggcagtcgctctcccggctgcgtcccttttcgtccatgtcctagcagagactacagagcagtacagaggctctcgctgaaaccagtcccaggctccacagagtcagatcacggcttcacaccagtcgttctggtcacttaggcgttcgcgtgagcgctcaaccccttaccgccacctcatcgtcactctacaccattctgagcgcaaaaatgttttgattgagacaaatttagaccaagcaatgaccttgtaaacagagagaggggctcagacatgctgagaaatccttatctctagagaaacgtctttaaatgctaagtaaaagccctagcaagtaaaagccctgaggcactagggtgtcggttaggggtcacaggcggagaggtggggcgcctgggggtttcggtagggagccacccacagataactcagacagccagattctgggggtcgttcaggttgaaagactggtcgaaattacgcgggcatgagtcagcgcatccctacgcgccctccgccccttgagggtgggtcgcttatagggaggggagtagagtagggcaggagaaactgggccaggctgcacttagctcaaggggcctcgaggactctctgcgtctctggagacaagggcactacacgcacttcagaatgaagagttgtaagtcgctgacctggggcggactggagggtggggtggggtgggtgttgaggggcacgcccgggctggcatcagccctccaggccaccctgccactcacccagcacacggcaaaatgcagaggactacctttccctggtccgccccctggccgccccttggggaatgcaaacttcgtgttctgctgcggagccagacgcctgtattgggaagtggggagaatcaaggcggggaaatcggacttttgggtcgctgggggcaacgaagcctggagaggccttctttccattcccagaatatgtttgctgctttttcctctccccactggcctaaatggatcgctccgcctgtttcctccccagcacctagggcgcaatggaatattccattgcccctcctgtcctgggtctgtgttgcggggaacgctcgcgcggttgccagagaaagccccggacgtgacggatttgcgcgaccccaagcagcccgcccttccccctcccatccgtcattcccctgcgctctctttcctcacccttccccccgccaccgtgggttccagacttgggataagtaaacagcgggtggagcgaggcctacggacccaggccaggtgggagtctgcactcttcaaggggcctgggctgctgctcacgggtattaaagaactccgcgttgttcatggctgaggcgatgcattaggaagatcctggacctagagaacaagtcccccgaacgctgagttggaggcgggacttcgggtgcgcgttggtgcgtcaacgtggtgggggggtgtgtttgtagggagagggctggagtaagttaaaagtaggctattttgtgacacggacctggtgtgggagcgagaggaggtggcttgattgccgggcgtctgttccgagggaggagggtgttgccatctccctcacatgcccttatcacccctttctcaggcgggagcatgctggggctctgcgggcagcggctccccgcggcgtgggtcctgcttctgttgcctttcctgccgctgctgctgcttgcagcccccgcgccccaccgcgcgtcctacaagccggtcatcgtggtgcatgggctcttcgacagctcgtacagcttccgccacctgctggaatacatcaatgaggtctggcaggggacacctgggtgcagggcgttagaggcgtctactgtggcaggggagggagagcggg

SEQ ID NO: 11293 - DNA, 6000 bp, Homo sapiens
cagtggctcacgcttataatcccagcactttgagaggccgaggaggccagaccacgcagtgaggagttcgagaccagcctggccaacttggtgaaacccagtctctattaaaaatacaaaaattaggccgagtgtggtagctcacacccataatcccagcactttgggaggtcaaggcaggtggatcaggaagtcaggagttcaagaacagcttggccaagatggtgaaaccctgtctctactaaaaatacaaaaattagctgggcgtggtggcacgtgcctgtagtcccagctactcgggaggctgaggcagagaactgcttgaacccaggaggcggaggttgcagtgagccgaggtcgcaccattgcactccagcctgggtgacagaacaagactccatctcaaaaaaaaaaaaaaaatacaaaaattagctaggcgtggtggcctgcgcctgtaatcccagctactcaagagctgaggcaggagagctgcttgaactcgggaggcagaagttgcagtgagccaagattgtgccactgcactccagcctgggcaacagagcaagactctgtctcggggggggggggaaaaaagctaaatgcaggaactgacttgtaagacaaactatatctaggaggattaaaggcggagtcccttagctctaaaccagaagataaatgtctgaagcatactacccacaccaccccaccccacccccatcccgggacaaaaagggcaaaaataagtggtttcctctcaccaggaggtggcagtaggttctggtttgcccatggactcaagttttttgtagtggttactaagaaaagcaagcagcctgacctctccaaagagctgactttctgtgcctgacaatctgaacaaaaaggaaatggaaaaggaagacaggaactaaccacattctcttcagttacctattcactctcaactagaaaaatgacaccatttctggccgggcgaggtagctcatgcctgtaataccagcactttgggaggccgaggcgggtggatcacaaggtcaggagatcgagaacatcctggctaacacggtgaaaccccgtctctgctaaaaatacaaaaaattagccggacgtggtggcaaggcacctgtagtcccagctactcgggaggctgaggcagaagaatggcgtgaacccgggaggcagagcttgcagtgagcagagatcgtgccactgcactccagcctgggtgacagagcgagactctgtctcaaaaacaaaacaaaaaaaatcagccgtttgtggtggcgcatgcctgtaatgccagctactcgggaggctgaggcaggagaatagcttgaacccaggaggcagaggttgcactgagccgagattgcaccattgcactccagcctgggcaacagatgcaaaactccgtctcaaaaaaagaaaggagaaaagaaaaatgacaccatttcctaaatgcatctaggcaaaaaggtaaaggggtaggggagaaggcaagtaagaatgatcagcttgcattattcagggctgttcttcatatttgcttctacaattcttaagagttattacccttataactcttcagttatttgagcaagacaatgaatttgtctgcacaacttcatgcaagatgacattttaaagatcagaatttgggccgggcgcggtggctcacgcctgtaataccagcacttttgggaggctgtggcgggtggatcacctgaggtcaggagtttgagaccagcctgaccaacatggcgaaatcccgtctctaaaaatacaaaaattagccgggcgtggtggcgcatgcctgtaatcccaactacttgggaggctgaggcaagagaatggaatgaacccaggaggcaaaggttgcagtgagccaagatcgagccactgcactccagcctgggccacagaacgagactccatctcaaaaaaaaaaaaaaaaattaaaaaaaaaataagttaaagaaggaaagtagtaaacttacagcatttcccaggagagctaaacccagaagtcaaaacaggaaattacaagtcaaatgaacacatgcagaagtcataggtactgggtgactgtactagccaagttgccctgacaggcactggcaaacatccattaactaacagcgccagacctctcattgtttcttactccaactttctgctatactaccaaaagcttaatttttgcccagaaacccttggacacttaatcaaataacattagtataaaacatgccatgtcatgaagcttgcttcatgatgactcagcagcttctgcaaaacatccagttgacagcctaggataataaacagcaagtgggtagaccctatgtccaccaaagcctcaataaggactaaagaaagtccttatttttaagattaaaaaaaaaaaaaaggagagtattcttttgaatatacctgaatactttccttgggtagtggtagtttctgccaatattaaatagcacctacagtgttgatcaagaaacccctaaatacctttacttcccaattcaaaagctaaaatatgttttcttttttaattaaataggacaagaagcaaaagtattttagataaggggcaatgataaattatcaagatttaaaacaaaactacacagcctgaagtcgtatcaactctaagacaccttggatcataggtgttatgctgttaagacatcatctccccaaaattagatttttattttatctaagtacatttaagctgtgatcaggggccgggcgcggtggctcacgcctgtaatcccagcacttcgggaggccgaagcggggagatcacgaggtcaggagatcgagatcgtcctggctaacatggtgaaaccccgtctctactaaaaatacaaaaaattagctgggcgtggtggcgggcgcctgtagttccagctactctggaggctgaggcaggagaatggcattaacccgggaggcggagcttgcagtgagccaagatcgcgccactgcactccagcctgggtgacagagcgagactccgtctcaaaaaaaaaaaaaaaagctgtgataacttcagacatctggaaaatattaattcccttctaacctctattcagaccatccaatgacctatatttaaaacaagtcatttttctacatgtcatacaagaaaatctaagcactcaaaggcattcataggagaaaagaaagcatgcatgtgtaacttccattctacagacggattaggttaaatggccaggcttgtgacctgaattctaatcttaaatctgctcgcaaataccccttttcttcacaaatttgaaaactaagcactttatgtacatatctgggggaaaactggtgggagtagtaacagtgccaaacctaaccatcagtagagaacgactgaaaatacctgaaccacaatttttactactcaaacatttccctcaaaataaaaaacatttaagaaaactagaagacaaaaaaaaaaaaattcctcaaatctttactttttttttttttcttcgagacaagagtctcgctctgtcgcccaggctggagtgcaggggcaagatctctgctcacggcaagctccgcctcccgggttcaagccattctcctgcctcagcctcccaagtagctgggactacaggcgcctgccaccacgcccggctaattttttgtatttgttagtagggacggggtttcaccgtctctggatggtctggatctcctgacctcggtgatccacccgcctcggcctcccaaagtgctgggattacaggcgtgagccaacgcgcccgacccaaatctttacttttaaaaatctgttgataatgacacaatttaacaacatcaaccatgtgaaagtgtgtaatctttattagcatccagaataaagtaatctaggaagtctacctttaacagtaggcaacaagttatcagatccttttgctacacttttgtttttcaacaaatttaagacacacacttcccacctcagtatcactgataagtggctttattaaaataagttaacattttcctattcaatacttctaacaatcaatattttaaaaatggaattttctcagaatcaactatctcatttacaattaggataatccttttttataattttaaacatccaggagttcatacagtggctaaactataagaccaccaacattcctggagtgtcaaaagtaactatacttctagaatacgcctcataatattaaaatattttgtgtatgagatcagagctggagtcccggtcaactgtggagaatggccaattccagcctccaaaataaaggcgggggtggcggtgttggggggggggaggggagtcgcgcagcagagaaaagacgtaagggtggagagggactttcaaaatgccccagtgccacggttaactataacctggttaataaaatctaagccaatgctctcaagacgaggagggccacaggcaggggaaaccgagaattaactcataggctgagactaagttattccactttccatgtaacagcgccccccacaactccccgtctgccccagagttaagattccaaggggcagccccccctcctcaaacacactaaagaagggacaccagaaaacagcaagtataagggccatcaaccacatcttttcctttctccctcgagagaacatgagtaataccctcaaattccaaatccccgccaaaaaataaagaaacgcgcgcatcatgggcctacaatttcttttcccgcccagagcctgcctgggaaagcccctgacccagagagttgggggaaaggcggcccaaaccacacgtgtgcgccgcaaggctgggcctgtctcagcccacttcccgtcgccacccccaacggcctgagctcccccggagcctcactcgggcctttcctcaggccctcctgtctgctccacgtggggcgccggggcctcgaaccgcccgtcccctccagccgagtttccccacccgccaggccaccgcggcgtcggggtcccatacctgatgctgttgtcgcccctgctggtaaggcttaattggcccctggtggcaacgccgcgtccggatcttgccgccaccgccccctccgactcctccggctcccgaggccatggcggagcctccgccgcttcccgctccggggcgggtaagggggcgggagaggcagaggcggaggccttagagagcctcccccgccgcccggccccggcccaaaagtccgcccgcgctgtccacacagtgggcacaagcaccccaggaaccgcgaggttgcgagcaggagcggagagagggtgagtgctggcagcggggaagggggtggcggccgcagaggccgaggaggctccggtccggccgcctctgcggacccccgcctctgtgtgtgtcacggtctctatggagatctcccgcagaggacagcacgaacagttccccgcggtgctgaggcctaactcgaccgccgactggtgggagttcttccgtcgccctagccgtagctgccgcagttgaagccgctggcgacgcccgcctacccctcccctgtgcgcacagcgcccgccccgccgccgtcgtcgtcgtcgtccctgcagcctccgccgccgttgcgcctattacccctgctaaggcggctgccgcggtcgcgagccagaatgtcgtcactcatcggcgcccgacgcatttgcatcatcatgctgcgacgagctgataggcaaagaggaagggctggtcgagtccacgctctcggccgcgcggcacgctgggaaacgtagttcaacaacggaacgcggcttctcggaaaggaagagggacggggaaggagatctccggggcgccgcagaggcacaaagccaaggggtacttttgctgttcttggctgtaaattagactttgaaaagacacttaacataaaaacagtaacctcttcccattctccttctccctgtcggttggttaagtaggcaggaagtaagcagacagtaaaa

SEQ ID NO: 11294 - DNA, 6000 bp, Homo sapiens
aaaggactccctattcaataaatggtgctgggataacaggctagctacatgcagaagattgaaactggaccccttccatatacaaaataactcgagatggattaaagacttaaatgtaaaacccaaaactataaaaactctggaagacaacctaggcaatatcattctggccacaggaatagtcagagatttcatcacgaaggggctattgcaacaaaagcaaaaattgacaaatgggatctaattaaacttaagagctcctgcacagcaaaagaatctgtcaacagagtaaaagacaacctacagaatgggagaaaattgttgcaaactatgcatctgataaaggtctaatatccagcatctataagaaacttaaacaaatttacaagaaaaatacaaacaaccccattaaaaagtgagcaaaggacatgaacagacacttttcaaaggacatacatgcagccaagaagcatatgaaaaaaaggttaacatcactgatcattagagaaatgcaaatcaaaaccagaataaaataccatctcacaccagtcagaatggctattattaaaaggtcaaaatgagccaggtatggtggctcacacctgtaatcccagcacttcgggaggcagaggcgggaggcagagccaggaggattgcttgagctcaggagttcaagaccagcctgggccacacaatgagaccctgtctcaacaaaatatcaaaacattacccaggcatggtggcacgtgactatagtctcagctactcagaaggctgaggtggaagaatcacttaagcccaaaggtcaaggctacattggccatgaccacaccactgcactccagcccgggcaacagtgagaccatgtctcaaaaaggaaaagaaaaaaagtcaaaaaacaaatgtaaattagttcaatcactgtggaaagcagtgtggcaattcctcaaagagctaaaaatagaactaccatttggcccagcaattccattactgggtgtatatccagagggatataaatcattctaccataaaaacatgtgcacacaaatgttcagtgcagcagtttttacaataggaaagacatggaatcaacctaaatgcccatcagtaacagactggataaagaaaatgtggtacataaacaccatgaaatactatgcagccacaaaaaagaatgtgatcatgtcttctgtgggaacatgaatggagctagaggacattatccttagcaaactaatgcaggaaaagaaaaacaaataccacatgttcttacttataagtgggagctaaatgaggagaacacatggacacaaagaagggaacaacagacactgggggcctaccggagggtggagggtaggaggagggagagatgcagaaaaaataactattgggtactaggcttagtacctgggtgacaaaataatctgtacaacacccatgacacgagtttacctatacaacaagcttgcacatgtgcccctgagcctaaaggtaaaataaacaacaacaacaaaaccaacaaaataaatccggcttctttcatttagcacggtatttgagtcgtccacattgttggcatctatcaactctcctttcttattgctgttattccactgtagggacagatcacggtttatcagttttccagttaaagaacatctgggtggtttctagtttttggaggttatgaataaatgtgctacagacatttatgtaaaggtgtttgtgtaaacataagttttcatttcactcagtaaatatctaggagtagaactgacggataatacggcaagtttatgtttcactttataagaaactgccaaacttctttccaaagtgagtattccatcttgcattcccatcagtaatgtatgagagttccagttgctttgcatcctgtctccatttgatgatttaaggggttttgtcgttgctgttgctagtcatagccattctaataagtgtatagtgactctggttttaaacatggtaaatgtgtagtacttggtgcacatgtaggaggctttgatctgtagatggttgaaaatacggatcagaactcaggacagggatctggagtgatcatttgctatcatgtagagctacagaagaaggatgaccaaaggagaaatcttggggaccatcatattttagcagaaaaaggcaagagcaaaagaaaccaaaaagaagtaggtcagagaagtagaagaataaggaagaaattaagagtcctgcaaaggaaaggagttcaaaagataaaggaatatttaagttgtagtaccactgaaaacaggccactcggtttattcattcattgattcatccagaaaataaaagtgcctgtaataatccaagtaccatatcaggcatcagatttggtaattatgtcactggtaaagatagtgagacaaatctcactactggtggagctcaaggtagaagggaaggggctgaggacttgagaatgattgaaaagaaatgcatgattaatttaccaaaattcctcctttaaaatatttaatagattcagcaatactatgtgcacctacaaatagatatcattagaaactgctcaatatggccgggcggggtagctcacacctgtaaacctagcactttagaaggccaaggagagtcgatcgcttgaggtcaggagttcaagaccggcctggccaatatagtgaaaccctgtctctactgaaaatacaaaaatcagctgggcatgctggtagaagcctgtaatcccagctactctggaggctgaggcaggagaattgcttgaactcgggaggcagaggttgcagtgagccaagatcgctccagcctggactccagcctgggagacagagcaagactctgtcaaaaaaaaaaaaaaaaaaaaaaaaaaaaaaaaaaggccgggcacggtggctcacgcctgtaatcccagcactttgggaggccgaggcaggtggatcacaaggtcaggagatcgagaccattttggctaacacagtgaaaccccatctctattaaaaatacaaaaaattagccgggcgtggtggtgggcacctgtagtcccagctactcaggaggctgaggcaggagaccccgggagggagactcctggcatgaaccccgggaggcggaacttgcagtgagccaagatcatgccactgcactccagcctgggccacagagtgagactccatctcaaaaaaaaataataaataaaagagggaaaccgctcaacataactttactaataacaatgtttggtattattctctattttatatctataaaaagctagactcttgaaaggaaaaaattagagatcagagttcattacagtgcaaactgaccacagtattagttgttgaattacgctcaatatatataaaatatttaagtaaaataaaatgctcatggaaataaaactcttaaagtatttatcacctatatatgtagcatattctaggccactggctctaaacgttttcaatcacacatcctacattcgtaaaatacatttgtgcattcatcctcaatatatttatttctatacatgcattactattctaatatactactctagcataaaattcacaaaaaacagaaatttttaagaatgaaagttttaaaaggtaaacaaatagaagttctaatattttcttaccacatctgactggatcaccttgtgccccaccacgcacacatacaaaggcgctacttatgagaccattaatccaagcaaccacattgtaactgttcagcataaattttagccaaataaaatacagcaccaacaactcagatatcacttgttcctttttcttcaatagtactgacttccggcttcagatttaacactgcatccatcctcactgcagttgctttaaaggggacaataaaccaagggaaattatctctaaaggggccccatccaatgggattgtttcgttcactgaaaaataaatttaaaggctgcacttcaaaggctgaggtctcataaaaattaaatatttttatttagaaatgttattccagcactttaaagttacagaatagaggaatttttttcattcataagctttcaacggctcttagaaaaaccatgtttaagttgggcaaataactggaatctgaacttatgattttctttaatatcaatcgacattatttcttatgccagtaaagccttcatttccatggggctgggcgcctcattagtgaaagtaaaagactgcacaaagcgggggaagtgccaactagagagccctcacaaccaaacaagcagtacttaggtcggagggagagagttgctcctgacctaccaagaaaaccacttttgtacagaatatgagtcatcattattgggtgttgtaattgagagataaatcattagtgtttttgtcttttttaaaaaacatgtctaaaaagctcaaaagtaaatgccagtgtcatattcttttgtttgttttttgagacagagtctcgctctgtcgcccgggctggagtgcaatggcgctctcggctcactgcaagctccgccgcccgggttcacaccgttctcctgcttcagcctcccgagtcgctgggactacaggcgcccaccaccatgccaggctaatttttcctttttttgtatttttggtattttttttgtatttattattttgtattttattttgtattttttgtatttttggtagagacgaggtttcaccgtgttagccaggatggtctcgatctcctgacctcgtgatccgcccgcctccgcctcccaaagtgctgggattacaggcgtgagccaccgcgcccgccgccaatgtcatattctttagacatatcactgtcatttcacagctttcaaatacttccatctcctatgtattatcgatgaaaacctaagttttcatcttagaacggagctgcccgactattagaagcgtggaacccaggcttgccttgtcgtcgggaatgagcactagaggcacctgcacgcaggtggaggagggaggctggcggatggagagggcgaggctaggaggccctcgggatggaacctgtctcttctttggacactgtggaatttccataagctgctggacacagctgatgggtaccaggtatgagtggcaacgtttggcaattccattaactgaaaagaactaccgagaaacggtgaggcggggcggcgaagatgagaccagctgcccatcactccagaggacctgctgaaagaatctgaactcaccacgccttcgcgtccgcaagggaaaggtccggctgccacgcccccgcgaccgctgtcgccctggggaaaacacgagaaacacccggcaccgccaggttccagagaccttcgcaaagtaaggggtaaataaaaaccgtggccccaggaactagtagttcccaaagggaccaaaaccgaggctcccccaacctagcccgtgttcactccaacttacccattaatgtggcactctccgatgccctgatttcccagtccccagcggcgacgtgtgtggcgggtaacagaagggccgccactccgcccctggcgtgaagcgtagcgacccagttcgcaatccaagatggcggccacctgcgccccttctccgagaccccgaggctcggctcccagaagcccttgcactcgacgcggcggcggcggcggcggcggcggcggcggcggaggaggagtggtggccgcacatcctagcagtggggcgtagagaaagtgcgcgccgccgtcccacccaccgaaggaggagcctgtgcctgcgacaagccctggattttagttgcgcttgcggtggccatgctgtaggtactctgcggcccgtagacctccgtgtgtgcaaagggacgacccctcattcattcattcttcacgcgtgcgtgcatgcatacattcttaaggatataaactgtgtcaagtaccattttagatacattattggggctacaacagtgcaaaaaagttggtaaaaatcgcagccttgttaa

SEQ ID NO: 11295 - DNA, 6000 bp, Homo sapiens; identical to SEQ ID NO: 2459

SEQ ID NO: 11296 - DNA, 6000 bp, Homo sapiens
caaggacatgtaattatttagtggaaagcgaagaaccagaattcaggccacaatttataatctaatgttgtctgacactcaagtgcttgttaaatcaactgtaaggtaaaaaaatcactttgtaagcctgtctccagcaacattactctgcattaaaagacaatccatgcctcatcaaaacagagattgtctatttcactgtattttccaccagtcaagaagacaatgaatgaggttcttcgataataatttgacaattcatttttaaacctcaaatttttacacaagttcagtaaacctgaaattccatttttctgctcagtccttgaaatattcatatatataatgacctcattgtgtttagaaaaaaaatttactttaaaaataagatcagggtaacccatgattaaagtatgaagcaatttgaaattttagtagtaaatcagaagtctagataaagacagtaacattattaaaaataccttcattcttcaatctcatattctctccagaagccaagaaggtttagcattcagcatatttatatcatatgtcatttgctatacattaatgtagtaaatacatttaatttattttgcctcataatttgttatgtattattaaaggattaagatttttcactaatccttgtctacaaacattagctatcagatatatctttcttctttgattttttggttttaacccagagtagataaatcaatttagtaaagtcttctaacatttaggaagatattcatcagtcaaattacatacacatttggaattgtaatagcctaatcttacttctgaaaacatcgcctacttttcaatctgcaaggaaaatactttatctagaagtctattttctgctctaatgatatcttttaggataactgtgttacagactacaagagtctaatacaagaagagaataaaggatcaaaagaaaccaattacaataggaaaatatacaaaagatccaagtcaaaatatacacacttgtagtaaatctgcacgttaaccaaatgtggagattcggaatttaggtgtccagtttcaaaaataacaaagaaagagacactaacatatacctgaaagcacatatatggaaaatgagataaaataaaaagggcttagtcattttctataaatcagaaccataataaataaagctcataagctcatctgctacttaaacccaacagaaggaatgactaggtggtattactggcaagcaagccaatttagcactctggaatgtccatagaaatctcataaaaaggcaaagtagaaggtaatttagtaaacagttttccatacttcattcttagtaaggaggttctaaaaaaaaactttagagtataattgcaaactataattacaggttcacttttattcacataatatttaactatagaaagtacaccaaaagttatatacaagtgacaattttggccacctgatccttgattttaattggcaattcacactaggcctaacgctttacaccttttgtgccaacttgctaattacacaaatgcattagggtaaaagtgttgtctaagaatctggttttataaaatcagccttgctggtggtactcacttataattatactaaattataaaagggccagattggatgttacaaggaaaagaggttatttaccaaaagaatgtcgagaccacactgggaaaacaataaaacctaaactcattttacagaaaagcaaaataagggaaaaatagctgatttaattcaactttactttccttcttctagtccagttatgaaattatcttgttgggaaaaaaaagaaactgctttcagttccaaagaatgcatctagatccaacgctgtactagtctcgtcactacagagttttgctgaacactcagggcccacactgacaaaataacttcattcccgtcttcacacaaccctaaactagatggtcttgatcactgagttcaggaataaaaatatctaacaattgaagccaaaaaacattctggtcataactatctagatatttgggcaagagcacttcagacacaccgtctcagaaattaacagattcagatctagcctggtcagattttgtcgtttataaaggtatgactgcgtagtatttactatgtatagtagacttcacttagtaacacagttcaatagtccatcctaaaacttctattagcattttgaagatagcacattaagtgacaaataaaacttgaggcattatctatctatctatctatacatatatatatatttgtatgtatcacatagtacttctttgaaataatgactttaaaatgtaagtaaaatgcctggcacatgtttaactcaaatgcaggttccctcactccttctcaggaaccagaaaaatctaaaatataaaggggtaaagctcctcccctatcgtatatttcttttcttttttttgacaatagtaatgtctactgaaatcatctagtgattttttttttctatttatcaccaacacattactcattaatatgcaggaggtagatatcccacagatagatgaatccaaatcttaagtttaagaatatatttaggttaagtatgtttcaaagtcacagtaaaagaaaacacatttcaacataaaaatagaaagtgagtcgtctgtactgttctcactaaaaaattatcttgaaaaaaatcttttgaagtatttaaaaaaatgcttgataaaactaatatagttcatacacaaccaggaaaagtaattctatactactagtttaatgtatagtaacctaacagtttttacaaatacataacaaatgtagactatgagagaaaaagtatatcaagagaaaaaatttatccccatgcatttttcaagaaaacgctctaaaaactggtagaaatattaaccatttataactattcatagaaaattaatttgctacacttctgctaattgtttttctacacggacatgccaaaaacaaccaaattcagattgaaatccaatctctaatttattagaataggtcataagttcaatatctaccatgcataatatttttaaaagtaattgtctttaaacctcatccttaacatacctcattcatcacaccaatagtatagaagcagatatatttttccttagaaacttctatctccttacaaataaaatagttatcataaaaaaactttagacctctatttggatatatgtttagctactataaactaggagctgagaaacatcacagcagtatataagctgaattataatcaagggaaaagccaacacatgatttctcatagtatatatctaatcacaccaacaggaaaataaaaactttctttggaactaatcagcaacacagaaggactggggagaacaaagtagaagttaaaaaataaaattaaagaaaggatacagccttaaagcaccagtctgagttcccactgccaggatcttctgtacaggatcaaaggccagggctgagggttgatagggaaatccatggcgaacagtctagggatgggcaagtgacatcacagcaaccaaggcagcaagcgaaattttaaaatagaaagtcaatagaggcgttagaatttagaaccactaccactgatgcaaaacacatacacatgcacttactgcttttgaaaaaataagtgaaacctacattaacaaagttattcacatagaacctgaaacaaacaaaaatctagtccagtgatatactttaatttcgcttttccataatactggtattccatagaagaaaatcttttattaatattctatactactacatccgacaccagatgactaaagtttgcaatggtccaaaattctgtaaacccattaaatgcaattcatactttattttggcagtattcatttcatcattactttatttggatgctaacgcaagtacttctaaggaaaagctgtcatataattactttagtcaagcattcagtagagcaataatcaaacctctatcccaacattttacacttgtaacagaatgaagatgagtacaacatacatttttgcaatttactattaaggccataatcattttagggcattagacctatatatatatatatatatatatatatgcacacttttaattaactctgacatacaaatacatggctatttatgagaaaggcaggtattaaaaccgaggcaagtttgtgtttctcattaagcagctggtgacttaattcgctgcatcattctttctgaattacagaacgctatggcaattatcgtgccattaacaggcaaaaatctcagtactttttaacaaacataatgataaaaagaaccctgtgatttcatatcgtaagccacttacaccacattttaagggaaaagtgatgagcaaaggtgtggtagaacaggtttggctttttgataaacaacattcattagacaccgtttccaaaggaaacttcgaagttggtgaatcatattaaaacgcttgaatataaaagcttccaggttattactggcagtgtcagaatacgattaaaggtcggataatagtttgaagcaaccttgaactgattgctgcatgtgcaaaggggagagagaaaaatcaatgaaaaggagtaaggtatcaatctccaaaacaacccaccgaagaaacgtttgccaagggaggagcgagccttttattagagttattattattattattggcgttctcttcccttgcattcccatgtaaagcccgagtagcccccttaaaacaaccccaatttttcaatgacggtgtcgcggggctgcgcgctccgttcaccttgcagagctgaaagtgctcggactggagcgtttcctggatctccggctcccggttcccaggcggatgctgctgctgttgctgctgcgacgccgaggacgagccggcggtcaggccgtccagcaccttcctgatgttgaatttcctcatggtctcggaggggctcccccgcagcccgggaggggaggcacagggggtccccgggcgggggagaccacccggggccgaaggcagcttcgaccgcggaaacggaggagtgggagtgtgagggtaaggaggcagctggggggaagcaaaagataatccgaacaggaaatactgcgacgacaagagcggcggccgcaagaaacctgggcggcgacccctcttcctccgaggccgccgctgcttggcgcggctgctgtggtgccgattcagccgccgccgccgccgcctcgctccgcggcccggcagcagcagcagcagcagtggcggcggcgcccgagcccgctcagcccagcctcacctggccgcgggcggactctgcgccgcgccgccgccccggctcgcccccggcgccgccaccgtcgccgctgcgtccatggcccgcggccgcgccgctgctcgcccgccccggccccgcagtccctcggcgcgtcctccggctccttctcctcctgccgggggtcgccggctctctgtccgcggccgccgctcggcctcgcacacaaggcgcctggtgtgggtccccgcgccgcctgcctcgccccgcctcgctcctccgccgctggaccggcccgccctcgccgctcccgagcccggctgcgttcctcaggcgccgccgcggccgtcggctctccccgcccagccgctccccatcgcctgacagggcgcctcggcacacggcaccaacgcccgcccggagcagcagcggcagccgcggttacagcgcgggccgcggcggtggcggcagcagggcctcccaggagccgggctgcggtacctgcgcatgcgcgccgcagcccggttcccccaccctggcccagcaggcccccagccccccagcccgagcgaagctggggcttaaattatcttctgcgaaaatcccagacgctggctaaatttctcccaccccagtcgagttgccagagtatgcagctgcttctcttgcagctggcatagtaaaaatgttgacgactaacaagcagc

SEQ ID NO: 11297 - DNA, 6000 bp, Homo sapiens
cattatttctgataaatgtaagactgcaatgcagttttatgccagtactgctttggacagtgtccccagacctttagccaaggtcaatttaccctactatagtctgaatgtttgtgtctcccccaatttcatatgttgaaatcttaacccccaagctgatagtactaagaagcagagccttgagaagtaattgggtcatgaaggtggagcctccaggaatgggattagtgccttataaaaatgctcaagggagcttatttgcactttccaccatggaaggacactgagaagtcagcaagcagtttgcaacctggaaaattgctctcaccagaacctgagcatgctggcagcctgacctcggacttcccagcctccagaactgtgagaaataaatttctattttgtataagccacctatctatgatattttgttatagtagcccaaacgcactaagacatacccacggcctagtaagcactgtgcctaaggaccataatacttgtaagggcccactaaaatgtttttaatttcttttaaaatcagaagaaaatacataaacttttaggttgaagaaaatgctaatatattcaccttttatcaatgcagttataaatatatatttctgtgtgtgtgtatatatatatatatatatatatatatatatatatatatatatatatatttgttactactattttgaatgtaggaaatggttcgcaaaggcaaaagtacataaagcccacaaaaattatgatgcagccctgcttccaggggagtattttcagtatacagtgaaaacatgtgaaaaactttcaattttaggtatcatattcttgcaacttgtgatttttgagaactgagatcttcagatcctgagggaatgaattccacaatttcatacatccttaaaagtgtagatttgtaggacagagactcctgctgatcacactgcaggagccactgtgtagggcaacctatgttaagagtaacttgctcactcacaagccattgcttctgcccctaaattctgcaaccaatatttacagagactgatgagccctctcacatgagtctgtctgttgaatgataaaatcttagatcttggagcaacatttaggcctactgagcccctctccaccaatgcaagagcacctttgtcacccctcagcatcaatttgagcacatcctgatgttccacttgagagcttcaaagcagtttcctttgtgttattgtcttgtaaacatactccaaatgtaagaaaatacagagacacacaggttgctggtgatacgttaggaggatcacagaatgagcatgccactcaacaccatgagtcattgatggtggatgagctacatattgtgggcagtacccacaaggaccattgtcgtctcatcatcctcagggctaagttgcagaccattgtccaccactctgtggagggtgctatagtgttgctggctttggtggaaagaatgcagctctgaagcagcctcccaggcagcaaacgtaggcatgggaaaaggatctggcctcttgttttcaaaaaaacatttcaggttcctctcgctcagcttgttggcatagtccagaaatgtattttccaactgctccttctccttttgtgcatatgtcttccaaaaactcagctgaaggtagctaactttagatcggcagcgagcataacatgtggtgagcagagagaagaaagacgctgaacaaatcaggcaccatcctagaatcttaagaagaaagaaatattgagtacacacgtgaaagcaaagccatttagggagctggggtattattgagaagtgtatagctaaattattaccacagtctttgacatacctcatttgaaatcattcatcttaatttttaaacactttaaactcactttttgaatttattaggtaaactcaaaataaagttagggtttacctaatctctattctcctccccaacattgctggtgcaaagaaataaccagaaggcaggcagatagaaaagagtacaaagtatagattacataagacttacagaaatcaagctcaaatagtattagctctgataggaaaatattctgtgcataagtaaatgtggtcatttgagtaaatgaccagctcttcagccaggcatttttaggcattgataaatgtatatacatggctagagactaatttttttctgtcattacttactgtccatggaaaagggagacagacgatacaatcaggaagctgaagctataagaatttaaaggctgagaaaaaattaggatcattaaaaccttgaaaatgatttgtcttgatttttggtaattagaaaaaacaaactctttcctgaatatgaaatggttcagcttttctcccctggatcttaaaagcagaagtttaaatagcttaaattatcttctaacttttttggctctaactctgttttcacaattgaaattaattttatgtttggaaaactaacatctttttcaaagtgtctcttgacatttagtttaaatgatccttaatattctttagcagatgagcctatttgaaaatagaaataataatctacaaatgaacccattcagaccataacaaaaccacaaataagctttaaatcagtggttcccaacctttgactcagatatagagtgtttgtgaagggtctcaacctctgcaccaatgccaactctggactggcactactcaggtttaaatctaaactttccccttactatgcgtattctttttatctcagtttcttcacttgtgaaacgagggttactcaccttgaagggtaatttgatggacctaatgaaatgatactggacacatgtattcattaagttttagctaatattatatgctgctattcttcaaatatatatacacttatgtaaatgtgttactgaactcataatatctttctgtacttataattaatgagtgaggcacaactaccatcaagtgaaagtccctgaatggattgtggttggctaccttatatgttcctccttccttcatcgtctgtcttcctctttttccacagctgaggcttctgtacgccatctcatctcagtacctgagccagttccagctgaattataaactattccatcagcttcaggtccccttccccctttcacatgacgtttgcattgaccgatgctttccctcaattcacagtacccagagtcaaactagagcttggtggatgcttccataccagccctcaaaagtgtcttattttgcatatgtcctcccccaaaccatggcagttttcctcattgacttggaacaaatactgtgtaccagaagctttatgcccatttgtatctatcatctctaaatcttccgacaactctccaaagtaagtgatattaccactaactatgagaaaactgggactcaaagaggtcgaaccactagttctaggtcacatagctggtgattggtagcatcagcatacaaacccaacgccagacaattccaagactgagctctttccactactccattctatcttccttaagaatagagagtcatccagctagattttttatctgccccacccatggatgaatgttcttttccgcctccaggcacatgtacacctattgttggtctggactatatgctgcctcctgcctatctgaacctctgtagtcagcacctgctattgatacaagttctcttgcccacattccttatgcatcttcccacaggaatcagccccaggtccttctcattctgatgaagaatcagcaggtcagtgtgctcagcctaagctatgacatgatgtgcaagatttccttgtacctgtgtttagagaggagaagctcacacaatgataagtgtttgggcctgccactgactgaatggagcctggtgactgaggacatacaccataaatcaatcattctgtcataagagttgtaagttatacccttcttcaataaaagacacaagacatttgggagcctgatatgttttatctaagatgtgctttatgcattaaagaaaagattttgttttggagtattttttgacttatcaatttatgaagagtatgactttactgccaaccagctttggagtgtatgattttaaaaacagattttgccttgatttgttgttaccaaggcaaatccttgtcgaaaaagtaaaataatgctatttctgtgcctttattctgaaacagatagcattcctgacaatttgtggatctgcttatcaactcttaccacttgttttgcttttgggaatgcaattcttactacctataaatgggaagttagtccttcctaaggctgtacatctggatttgtgttcatgtgcctggaggaatgacaggctacttccctgcatcaattaggtaaagatatgatttccttctgttaaataaaacaatgcccaaatcttgagcttctgaagtaattaagaacccctttagctgtacagcacaaagagtataaaacataatctccctagagagtacagtcactttttcacagaaggctatttaaaaactgctgattcctaccatacaaggaaaattcttctcaatcttgacaatatttatacacagagatagcagttgccagaaatcattcaagagaatctccacactaattatattacatgcaactttgaaaagtaataactcatttcattcagctacattttaatagatgaataatacatgtgtgtgtttgagaaaacaacttgaatgtaaataattgatagaaggcagtaatttctaattacagctctgccattaacactcaatttatgatttagtgttaggcattatttatttacagacccagagagactgttttaaagtacttaagtatttatatgtggacaatccagtggatattttcttttcagaaccggaaaagagataatccagtcagcaactttattgagccacccagcctttcaaaagcttttcctgagatagtctcaatgctgcatcatgtttcagtttccatttagtttcaaaatattctgacaggacacagacagccctggctgaaaggagcacagagagaatacttcgagctcatgctgagagaaaaaggcgagtttgtcttttcttacctgagactgggcctgaagggagagtttcagttcttcattgacggtaggtagcatgctagttttgccacaagatactttgtgaagttcttcccagcactctttgggcttacccttgcaaatcagttccaggagtcctgaacttctcgtcccgctcatggcacattcatagaaagttccattgagcagagccacagaaagccacatcactggagccaccaatgagctcagagtgatctggccgaggacgtagaagaaacggcagctgtggcctctgggaaagattttcctgggattcacacagcagcctgtgaagagtctccacgacctattgttcagaaagaatcccaggatcagtaacacccaggcaggagcaaagaggaaaaccagcccataggtcatattctcagtgctgcaggggcacttaaaagccacaacagaaaagagacgctcacttcccacggtcagcagagccatgaagctgtagccaataacagttttctgattaaggaagaattttaaaatgccctgaaaagcatccatgttggagatgcacagagggaaaatgctgtgcctttgttattggcagagcagctgtggcagtggccgagggtggagctctttcttcatcagaaacaacagtccttctcagactgaattgagccagataaggaaacaatgtcattccttaggaatgaatatttctcaacatgtttagataatgcctcctactggtggaaattgggctgtgatactgcagcctaaatgctgagaataaattcaaagtgcacgggctccattttaaccttctttccatgtggtttggattgaaaatcagaaaagaaattctcactcatacaaataatagtctaggaattttccagtgtaaggaatca

SEQ ID NO: 11298 - DNA, 6000 bp, Homo sapiens
ttatttactaacatttaatgataacactaccaaaatcatgtttacaaaatattccaagggagctgaagcaaacagaaggaaatccagtggtaatcagtacacattaaatttcatatgttattctgaattaaagactgaacaaactactccattcaagaaataaacagatcgcctcaataatcttttcttctctttccaaattaaaatcattcccttcttctttgtgatctctaacaggctctctgaacacttttcctccagcaggtttatactcttctgggcatctgaaagaggatctggaatccacaccctcaacaggctggaacttgcctacacatggcagaagtaaggaacacaatcagtaaaggtaaaaatcctgaagccagctaatgagaactgagcaatcggcccagggctttgcaggaattagaagtggccccacaatggaatcctcagaaggcatgagaagagatagagagaagtggaagaggacggggctgcggaaagggggtctgtaaatagccagttacattagtctaggaagcacataagcattttagggagctgatggttcatgaggagtagtgagtagtaaaagggataataaagtagacaacaggaaaataaaatgttagagtctttaataatatgaatttggagtcacaagggataaaagtaggattaaatgtgtaatttaagttaatcttctatttaaggtataccactaatgacttgaaaatgaaagacaagtcttttacctttagtatttccatttccatacccctaaaatgagggtaagacactagctctatatcactgtccatttctactacactaaaatattaaaatatttgaattctttgaaaaaaaagttaaaagtactgggcaatttcaaaatgcaagtatttatgtagatgtatgttcagggattttcctttacggcaattctctaaatgcatatgaatttataagtgagagtttactaatagtaatggtcctgctatcctatgcacaataccttgtatttctctttctagtttgattcttttctgcaagacttcagcatcaactaatcaagccactcttctatacataactagaagttgtgaaacactaaagtgagatgatagaaatttgggatacatttatttaccatacacataaaaaagactttgaggcaggatcttgctctgtcgcccaggctggagtgcagtggtgtgaccatagctcactgcagcctcgaactcctgggctcaagtgatcctcccatctcagcctcccaagtagctaggaagaaagatttttctttaaagaaaaattatttcaattaaacatactatccaattaatgaacagtttaatttttaaaagcatatttcctattagaatggggcattagagttgagaagactttgtgaaacatacattcttcattattgttatcatcaaatggtacatcgatcagtacacctcaagagtttgggattttaatctctacttcccattctaattcaccatatgaatttcataggaaaataattttccttttcagtactctgggcttatatataacttgcctcattgccatgttgggcaccaacttgaggtataaagaattttgctgtgtcacccaaacatttgctggtaatttggtgctcccagagagttttattctagcaatcactataggggaagataacataatcccatgagaaaaccttaacatatttgctatggtttgaataactgccacctctaaaactcatgttgaaactttacctccaatgtggatgtggcagtattgaaaggtaggacctagaggcgattgggtcatgagcctctaccctcatgaatgattaatccattcatggattaataggttaatggattcatgggtaatcacgggaatgagactgatagtttcacaggaagagaaacctgagctagcatgaacaactccctcaccatgtgaggtcctggatcacctcggagctctgtagagtccccaccggcaagaaagccctccccagatgcagcccctcaacctcggacttgggctccataactgtaaaaaataaattccttttcttcttaagctacccagattcaagtattctgttataaacaataggaaatagagtaagcatttaagaactgtcctatcctcttctcaggcacattcttttagtagggttatgtcactaaatctcttcaggtgccctacccactccttcaaaatagtaaagatccagccccctcagcaaacagaataatagtatccactataatgaagttccctctaccacagattctggctctcctcaaaggcctgccacaaacacatcctaagtcagtaacagtatttctctttttttatttggggaaggggcagtggggtggtgaaaaaggataatatttactatatttatgattcaagtatgctaatggttatgtaatatttaatatatgctacaaccacaaaatgctagtcttttgggagtttcttctgaaagaggatctggaatccacaccctcaacaggttggagcttgcctacacatggcagaagtaagcaacacaatcggtaaaggtaaaaatcctttgacagtttcaggttatgtaatatttaatatatgctacaaccacaaaatgctagtcttttgggagttcctttttgaaaacaaagattaccaatatactaaaactcaaatttaaatattttttctttttttctctacaattatttattgaaataatactattgagtgaaaatcatgcaatttctttcatgcaacacagtgtgatccaaggcaagtataaataaataccaaaatattgtatcacaaataacattaagaaatgtataaatattttattgtttaatcgcaaaatgcactttcatcagtgatcttaaagcaccttttcagaaattaaaaagagactataacgaggcactgggaagcatctgcgaagttaagagcttcatctcatggatgaccaccaggtcctctcagggcagcactgcgagatattgaaccggacagcccataaaatctcattgaaaggaactgtattagcttgtttctgaacgaatttcgtaaatactaaagcagatgtacacacaaacattagtcactaagatggtcctgatctcacatagcaaacctagttgatgtctcacccagtgctttttcaacaggtccccaagatcaggaaggacagcctcaatctagcagtattgagaatggaacctaataaccccatcatggcaactgcctgtactgttatcaaagtatctcttggtcaaagtttcttttcagatggagtcttcttctgtcgctcaggctggagtgcagtggcacaatctcggctcactgcaacctccgcttcctgggttcaaaagattcttctgccgcagcctcccaagtagctgggactacaggcgcgcgacaccacgcccagctaatttattttttgttttgtatttttagtagagaccgggtttcaccatattggccaggctggtctcgaactcttgacctggtgatccacctgcctcggcctaccaaagtgctgggattacaggcgtgagccaccgcacccagcccttttttttttttttaattccccttcacttggtgactgtactttcagtattttttaaactgtcagaatgtactttttaggccagtgtttttatttaactaaaacttcataaaaacggatactgacgtcatatactagtcaatgaaaaataactcttcccaagctcaaacttaggaagtgctgcttattgatgtttctcaggttctacattagcagctccaagagagctaaggctgatctcatatacctgtgtatgtaacctaggtaaccagcactatcttgcactttttgctgaacccacacagacgggtcactaggtgatggagacatcaaattcaatctgttatcttctccatttttactagaacagaccttacctacatacttcagaaaagaacttatatctgtatcgtgaccgtcaaaggaagaggtcacaatacagaaatctaagtatttgcatgaaacaaatactcagataatcctatattttattttcttccatgcacattaggttttttgtgatcccatttagtaatatagttagaatactctatacaatattgtttatcactatttcacatagagattatcattgagaattttgttttgttttgttttgagcctgtcgcccaggctggagagcagtggcgcaatctcggctcactgcaagctccgcctcctgggttcacgccattctcctgcctcagcctcccgagtagctgggactacaggcgcccgccaccacgcccggctaattttttgtatttttagtagagacggggtttcaccgtgttagccaggatggtctcgatctcctgacctcgtgatccgcctgcctcggcctcccaaagtactgggattacaggcgtgagccactgcgtccggccgagaaattttttaaaaacttgagggaattacttaaagtttaaattctataatgtgaaaaatactaaaaatatgtataagtgagatctttcatgcatttaattaacagtgctaaaccatgactttctaaaccatgaccaacgaaaaaatttttaaaaagaactttattacacgaagattcctagaactaaaagcgtcattgcctgacctaaagaatttcaggtaagtgaggttcacctcctgattttaaccaaaggcttcggtttccatctgaatgccagccggcttaagaggaggctgctgctttaaaggagcgatataaacgaaaaagttctcaggtcacaaacttagctcagattccagccccgacagatcttgagcccatgtggcatcgctttcagagcttcccagtctgtgagtcaagcccccgcctcctcccctccccgggactgcctcggggatgaggtttactaacaatttctccgagtgccggcggagcccaggagcgctggaatccagcgtctgggagaggcttggggagctcttcctcggcttctgcagccgcaaagtagggttgccagcgccaggatctgcacacaagccgccgccacctcccctgcccccaaatggctggggtacggagggaaaggaggacgcgagggtgtgccacccaaccccgcagagtgaagccgaggccccaaggaccgtcgaggaaatcgcggctgggccggccagatccgacgcacggaatgcgatctccaggttctcatcgtgttcccggctcggtgctcggcgttcaagggggtggggaggatcgaaaagctgcccctcgaggctgctccgccgccggggaagcccgtggctcaggcttcacgcgtcaggcgctctctcggagtccagccgagccgggcccgggcgcgcaacccgcggcgctccgctctcagccggggacgtggctctccgtctcccgcccgcgccgggacagccccgaaggctacccgcccgaaactcccgaagaaagttgcgccgcgcgccccagctcgtcccttgcgcgcccctccacttaccgctcccagccgaggcttcgttctctccggcgtcgcctccgcagcctccagagccagctcccggtcctcctcactccagggcgcccgggctcccggccccctccgaaccgagccctccgcgcccccgccgcgccatgccccgggatgcgctgctgcagcctcgggcgacgctactgagagccgggccggcgggggcgggtaggtgtgggcgaaaggggcggagggagggacgcggcgggcgctgaggctccgctggaggggggaggaaaccgcaacgtcaccagagccagaggagacgaggatgaggagagggaaacggggaccccctcccccggccgaaccccgaccgcaggcccgccccgctttctcccgctcctcctctcccgggactcgccgctcgcagctgtgctcggccttccacgccacccggcccggactccaccc

SEQ ID NO: 11299 - DNA, 6000 bp, Homo sapiens
aaagtcccaaatgtgttgcagaaaacacacaaaaaaaaacctcaataaagattagttaaactgggccgggcacagtggctcacagctgtaatcccagcactttgggaggccgaggtgggcagatcccttgaggtcaggagttggaaaccagcctggccaacatggtgaaactctgtctctactaaaaatacaaaaattagccgggcgtagtggcaggcacctgtaataccagctacttgggaggccgaggtgggagaactgcttgaatctgggaggtggaggttgcagtgagccaagatcttgctattgcactggagcctgggcaacagagcgagacttcatgccaaaacaaacaaaaaaaaaattacttaaactgaactttaaggttgtgtaactgccagagcaaaccttttcatgctttcatgcacatgctatctctgaaaatactgtcagaagtctgaaattcaaacgcatgcctacatttttgtatttggctacttaactgtttcacaggaaaactaaataaactaagcctcaaaaacaagtattaaaatatgctgctgtggccagggaacagtggctcacgcctgtaatcccaggactttgggacgccgaggcaggtggatcaattgaggtcagaagttcgagaccagcctggccaacatggtgaaaccccatctctactaaaaatacaaaaataagccaggcatggtggctcgcgccagttttcctagctactcaggaggctgaggcacgagaatcgtttgaacacgggaagcagaggttgcagtgagccgagatcacgccactgcacttcagcctgggtgacagagcaaggctccatctcaaaaaataaaaatacttatatatgctgttgtgtttccccaaaactgtactacgggggtcctcatcttttacttaaaatccttaagaacaaatgtgcttcagaatttttcagatttgccccgtccgggaaggaggtgggggggtcagccccccgcccggccagccgccccgtccgggaggtgaggggcacctctgcccggccgcccctactgggaagtgaggagcccctctgcccggccagccgccccgtccgggagggaggtggggggtcagccccccgcccggccagccgccccgtccgggagggaggtgggggggtcagccccccgcccggccagccgccccgtccgggaggtgaggggcgcctctgcccggccgcccctactggcaagtgaggagcccctctgcccggccagccgccccgtccgggagggaggtggggggtcagccccctgcccggccagccgccctgtccgggagggaggtggggggttcagccccccgcccggccagccgccccgtccgggagggaggtgggggtgtgagccccccgcccggccagccgccccgtccgggagggaggtgggggggtcagccccccgcccggccagccgcccggtccgggaggtgaggggcgcctctcctcagccgcccctactgggacgtgaggagcccctctgcccggccaccaccccgtctgggaggtgtacccaacagctcattgagaacgggccatgatgacaatggcggttttgtggaatagaaagaggggaaaggcagggaaaggattgggaaatcggatggttgccatgtctgtgtagaaagaggtagacacgggagacttttcattttgttctgtactaggaaaaattcttctgccttgggatcctgttgatcggtgaccctacccccaaccctgtgctctctgaaacatgtgctgtgtccactcagggttaaatggattaagggcggtgcaagatgtgctttgttaaacagatgcttgaaggcagcatgctcgttaagagtcatcaccactccctaatctcaagtacccagggacacaaacactgcggaaggccgcagggtcctctgcctaggaaaaccagagacctctgttcacttgtttatctgctgaccctccctccactattgtcctatgaccctgccaaatccccctctgtgagaaacacccaagaatgatcaattaaaaaaaaaaaaaaaatcaaaaaaaaaaaaaaagaatttttcagattttagaaaagtaacacagcgtttacactcaaacagaccctatggggtctaaagtgcaccaataaccaaacaaattaatattccaagacagaacataactatttattaagtgagataaagattattcagtagcctcctgtcagtacaagtcggcaaattattttgcagcaaacttctgaaaaaagttccttattcagagctttgaatgaggcagtaattcaagatttctctttcatattcaagatactgcaactgggctgcagaaaaaaagtcactatgatgaaaacatccttttactacaactgtaattccacagaaacaactcaagttattagggtaaatccaagaaaaaagtccaagtggtgcccaacaattttcataatgattagaatagcatttaagtattcaccttaattttcataacacaattttgagcaagagcaaacaaatacatcaaaatatgcatatggactaaggcaagcctgaagcagagagccggatgtaaaacgggcaaactgacacccataatagttcacctaactttctatctagcagtatggaaaccacacagggctctgaagctaagcgaccaatgttctaatcccagttcaaccatacaggaaaattacttacatgctctaccctcagtttctttacctgtaaatggagataataatagaacctacctcactgcattgctggagtgtggtggcacgatctcggctcattgcaacctccagctcccgggttcaagcaattctccctgcctcagcctcccgggtagctggaattacaggcgtccgccaccactcccagctaactttttgtatttttgtagagacggggtttcaccatgttggccaggctggtcttgaactcctgactttaggtgatccgcccgcctgggcctcccaaagtgagccacggcaggcgtgagccaccatgcccggccaacctcactgcatttttaagaagattaaataaagtaaaagttgaagtccatgatttacaaatagtattaattccctccacctaaactaccaccactttttcaaagacacttacatgctgaagggggtcaagtatgacttgttggcagggcgtggtggctcatgcctgtagtcccagcactttgggagcccgaggagggcagatcacttggtgtcaggagttggagaccagcctggtcaacatggtgaaaccccatctttactaaaaacacgaaaataagccaagcctggtggtgcacgcctgtaatcccagctactggggaagctgtggcagaactgcttgaacccagcaggtggaggctgcaatgagtcaagatcaagccactgcactccatcctgggcaacagagtgagactctgtctctaaataaataaataaataaataaataaataaatagtatgattcttctatgaaatcaggtgaattttataatacgaaactcaccatgaaaatatgactttcaaatttcaaaaatccatcctgacacagtggctcaagtctgtaaggccagctactcggggggctgaagcgggaggatgacttgaagcaagttcaagaccagcctgggtaaatgagactctccccgctttaaaaagaaaaaaagaacaactttaaaaatccaatgtagattaaaaaatgatggctaatttctgaaatcagggcagtttctcaaaacacttttttttatacctttgttctgcctgatcaaaacacattctggccaaacccaccgactactctcccaatacctttttgttttctacactaccaattgcacacataatggctgttaggtgaaaataaactactgaaaagtgtacccttttaacttgaaatacaacaaccacaagaatggcctaggtttgcagataagaaaagccattacagcattaagacttcacttatacacaatcactgcccaaagaacctacccaattttttttcctttttcaacatcgaggaagaacctacacaatttaaatgcacttaggaaataaggcacaacagtccaagatccaaatttcataaactacccattgagtaaaaaaagtattaagactagtaactttggacagatttttgcatctaatggatttttaaacttattgtcaaacgtacaaaatgatgcaatcctttgttactatttatcctaaatttattttagttctattccaagtcaagaatgttagtttcctgcagatcacatggggcgggggggaaaaagaatgttacaggacactgaatccatctgaaagtataacaagttctgagctgattcaaggcttcactgttaacaacttctccaagtagagtatataacctggacaacctagacctccagcacacccaattgaagagaagatatttaagcaagttagcacagctcttgtgcaatagaaagctttccctaagttgttaatactcaaaacccactccttactgttaacactaccataaataacccattaggccctcgcagttacatcagctttaagaataccatctgccatatgtcctagtagagtgcaacaaatggatgcaaacattacccaaacatcaagtgaaatatgaaaagaatctgttattctgtgctttaattcgatgttgtttaatgtgaaaagacttagaaccaaaagtaaatcgacccactacctcaaaattccctacaagattaattaaacgagacttaatccttcatacttgcactttttccgtcacaaacaggaaactccgaagaaaaggaaatagaaaaaagcctatttttgctaagaggaataacggcattgcttccaacccccacagtgagtgaacaaatgaaaaagcaacgggaggaagtgacgggggtaggcggtggaaagctcaattggagtcctaagcatgccacccggctcagagatgccctaaaacatctgttaagagcagctgcaacagggaaaccggagtcgggggatgagggccgcgaactggacggactgagagttgtgcccgcacgttcagtctcttcttggccaactctttgctcacctcccaagtccccatcccgcttcctccataaagaaaaatccccaataaaagcaaaggcagagaagacaaagaggcaggaggaggctgcaaggagcgtccacaacaatggagaagatggagcgagcgaaactcctgaggacaatgaagggaggtggagaagcgccgagggaaacgctgctgacccgggccccgccagtggcggacgctggacacaggccgggccgcaccgtccctgtcatcccggacgccgcgggctggggccgggcaagcgggcgccgcagggcctgggggcgctggcggggcctgcgcgggttcgcgggcaaaggccggcgggactcaccggcattctgatctcggggccagaggtagtatgtcgccgggatcacgatgagccccacgaaggaggtgaggaagtagaagaaggtgttcccactgtcatcgtactggaactgctgcccggccatggcaccccctcctccgcctcgctcttctcaccgccgccgccacgaccacgctctgcactcccgctcccaacgccccggcccgagtggcgtagcttggacactgccgccgccgcctctcctccccgcccccacgccactctcacggacacgccgccgccacctctgccgctgccgccgccgtcgccagctctcgcgagaggagatagttcccgccccgctcagttttccctccccctgcgtgtccccagcgagctcgctaagggagacgtggcgagcgcaacggtggaactcggcgaggtctcgcccttagccccgccctaacgtcaaagccctcccccaacccctcccctagggtcccgcccctaaccgctccgccttcctccaccgctcagtttcccagcgc

SEQ ID NO: 11300 - DNA, 6000 bp, Homo sapiens
cagagggagaccgtggaaagagagggagagggagaccgtggcagagggagagggagaggcagagggagagggagagggagagggagagggagagggagagggctcctcaattcttacatgcttatcatagatatcaagcagtgctcttgctgtctgcccatcttttctgaccctgggacaccaccctttattaagctttcccataactccttgaaggtcaagcccccttgactgatactctgggttatcacagtaagtgtgccctctatctttttcaggtcactgaaaaggagggttcctaaagcattcactcctgaccctgagggaggtgggtgcactcactccgggactcaggtgcaccacagataagcaaaaaagtcctcacattcaaaattgtcctgggccacatgcagcccacgagctgcgggttggacaagcttgcatctagaacatatacaccataaggcccgaaatttttctgtttttactttaatgatgctttctaaatgcaaaaacagtcatatacctagcagaaacaaatgtcagttgaaggaatgatcatagagaaccactctattctagaggcaatatctttattaatgtagcctcaggacaaatgctttatttttgtggcagctacagaacaacatcatctcacactgacatcagtgccaccagatcttttctcaccagggctgcttgtgtgtcctccctccctccctccctccccccacaccaactctactgcacactgcagcacacaaccatatttttctcttcaggaaagataaccctaggcttatgggtccaattttccaaccacatatgaatctaaactagactctgctttataaattgatgagtttctattggagccagcactaggattactacaactcagggcaggaagaagagtaggagtgcagaagaggagttccaacagaaagttacctatgatgagaaactatgggaccctgcctcttggcaaatttcagaatctggttcctttaaaaagattgcagaaaagatggaaaatacaatgaggaaagagccctgggaagacggcaagagcttgaacgatctgaaaatttgtctcttgataccacaaggaccctggtatgcagggactgccgtaggtgacatccaagtccctgtgatcacaggtcatggtgggacaaggttctactgaagggccaagtgtgggtggaggattactcaggtgccgaggcaagagactgaaagcacaaactgttttagtataataaagaaaatagttagaataagaatagtcataatacaaattagatatagagatgatcatgaacaattatcaatcattattataaacattattaatcattagcttttaatattactctttgttgcattactaagataacctaggaataaccggcgggtatagggtcaggtgctgaagggacattgtgagaagtgacctagaaggcaagatatgagccttctgtcacgcccgcataagggccacttgagggctccttggtcaagtggtaacaccagtgtctaggaaggcacctgttacttagcagaccatgaaagggagtctcccttccttggaggagtcggggaacactctgctccaccagcttcttgtagaaggctggatattatccagagctacctgcagtcatccagaggcctaaacccctccctgtggtgctgtgcttcagtggtcatgctccttgtccactttcatgctcctcctgtactcctggttcctctttgaattttgtagtagataacggtagaagaaatagtgaaagtcttaaagtctttgatcttaagtgcagaaaagaaaatggtgacatatgctacctaaaagggaagggccccctatcctgtaatcacgtgacttgcttcaccttgtcaatcatttagaagattcaccttccttaccctgccctttgtcttgtatgcaataaatatcagcgagcccagctgttcggggccactaccggtctccgcatcttgatggcagtggtcccccgggcccagctgttttctctttatctctttgtcttgtgcttttatttattacaatctctcatctccgcacacggggagaaaacccgctaagccccgtagggacggatcatacagccaaggacaacagagcagcaaagatgacccagctgagcagtgaccacataaagcgcacggtggcctgagcacccactgggcacagccccatctactctcctctcatgcaacaaatcagcataagaaacatgtggactctggaaggttctcatgtcttccatttattttgtctctcaaattttaggaatcttctcctttaattaacccatcaacctctcatggcaagaatttgaaaaagtaaatttatactcagattctaattttaatagggaagtaagaagttacagctcagtgcacataaagttgagacagagatggagacatctcagcctcacctctatggagcaggaatgattaattattggagacggaacacaggtcagcatgagggaagagggtcatggtggacatgggggtgggttggtctccccacctcctcatattatgcctacaggaacacaggcacattcaggtgcctttgcagaaagagagtcagggtttttgaagtcacaaagggaaggcgtgaacaaatcttgcctctcagtcccacacaaggcagctgtctcacactataaaataaaatattcatgaacaaattcatatccgtcacagtgaggggtgacactttaaacagcccatcacatgctcaatacatccaattcaaagaaaccccatagcacagctgcgtccactattgcccccaacacccccccacatcaggtcccccagtgtctcacctttacaagccgtgagagacacatcagaaccctgcgcatggtcgctgcctggggtagaacaaaaacaggacttggtcagagcccagaggagatgcggctagaggaggaatctggggttgggtgagctcccccatgggctcccgaccacaatatcccaaggatcagggatcagcccacttcatacttacttgcagcttcagagtagctcactctatctgtgggaagaaaatgtcctatgagaggccagaaaggagtcagggccatacggccctaaacaaaccccctagcctttgatcccagagaagtttcctgaaagtgtaactgctgatctaggacaggatcaggaaacatgaggaaagcaggtgtgggtcctggaccaactgccctcctgaggtctgtcctcagcagggaccttcccctgtgacttgtgactgctgggatcaggtccccatcatcataatcatcaaggtgataaatctgtccttcattgtcacaggtgctttacaaaagagtaagtgctggcacacagggcccaggctgggtaggcccatgagtgtggatggtgcttcccagtaaccaggcaggacacacttctaactggggcttgaaaccctcagtgggacaagaaatctcagaccccactcctcatccattccttacctgagttcttcttcctgcacatcacagcagaaaccacagctccagtgactacagctccaaggagaaccaggccagcaacgatacccacgatggggatggtgggctgagaagactgctctgggaaaaaaggggaaggtgagcgtccctgaccctcagcccccagcaccgaccctgctgaagttctccagagaggctcctgctttcctaagagacatgaccccccctccactcatctcctgccttaccccatctcagggtgaggggcttgggcaacccctcatgctgcacatggcacgggtatctctgttcctctccagaaggcaccaccacagctgcccacttctggaaggttccatcccctgcaggcctggtctctagaagctccatgtcccgagtctggtcctctccatcctgctgccaggccagtgtgatctccacagggtagaagcccagggcccagcacctcagggtggccttatagtcagagacggaatggtggatcatatgtgtctgggggagaggtctaacaggaagtgtcagaaaattcaggcactttgcatctctcatgagacactccagcagcacgcatgtggccatcctgagaatggacaggacacctggggtggggaagggagcacagaacccagacaccaacctggacacaggtatctgggataatctccgaattccgtggaaaattccagtccctgaggagggaacagtgacttctggtcctgacctgagtggaggctgagggactcagaagagctggactcagacccccacacacattgagtgtaaagcagagaacaaggcctgaggggaaaagtaacggggcccaaggctgctgctggtgtcaaagggaacccctcatcagtattccagggattgtcttcccttcatttcctcagagatttcatcccttaattgtatcagagagcagggcagaccctcagagtcactctcttgtacaggatctggaaacccaggaggattcctctccctcaggaccagagagaggacgacattctagtgttggtcccattttccttctctctttgtgggaagccagcccaggagatctacaggcgatcagggaggcgtcttgtgttccctggtacccgtgagctgcagcgtctccttcccgttctccaggtgtctgcgagcctctccacgcacgtgccctccaggtaggccctgatctgctctgcaaattcttctgcctcccacttgcgcttggtgatctgagccgccatgtccgccgcggtccaggagcgcaggtcctagttccgggctatgtaatccttgccatcgttggcgtgctgttcatacccgcggaggaggcgcccttccagccccaagtcgcagccatacattatctggagggtgttagaccctggccccgcccccgcggtcagccccgcccaccgagccccgcccccgccccgaccaacccgcggggattttggcctaaacggaaaatgaaacctggtaaaggcgcctgggcctctcccgggtcgaggatctggcgggtcccgcagcctcggggtggatcttggagccggagactcgcgggggggacccgggacgtccgtgggggatgaggaggggtcgtgaccttcgccccaggccggggtcattcaccggcctagctctggtggtagtagcggcgcggcatgggcaggttcactcttgtcagtctgtgcgcgggcctgatgttccgtgtgctccggtcccaatactccggtccctcctgctccaaccacggcgactgcggctacatcctcggagtcgccgcgtcgctgtcgaaccgcacgaactgcgtgtcgtccacgtagcccactgcgatgtaccggggctccccgcgacccggccgggacacggcggtgctgaaataccttatggagtgggtacctgggggcgaggaggggctgagacccgtccgaccctcctccttgcgctgctccccgggtcctgcgccccagtgcgcgggcccctacctcctccccgcagaggccatttccctccggatcccgcactcacccgcccaggtctcggtcagggccagggcccccaagagcagcaggaggagggttcgggacgccatgaccccatcctcggcgtctggggagaatctgagtcccaatgggttcgcggggacttctggaacagggaccccagcgacgccgattggcttcgctagaaacccgacaccaaatgggggtgagaactgagtccacatcctgagtgtccaggaagaaggaccctacataagttgggagagggagaagagaaactgcggagatggggaatccccaaccctgggcctccccaatcaatacatcgccttcggggcctgaaaccctgagagccacgcctggggccataggacttcgccctgaccccgctcctcctgtgccaagcgctctgtctcaatgtctccctgagtcttggcccaagagctgtc

SEQ ID NO: 11301 - DNA, 6000 bp, Homo sapiens
actccagctcgggtgacagtataagacttcgtctccaaaaaaaaaaaatgtatctttcctagagctagatagctttcttttttattttatttatttatttatttatttatttattattattattttttgagacagagtttcgctcttgttgcccaagctggcgcactctcggctcactgcaacctctgcgcccgggttcaagcgattctcctgcctcagactccagagtagctgggattacaagcgcgcaccagggctaggtagctttctatggaaaatgcaggggctctccacaccaggatttgaaaacttaatttcggccgggcgccatggctcactcctgtaatcccagcactttgggaggccgaggcaggcaaatcaccaggtcaggaaatagagaccatcgtggctaatatggtgaaaccccgtctctattaaaaatacaaaaaattagccgggtatggtggcctgcgcctgtagtcccagctacccgggaggctgaggcaggagaatcgcttgaacccgggaagcggaggttgtagtgagctcagatcatgccactgtactccagcctgggtgacagagcgagactccatcttggaaaaaaaaaaaaaaaagaaaactcaatttcatccccaccactcattactggttttgagactttggccaagttaagttcactaaatcgtggtaaatctttaaaacgggagcactaatctctacttagggagttgttatgagaattcaaaaaacaaaatgatgttatccccctgcacagtatctgtcacatagtacatgctcaagatatattagtctcaattttctcattagtaaaacaaagtaacgatacttgattcactggcatgcaacaataattaatttttgtaaagctccccaaacggtatttagcacatagtcgacagtcaattaataaaaaagtatgattaaatctacatcccctttcccagtcctttttctgccactaaatggctaaatgatgttgggcaaatcataacttacagagcactcagttttctgtaaacgaggggtgacaccagacaacttttatgatgctctgcttgtttaaatgtattactcaggactttcaaagttagcttttggatgctacacagatttacctgtaaatccattacatcaccatggtgtctgatatcacacaataactgatggtctccttcaaaccctccatcagagtccaagtttccaaaatctccaatagaccacagtgaaatataattttcctgtaaaacagaaagttttgtcttgagatgacataaacgtcaactctcggaaaataaaagttgtgctcccgtccggaaatgttgctccaaaacatctcaaatggtatggtgagtttaaaacacaacgagatacgaggctcaggcatgccatcaccggctctgagctacggagcaaccgcgcctgagacaggggtccgggggacctaaaagtgcgagaagaaccagaaggtgggagttggcgcgcggaaggccaggggtcagctcaaccggagagagggaggaggtaggggctcgtccctatcagcggcgatacctcattgtcccaagatcctgtagcgaacgtctccgcggtctgtaaacttcccggaggcagcggtcgccagcgggttttgctgattttctgggacacaaacttcgcataaatttcctccatgccgaaagcggccgcagcaggtactgcaaaaagcaagcacagtacgcgcctctcagcaccgcctcttcccgcggaaccctgattggatgggactttaggacggagacggtggctgcagagagtcaattctcgtcgatagccagtgtgggcacagtcagtacctagactgagaggcccacccatctcacagagcagctctgagcaaaggcaagagcgctttggcctttgagcagtaggacttgctcctaatctgcaatgtcagtattttcttgtgttcaataattgtgcagtgtaaaatttaagtgcaaaaacagaacaaaaacaatgcagtagaaaccaccttgaaaccacacctaagcagttgcaggtcactgcgcatagaaaacgattcaaaaatccttaaatactcgtggaagtacctcgaataaagtgccaacctactatcccaaacctctccctcttgtctcccaaacaaatactttgcttcaaagttaatacacactgtcagagcctggagttggaattctgaaagactccagttttagttttgatgccaattgcctagctttgatcaattcaattacgtgcatgattaagaatgaagtttgtgatacctattgtcaacggcccaggaatcagttttctaggttccttctgtgcttttggttacacctataatattcttcccttcctctttactcctcagaatcctgcctatccttcaaggatctgttctttcctttaccatttcctgacgaccccagccaatgttgatctaaatcaacaccattttttttcttttttaagacagggtctctgtggcccaagctggagtgcagtggtacaatctcagctcactgcaacctctgcctccgcctcccaggttcaagtgattctcccacctcagcttccagggtagctgggactacaggtgtgcgccaccatgcctggctaattttttttttttttttttggagagacgggatttcaccatattggccaggctggtctcgaactcttgacctcaggtgatccaactgccttgtcctcccaaagtgctgggattacaggcgtgagctagcatttgatatctagaccactaatgacatatattttggatatatcttatgttagttttctttagatgcatattcctcccccattagaatgtaaatcctactgaatacaagagatatgacttattcaactaaaaaatgaagctcttttacactataggtattcataactgtatgttggttatttctttaaaaagggccattatgctactgttgtttttatgtgatattggtagtcctacttcacagggacagtttacggaagcactgcatgtaaatgcaatccatctgggtcagctttagagttaccagtttcctatcaaggatttgacttttttcttttctccaaatggaagatcatcaagaaactgtagaaagatgaaatggaaaatattaagtgggttacagtcccaaatcaacaattttattcatgtttaatattgaagtaaagaacactgttttggccaggcacggtggctcacgcctgtaatcccagcactttgggaggccaaggcaggcagatcacgaggtcaggagttcaagaccagcctggtcaacatggtgaaaccctgtctctactaaaaatacaaaaatattagctgggcatggtggtgcgtgcctgtaattccagctactcgggaggctgcggcagaattgcttgaaccgggacctgggaggtggaggttgcaatgagccaagatcatgccactgcattccagcctgggctacagagtgagactccgtctcaatcaaaagcaaaaaaacaaaaagaaaccagttttgcctgtagtttcatttatggtcacataatcccagaaaataggtaatgttgattttggattggaagcaggccagtgtcacattttacaaaatcggataagaactagaatttgaaaattgtgctgatatagtggcacagatgtcttagctttgtttccttctaaaagattactggaggccgggcgctgtggctcatgcctgtaatcccagcactttgggaggccgaggcgggcggatcataaggtcaggagatcgagaccatcctggctaacacggtgaaaccctgtctctactaaaaatacaaaaaattagccgggcgtggtggcgggtgcctgtagtcccagctactcgggaggctgaggcaggagaatggcctgaacctgggaggcggagcttgcagtgagccgagatcgcgccactgcactccagtctgggcgacagagcgagactccgtctcaaaaaaaaaaaaaaaaaaaaaaaaaaaagttactggactagatgatggctggattctgtcagtctcaggtctaattaggagtcagcgatttggacgcgacaagcaatgttctcagtgagcttctcactcatggtcttgcagagctgagagcaataaagccacggtggaatttgtgaggcttaattaggtggaaatgcacacttacgtcgggagaataacacgttcaccaaaggacacagtggtattttttaaccaatcgcaactctgtacgttggtattattctaagggagcaaagctttgccccaacccccacccccatgtcctggtactcttccactctgagagctttagaaccggggttccaaagtctctgcttagcctaacagtgacgtgcttgtcacaaagccagaggccggtgtactcgggttagagagggcctttgtcgttgggttttattcttattgtattattcgggctccaccgacccaaatattagtcaactgggttgggcgaggtaggacggatgaagcccaccgtctaacaatctggacatctataggagcagatccgccgctcgaaacagctgacccagcgacgactgcggaaccactagcagcgtctgcacagatcgaccccgccatcccgccgtcccgctcggtgaccggagacacagccgggaacgcgactgatcaggctaccgagccgggccgcagggcgaaagcggtgcggtccgaggcctcagaaagggacacgcagcagcggaagtggcgctgactcagcccggcctccctgcagtcccctggcagcggtagcagccacaggggcgggcggctgggccacacgcctcccccgccctcggccccacccggccgcaccctaagccgcgcggcgtcacagagcgcatgcgtgccgcgggggatgccgggagcgcgcagtggcggcagcggcggcgacggcagtaacagcggcagctacagcggggacgcgagcggggcggtgacggtgtgggaggtggtctcactcttgggaaaactgctgggcaccgtcgtcgcgctgaaggtggttctgtacctgctccgagtgtgcttagcgatggcctggaaatccggcggcgccagccactcggagctaatccacaatctccgcagtaagtgccacctccgcccgttgtagggcagctggggcaggctgggcctggaccgggtccccctgggccgtccggaacgttctgtctgtccccgcgcgcctgttggagggcttcggcgcagagttgccccggtagtcccgaacggcgtgcgcttgcagtcgcctccctcgggacctgtcactcgtcgacgacgtggactggaaggggagagaaagagccaggggccgctgctggtgggggcaggggcagtcgtctccctgcaggccctgggggagggagtgcagtacaggtgatgctgctgtcactcaggtccgcgtccgggtccggcttgtgaggggcgtgccttcggggtgggagcgtgtgggctaggccttatggagagtgggctggcgctcaggagaccccaccctcgtcccctgcatttttctcaccttcctcctccataatcaacctcgctgcaagctttccctcttatgcagcctcccccgccctccgttttttcccctggagggagatgccaccgtctgatacaggcgaggggaggaagatgagagtattgccattgcagatgctgggagaaatttctcgggcggctgtccagtggaaagctccgtgcggggcggagaaagaacaggggatgctgttcctgagagacttgtatttcaggagcctttgcaggtcctggatcagcagagggttgtgtgtctgatgttctaacttttttcagggctaccataggctttaaaaaccttatgtggagtttctttatatcactctccttagttactgtattccttcttctgatgataattttaggataggatgagtgctgtgtcactttctt

SEQ ID NO: 11302 - DNA, 6000 bp, Homo sapiens
gcactgcccatgtgataacctaagcttcacaattgccacttgagtttcctaatctgtactactggacatttactttgttactttttcaccattataaataatgccataataaacatgttttgctcatacgttctcttcagcatagatgattttcctaaaaaatattccagaagtatgaatattttaatggtttctgccacatattttccaattactttccaagagggaagtaccaatttacaccatcagtgagctagaagtgtatataaagtttcccatatgcatgtcaatatgagtaaaacacttttttgctcatatgttctcttcagcatggttccttttcctaaaaaatattccagaagtatgaaatgaatattttaatggtctctgccacatatttcccaactggtttccaagagggaagtagcaatttacaccatcggtgagcacagaagtgtatatgaagtctcccatatgcatgccaatatgagtaaacctatttttaccaagttaataaatgaaaattggccttatttacatttctttgattctaaggtcgaacatttttccatgtttatccaccatacctcctcttctgggaagtgtctgctcatgtcctttgcccatttatttttatttttcttgctgactcatatatatatatatatatatttttttttttttttttttgaccgagtcttgctctgtcgcccaggctggagtccagtgttgcaatctcagcttactgtaacctccgactccagggtttaagctattctcatgtctcagcctccccagtagctaggactacaggcgtgtgtcaacaaaccaggctaatttttctatttttagtacagatggagtttcaccatgtttgtcaggctggtttctaactcctggcctccagcaatccacctgcgttggcctcccaaagcgctgggattacaggtgtgagccactgtgcctggcccataaactctacgaataaataatgtcacatttttcccagactcttgtttgcaattccttttgtttcttgatatgaagttttttataaatgtgcatataatctatcccctttctttgtgacctctttaattgatttgaaacctgtcttccttccagatatggaagtttacttcctttaagtttttttatgtatggagtaatctatggcttaatttaaaaaaaatttaattctttaatccatctggaatttgtgtatggtcagagttgtaggtctaaatgtactttccctgacactgccaaccagttatcttactattatttattaaatataattgtttataacacaaaagggagaagataagaatgtgagaaagtaaggcccttggagagggagagtggtcaagcatctgcagagggattaaccttgaatgggaaggtcaactcttttgtttgcacttggcggagacagggaaaggctgggggtggcagcaggtgggtctgcagagaggagagcagacctctgcctaatagctttgattttccctgacacacaaggcaaggggcccacttcccaaattcttccccgagatactggacttcaggctgaatatccagcaaaaaccacataaaggttatcgtccttgagtccttggaggttatattccctgctcttctggaatcctagcagctctagcttctacctctcctccctccctccctccctcctgctgttcttcactttttatcatgacatccagtcccccaaccctctagtcatgggcatgacccaaccaggttcctagaacagtatcatgtacatgcgtgccaccttcctaactcacaaagcatgtccccccttgaacctcacgacagcctgggatggaggacaagcagacaccaagtcctgggggcatgagcagggacttgtttgtggagacgccaggccccagaacttcaagcaccctcctctgttctacagattctagcaggcaggctcagtcactacaagacacctctctccagcatctctcactcattcctgcatcctcccgccttccctacctctaccctcgcagtcccagcctagtgatccctttctcagcttctgctggtgctgctggagaaagcataggagttcaggctccacaaccccatgctgtgtgacccttgggcaggttactttcgcttgccaagccttgtatacactagggattataacagaacctaggcctttgtgttgttgtgaggacagagtgagttcatgcgtgcaaagggctgaggacagcacctaacaccaaagtcaacaaatgtgggcatgaaaacagggctggtgtgtcctgctgtaagttcgtgctatcccatcaccatttcttcatggtgctttcatccacctcagatggatccagtcacagctcctctccaagggctcttctaaaccattttcacatgctcacaacccaaaaacgaacaattcaagaaggaaaaacttagtctctgaagcataaacaacttcaacctgtcaagcatctgagcaggggacacacaggacactggggaacaatttttgacctccacgcagagagaacaaatgagcctctacaggaacctgagccgcaccttccgcgtttccatgttgctgggacctcaggaagtctgagcacagcagtgttctcccagaaatgaggaccagcaccgcgctcgcctattttcatcccaaacatctacaaaacaattcctagacaaactcccctggggaaaggaagggcaacgaagcaagcaagaggaaaaacaacccagaaacttctcatagtaacctgaagtttttgtttctgtttctgaggcagtgtctccctctgttgcccaggctggagtgcagtggcgcaatctgtactcactgcgacctccaccaccacagttcaagcgattctcctgcctcagccgcccgaggagctgggatcatagacaggcgccaccatgccaggataatttttgtgtttatttctttttagcaaagacgggttttgtcatgttggccaggctggtctctaactcttggcctcaagtgattcacccgccttggcctcccaaagtcctggggttagttatgagccaccgtgcctggcgtctccaagtaatctaaactttaaaatttttgttctatggcatattctttccttgtttattttccttttcaaaggtttcctctgggtttataggaaagctcactttggcaatgtcagtttcttccaggtaagtagtgagaacacagagaaaagactttgtttctttgctgctgggatattttggtctgtgtttgggcagagaggatgtgtgtgcaacagccgtggtgggcctcagagatgctgatggggggtccaagtgaaagtgctgcctgcctccacttcagaaggaaagctatggagtccttcccagtgtttgcctcaaggccaagcagtcgcagggtgaccctttgatatctgctcccctgacaaggattctgagcctcatctaaggtagaggtggggagggaggcaggatgtgatggacacagatttccagactctttcaatggatccacaggttttggagaatccacacttccaaaggggctgagctccgcccccatcttgctgatatcattcgtgctattataaatcaaacagcaacagggcatgattaaacacacggagcctgaccacacgtgggcacaatcaaggtctcttattccctccgtgacattcatgtccaaccactaccatttttgtgcctcctgtatgtgtcctgattctctcattcagagcatctacaaaaagtcaaaccgtcgaatcagcatcatttttagtccttaagaaacacgctttaaagtttcctattttcttttcctttttttttttttttttttaagatggagtttcgctcttgttgcccaggctggagtgcaatggcgcgatctcggctcactgcaacctccgcctcctaggttcaagcgattctcctgcctcagcctcccgaatagctgggattacaggcgcatgccaccagctctggctaatttttgtatttttagtagagatggggtttcatcacattggtcaggcaggtctcaaactcctgacctcaggtgatccgccctcctcggcctcccaaagtgctgggattacaggcataagccaccacgcccggccttaaagtttcttattttcaacgaaaatcaagtcccctcttttcactttttataaaagggaccagaagttttcctcccatttttgtatgatgaaagccaccgcaggcaaagtcaggagagccacgtcaagaaaaaggagtgggtgttacgagaagcccggcatctaattagattttgctcttgcaattacttaacacaaaccatgccttatacaacccatgagactaaaacaaacttttttctctcagcatttctccccttttaagtcatatttccacgaatcctctcagatcagcctttctcttcaagcctagaaaaattccagtagcacgtcaccgcgcccgcccgcccgcttctgccaaactactgggcttcctcttccctaagacagagaaacccatgccagaaactcttctgggtgcccgcggctaaaataacttggcacgagtgtgtttcgcttccaacttggcgagggcgctgcgggtctcgagcgctctggccaaggccggcccctcagtcgcgcgcttaccctgccggggcgaggcgcgcgcggtggccagggcggcgccgtccggcgcgcggctgaggctgtagctgctgtagccgctgtgcagcgcgaacttgcagacgttgcggccgcgcgccgtgcagttgaagaggtagcagccgagcacggctgccgggggcgcggggcgccggggcagctccaccacggccacggagcagcgcggctcggagcagcaggccgccacgcattgccgccagccccgcacggccgccggcgcccgcaggaagctggcacccgccgccagggagtccttggtgcggatgatggcgtcaggcattgcgctgtagccgccgctgcccgggcccgggcagtcctcctgggggccgccgcccgcgcgcagctccagctccagctcctcctgaggccgctcctgctgcagttgccggcggaactcctccagcagctgctccacgcccgacagctgcgcgtgcagttcggacagcggcgccgcgggcggcaaggccgcacggccgcttggcagccacaggcagagcagtagcagcccgcgcagcgccccgtgacgcggcggtagccggcgctgcgagcccgcgctctcctgggcgacggaggccatggcgacgagagccaagggcagcgagccgaggcggggctgagcgcgggaggaaggcggggacgcgggcgagcgcgggccctgggcccctcctgcgcggccgcggctggctctaggccccggcctcacagcgcggcgcccccgaacccggctgctcccccgaggtcgcgggcgccggcgggaaccgcagtagcgggagacatagccggcccagccgggcaccgctccttgccctcgccggagactgcccagcgccctgcgcctctccgccccggcctgcggcgcgctgggtggcgacgagtcggcctcggcgttgatcagcaccaggtgtgtgcgaacagtggccgcggcggggtggagccttggtgagccccgcccccccgcgcggccccgcccccgcgcgtctcgcgccggctcctccagggctgggagagcaggccccggggagggcagcctcagaacaactttgctcccgcgccgctgcccagctagggcagggttcatgtctgggcccagcaggctttagcaaccaaccacacctgcccagggcgcctgcccacaggggcttggcattcgggggaatgggggcagtgggaagggagggcctgtcttcaaatcctcgtgacccccgggactactccagagagggggcacgcgcacctaggaccaccgtagcgcgtcatcagtccttcacctccagcgtccctg

SEQ ID NO: 11303 - DNA, 6000 bp, Homo sapiens
atcccagggagaagggtcctacaccaggaacttcccaaatgtccttaaaaaaagcaaaaggaaaggttctgggattagcaagaaaataggcagatacctgggtggaggagggacaaaaatgtacttgcaaaaaacaggagtgtgggggccttactaccccagggctcggtccttttgccggaagaaagggaggggtctgtccgtctgtgggcgaggcctggagccacaaacccaatcactggactgaatcaccccgcggagaagaaaagaaggcggagcctgccgacctggaggcggggttttgtcagagctggggcggtgcttatagaggaggcggggttttagggaccaaaccgaggttgctcggttgggggcgctacactttgagggtgagggggcctggagcgactgagggtccggcgtttggccgggatcccggaaagcggcgtccctgggggtgtgggttttggaggggttcctgaggaactggattccgagcttgctcgcaaggcgagacgttccgtggaggcggagtttacgatgtatccaagtctgacggccccagaaacgggtgtgcagggcgcccattgggtccgcggtatgactgcagaaagagcctgggagatcgaggggcgcagagtggggccggaccaggggcgtttttagggatcccagtagttctcgtggtgctgcgcggcgatgatgatgactacggtgaggatggtacagagcaccatggccgcgatgcccacggccagggagatgaaggagaagttccgggcctcgcgtgaagcgatctcggccgacaccatgtctccgcgggccaaggccgtgcgcacctacggaggaggggtgggggaaggaggtcaaagagctgcggcctcgttcgaacgcctcagcctttctctaagatggtccccagaacgcccagaactccctgtccccgcccccaaaccgagtatgcccctgccccctacctgcacggccttgaagatggcaatgatgccagtaggccagaagcaacagatggtggtcagcaccgcgatgggcatgtagtcgtgtggcgggcgcctcggctccagtagggccagccctgggccctggggcggcggggggagagtggaggtcactcctgttccccccggggtcccgcctgcatatggctgtggaaggaaatttggggggcaggggcatcactctgaccctctcccagcctaccagcgttgggcggctggcagagtggctttaaaagcacaatttttacctatggcttctcaaaataaagcacccattacccttccaggacacccataaattccacctaagcccctctcctcccttccttgcttcattaaccaccatattcttgggctttctacattctctcccgcaaggtatggtcccactggggctgtcctggcctcaggtcagaccttctttcttccctccagacacctaccaggcctcccctacccccttagtcccaggcttctcccacatccctcttggttcccagcttccattccccccgtcccccgccaggcggtttcctactttcagacctcctctgaacctctaggctccgatccccctcccaggccctgactctgggcaccagtagactcctactcccgtgtctctccctagtccttcctgtctcaggctcccttctttctagggcttgtcccgggaacactacctgttccctgcccttgttcctctatcctaccagcccccagcgtatccccaatttcaagtcctgtatcgcgtccccctctttcccatgtccctgtctgcccggcactcaccgtgcccaccgggtagaccggcacgtaagcagtgcaaggctgcagctgcagggggtatccgggcgctacgtagccccccagcggcagcgtgcccacagtccccgcgtgcgtgggcaccacgaagccaggggcctgggcagtctgggctggcgccggcgggggcggggcggcggcagcgggcggcggcgggggaagtgggccctcgaagcgagtctcctgcaggtaagggtcgggtggcatgcggggcaaggtagcgcagccgggtgggggtgccccggcagcagggccgggaggggcgtggtgggggggcctcggcagcgtggcagaggaggagggaccgcgctgagcggtggccgcggaagaggccaggccccctgcccctaagcgcgggagggtggcggtgccagactgatggtagtggtggtggtggtgatggtgtgaggaaggggctgcctgtggcggtggggctgggggttcggctggaggctgaggggcattgtagggcggcggagaagtgtgagggactgagtctgggagtcctgggggaggtgagtggaggagagtataagaggaaagatgacacagtgatgagttgaggagggggtaaggggaaacacagccggtcagggatggagaaagataatgggagagacacatagagagagacgggtgagaaaccatctctaatttgaggggcaagagaggggctgtatctaggccatctgcccccctccttcttccttccaatctagttttgaggtcacaactctggtctgcttcttttctgtctttttcatcaccatgcacccagctctcacctgcagacctaatcccctctcctttgctatagctgcctttgggctggcctatccgagctagtcctgtgtgtgcgtatgcgtagacatgcaaccctgtgttaatatgtgctcaattcaacagttgtataaacacatgtgggatgacatgtgttccactctgctgttccttcagtggggggaggagtgccccagcctctgtgagaatctcgggacctcttttagggcagattaagaagagccctctggattttgctcccttgacaacccccatctggtcatgtctccatatttcctcacaggatgtctccatgccagccagtgattgtccatctgtcactcccaatgatgccatccctgcaaaacctggctgtacctccttcaccctctcaacctacccccctgaccatgttgttggcaaggggcagaggctgccactggaaagaggaaaggaagagaaagggggagacagaaagaggagggggactgggggagtgttgagagctggagagaaggggaatgaaatagaaccacagctgaggaggggtaagggagggggttggggcaagggggacggagagtctggagacagtggagggggtgggaggttttgttattgtttttacctgacttttcggatgacatgcctgcggtctcgctgggacagggtccctgcagccggagtgggggtcctcggccggtgctggagtctgggtgctggatggcgcagccggcagcagcgcagagatggagagatgaaggcagcggcggggggggggggcggggggggcgggcggagggagagcggggagggggggagcttaaagggaccgaggcgagggagggggagcgcttcagatgtttcccactcggtctctctctgctctcggaccacctctctcctcctcttaccccggcattcaagcccccagtttgggttcctttggagttgtcatggaaacacggaggctagaccaggcgaggcgggtgggactaaggaaaggaaggaaggagaactctctggagtctcccccaccaagactcagtgattgtattgtgggaggaagtgaacaggttctcagtggagttaataacccaggtgcctccagaggcaggtcgtctccccctcttagctccctgcaaggtgccagggtcttctcccaaatccttggccccagtttcctcctctttagaagagataaatacttgtgtgtgagagagaattgtgcagagttcagaactgcgatggtctgaaaagttcccagggtttggtgaacctaccaacctagcagtaaagagggaggcccaggtctgtaaatcagggggagctgggccttggagggaaaagggagagagagtttgggcggtgtgcatacataccttcttcgtccaggactaaggagctgaagctcttttggagggggtagggggtatgacttaactgctcatttctggcagctctgttggtaatgtgtgcttgttcccccactttccctttgcttttgaggctgcttagagtctctgggctggtcaatgttcagatccattccctaaacccccctactcccacccaccacctcccaccaagacgcatctccagctcctgagtcgacctgcagtacagcgttattagtctttttatttgcttattgcatcttgggagcgcgtgggtgggtgaagggagcgaggataggaagtctatggagatttacaccagtttttttttttttttaaacaaaaacacagccagataattattattcttcccttacgtccccccagcccccacctggggcagtcgctctcccggctgcgtcccttttcgtccatgtcctagcagagactacagagcagtacagaggctctcgctgaaaccagtcccaggctccacagagtcagatcacggcttcacaccagtcgttctggtcacttaggcgttcgcgtgagcgctcaaccccttaccgccacctcatcgtcactctacaccattctgagcgcaaaaatgttttgattgagacaaatttagaccaagcaatgaccttgtaaacagagagaggggctcagacatgctgagaaatccttatctctagagaaacgtctttaaatgctaagtaaaagccctagcaagtaaaagccctgaggcactagggtgtcggttaggggtcacaggcggagaggtggggcgcctgggggtttcggtagggagccacccacagataactcagacagccagattctgggggtcgttcaggttgaaagactggtcgaaattacgcgggcatgagtcagcgcatccctacgcgccctccgccccttgagggtgggtcgcttatagggaggggagtagagtagggcaggagaaactgggccaggctgcacttagctcaaggggcctcgaggactctctgcgtctctggagacaagggcactacacgcacttcagaatgaagagttgtaagtcgctgacctggggcggactggagggtggggtggggtgggtgttgaggggcacgcccgggctggcatcagccctccaggccaccctgccactcacccagcacacggcaaaatgcagaggactacctttccctggtccgccccctggccgccccttggggaatgcaaacttcgtgttctgctgcggagccagacgcctgtattgggaagtggggagaatcaaggcggggaaatcggacttttgggtcgctgggggcaacgaagcctggagaggccttctttccattcccagaatatgtttgctgctttttcctctccccactggcctaaatggatcgctccgcctgtttcctccccagcacctagggcgcaatggaatattccattgcccctcctgtcctgggtctgtgttgcggggaacgctcgcgcggttgccagagaaagccccggacgtgacggatttgcgcgaccccaagcagcccgcccttccccctcccatccgtcattcccctgcgctctctttcctcacccttccccccgccaccgtgggttccagacttgggataagtaaacagcgggtggagcgaggcctacggacccaggccaggtgggagtctgcactcttcaaggggcctgggctgctgctcacgggtattaaagaactccgcgttgttcatggctgaggcgatgcattaggaagatcctggacctagagaacaagtcccccgaacgctgagttggaggcgggacttcgggtgcgcgttggtgcgtcaacgtggtgggggggtgtgtttgtagggagagggctggagtaagttaaaagtaggctattttgtgacacggacctggtgtgggagcgagaggaggtggcttgattgccgggcgtctgttccgagggaggagggtgttgccatctccct

SEQ ID NO: 11304 - DNA, 6000 bp, Homo sapiens
agcctccagagtagcagagactacaggcatgtgccaccatgcccagctaatttttgtatttttttagtagagagggggtttcaccatgttggccatgctgatctggaactcctgacttcaagtgttctgccagcctcagcctcccaaagtgctgaggttacaggcgtgagccactgtgccaggcccagttctctcaattctgcctttctctgctgttcagaacttaagacatttactcatttatactcctgtatagtctcagtctatgctgctacatgctgccttcctggtaactcatcctcagtatactgtcctctctgggaaacattttcatcatgctgtgtagacctcctgttttcctttttaaaacaaaacccccaatcttcatcttcctcacagaatgtgtcagttggcttttctggaaagcggatgctaaaatggaactaggggtgtaagaggcttattggaaggtaacacctgtgaaagatgaaaggcacaggaagcaggactggaaaggaaaggctcagaccacaatgcacatctgacaagttcccagtcaactcaacagcaagctagagaacaaggactgatgattagaagggctctgcattgcaaagaatggccaggcccaagtatctcggctgagctttgtcactggctggggatatctgggaaaagcatggagtagggcgactgtggtttacaataatctattgttatattttaaaatagctagaagaaaataatttgaatgtttctagcataaagaaaatttttaagatgatggacatcccaataacactgatttgatctttacaaattatatgaatgtattaaattatcacatatatgcccaaaatatgtacatctattatgtatcaataaaaaataaaattaaataaaaaggctgaggcaggtcctacaggcactaaaagttggaggctgtcagccaactacattcctcatggctgaatatcaaggtctttcttgaagggagatcagagagacacactccaaggtcacctcacagatcaattcctccactgtctcatctctgcagtctcaaacttcagcatcctcctctcccaccctaacatcgtatctttccaacttttactcccttactctcattatatttgcttttcaattgtaaaagttccactcctttattcccatgaccttctctccacatttcagctttgccttgatttaactgctttttccagataggctacacccagtttcccatcacttcatctattcttctgccaatatccttacattctttgcccctttttcctgtttgagtgcccacactgcaaaaccctgtttatctatctgccttctttcttcctacactcaaactgctggctacagctaaagaaaaccatataccaccgcagattaatgtcacatggtttccagtcttagctgaaccctaacactatacagaaatcctatagttaggtatttccttctcatatggcatctgaaaagaaatcttctaatttttatttcacagcatgttgaagagcatggcggaaaaggcatgggctttggagtcacatggatcagatttgaattctagctctttacttcctgtgtgaccttccctaacttctctttggtcttttttccccatctgtaaaatggaggtattactaactactcaacataaaataggtaactggtttagtgagaagtctcaaatcattggaagtatatactcaaagttttttctcccccaataacactgccagctgtacactgttgaaaatccccttttccactgagtacatctcaatccaattccccaacattttgaacattttcagctttcaacagtcctcttccccaccagggcaggtcaggtaggaggctgtgtgtgggtttgtgtgtgaaggcatgatctgctttcttgaatccacacttccaaccttctatttactgttccagtgtctgaaaaagcaggcagggagggaagaatttgtcttcttatgcactgtccaggttgctgtcccaaacaagtaaatgatcttgtctcttttcatacgctcaggatgaccaggtggttaccataataagttccattgacaaagatgtcagtcctaagcagttcctgaaaacattgatggtcctttggaagacttcatctgttggcagaattctatccctcccacacccacttcctatcccaaggactgcttcagtggtccatatcataccttctttcttattggttattgcaacccaactctggagtcaaaggtacaggtgagattcattttctgtacctcccaggaatcagggacttgagataaggtgtccttgtcttggcctcgccataccacctagctacctctccctaattttccttcctttattttggtagcactgggtaggaaatcacagcctagaatgaaggtttctatgaacttggctcccaaaaatttggtatatatttgttaagagtgtactatttcaccataattcctggactaattagtaaccccaaagggtcaggaaaagatcccagtcactactttattctgatacatgtatataaattatcatctacaactgacctggcctataccaatgaatgttattttttcttggtgagctataacagttacatttctaaattgtatgtttgtctgtattaccaatataggatgtacacatacactgttctaactattttacaaagattaacatgtttaaaccccacagcaatcctgtgaggcagttatcattataatccccaatttacaggtaagggaattgaggcacaggttaagtaacctatttgttttccattcacctatttgaattctacctgccagggatccaattaagatagtcaaatccatcttcaaaagaaagagtgtttttttaaattataaatgatttttgggattacaacaatccacaaataattggataacttgtcacctttgtgatctggaagaggttgtatagcatggtccttgatacacacttgatatacaagaattgtctagtccttggaatcttttagaattcattcataaatctctttctatgtagtagcaatagttctttaggaactatttcaattgttattggttggtttacttttcctacatattgttgggttcttttgctatttatatattttatatttttgtaaatataaagctctcttgagctttcctcatattatgcatggggtttccttctcattttatttattttttagaggcagggttttgctctgttgcccaggcttgagtgcggtggcacaatcattacagctcactacagcctccaactcctgggcttaagtgattctcctgccttggtctctcaaagcactggattacaggcatgagtgactgcacctggctcttctaatttaaaaatatcacttttattcattgtcatatccctcttcagttctgtagatgatgtttgcacaatctgataaatttgaatcagaaaaacacatgtaagatagctcaacttaatcagttcaaagatttatatacaaatttaagaattataaatgcaacacttatttttcagttttaaataatgtctttttttgaaatgagacattttaaacaaatagtttaatatagtttggtattaaatgtggcatttttagtactattttcttcttttgtgatctagtttatattcttaaaaagtcccctcccaaaacattaaatatcctaatttcatctgagcaatgatacttatacacacacacacacacacacacacacatacacagagtcactattttcattacttatatctgcacagaacaactgccaagattgaggtttattgaggttcaacgataactgtctttgcttttaaaattctccttgtagtcctaacacactgtcacaacaaaacaaaaatatggcagtttaccacatggggtttagtaatggttagatagtccttaggttctccaacttgtgttatgataaattttaatcattctgaaaaccatggctgtatcataccatgtacatatcatccatgtatcatggatttggggggaagcattagttcagtatatactcagaattcatatgattaaaagaaatggatactttagcaacataatattctcacttagtatttcaattagttctaattgcattagccctctatcctcccaagtttaattactagggacacaaaaatttcatatttggtgccaagtgccaaaagagcaacatgtttttactgtttgcttttactctgtaatagatattgaaatattttagatactttcaccttcgcatgtactttttttgtgtgtagtagcatgccctttatattgataaaaagatgtagaaaacccgagtaaacgattttctttaaacactgtttagaattaggaaattggcagttttgaaataataagtgtattttaaactcgcaaaggccaagatatttctgtaatattttatacacttcttagaactgcatcacaaatgaatttcaaaaattctgttcctgagactgtggtaactacaaagcatgaaaaaaaaatctatacatagtgctatagcttctgctaattttctttttgggacttaaaaaaatctatcctcttcaagtgttagataaaacgagctagtgcacattaaaataataaaaaggaaccaatcacattcgtctttcatgtttctgtatctttttatcatcagaaacagctgacccttggctaacattacatgatttggagaaataattggaagtctaccacagggagactaaatgtaaaactccaatcagataaattacaacacggatgtggtaagtgatagaacacacacctaaatctaatttaacttccaagaattttaagtagtatttcccaattaaaatgtctttaagggaaaaatgcaaatatgaggcctttgttagcaagattccagaacaggaaaagcggaactcaaagcctctctagttaagcgacctgcgttccgacttacctctgagtgatgggcctactgcagagcccgcctcccaccacagtgctggcccagaattttttatacgaactagttcgtaactaaacgttggaagcatcaccatattgccagtgagaagtaagatttaaaaataaaacgatgctgtcccttttcgcccttccttaggacgtctcctcctgcactaagggttcaggtgaagggtggaaactggccaagaagaggaagaacgtgaaggagtagggggcaaggaggaaagggctccctttacagactttggtgccatttttactttctgcttgctaatctgaaacgttgtgcgattacaatgacggcccctctccccctcgggtactaattacccccgggccttttccggtgcacatcccggtgctatattctggtgcctgtgttgcccccacgcccccattaaattagtaaaggaaaaccaccccttttctgcccctaaagtaatctataaacgaaggaatacagatgaggatttaaatcccaatcctaattccaagggaggctggaagccccctcagccgcgccctggcttggctttttcatctcgagcggttgtgacgccaggggcaggtcttccacgtgtcttcacagaggtgcccggagggagggcgtgagggattacccaagggaggggcgagtatcgcaaaataggccaagtcgctgccctctactcaactcgcagggcgggaggatggagacagagggatgcggcgggagggcgggacagcccagtcgccgccaaggaggcgaagcggggtcggggtagctcacccgccccccgcagtccccgccccccgcagtccccgccccgcgcggcgccgcgcacgcctgaagtcattgcccgaggccccgccccctcgcggccccagccccggctctggctctgccggcggagggggcggagagaacccgcagctgcaacttcgcctggagcctttgagcctgggctcagccggggatctagcagccgtca

SEQ ID NO: 11305 - DNA, 6000 bp, Homo sapiens
cagcaccctggagagggacctgcaggtcactcaaaggtcacagctcagccagccttggacacggaccagcctatagccccaccccctctatctacatgccagcctagccgagggccactgaccgatcaaagatggctcctactcctgctgaatgggctgagttgcggtgcacgtgaagacctgtggcaaggaggatgccatctcgaacatcaatggatcggtgtgagaaggaggcaatgaggagttcattccagcctgggtggggcagcaagggtcaggagccagaaatcaggccaagggattcaaagcacatcagtggaagagaaggagaaaagaggtggcgaggtcagcaagtttggctccctgggtacgcaaggtaaggccactggggtcactaaagatcgggaagtcaaagaggggtcaaatgtcaagaagtcaaagggatccaaggtcactgacctgcccgcagcaatatgacctgatcatccagaggcaaggaggaaaagtgtgggatcctcttcgcccactcaacaagcgtgaatagctgtttgtcagctgcctgacagatgttagtcacagggtcatttggctgcaggggacgggggtaagagttatggaagattttgagatatgctgggagcccccttgtaagaggcttttgacaccccctccttacatatagtcttcctgtgagccccatccaaaccaatccctgtaagtgagtcttctcttctggcattagtgcaaacaattatttatttgggacatgcctatggttctgccagtgggttgtttggggagtggagacagaaggagctatcacatccacctcagatgtttgaaagaccttgtttggcagcacctccagtcccaagtagtgttaggaaggttatgaggggaaaggagggggaggggatgtagaacagacctagactgcctcccccaacccccatcacgaaggagagtggattgaccccaacactcacgctgctgccgctacccccggttcccccaggaccctcaacgccctggtcactcttctgttccacagcaagctctgcctccaggatcctgtccacaggcatctcctcgggggctcccccagccccctccccatccccatccttgtcctttccccgctgacgctcctcctgtaccgctgcagggggaagggggagagaaaaaatggaaagtcagcagccagccatgaaggggttccacaaatatccttacggcctcatcaggatctcatggcccttgggagatatttataggaattggggaagtcactagaaagggtggactgggggcagccctgaaggaagggttataaaagggcaggtaagtcagtcgggaagggtgaggtaggtaaaagaattagggaggaatttaaatggagagcctactacatggttaaaaaaaacatgccaagattcaacctgagaaagctgattgaaaaaaaaaatttttttaaataaaatatgccaagaaacatgctaagcacattttaccattcactcaattatcataatgatgctggaagcatttattctcatttttaagatgaagaactcggggttcaaagagattagtttgcttaaattcatataatacatggcaggtcatacaactgactctaagtgtgtctgagtgcaaatcttgtgctcttctgactcaacaaataggcagtgaaaggagcactggcctaggtctttgaagatgtgggttctgatcccaaacctgcctgccactcctttgttgcatgaccttgggaaagccaagcctcaggctcatcttctctaaagtgggtgttttgaccaagatatgctctaaagtgtctctcagaatcctaggaatctgacttaagaagataagatggagacacagaagaaggaagggaagccctgaggtcttcagtaaagtctgtaagcttaagagtgcccagtcccaggagttagaggaaagatcacagataacaggagacagagaccagagaaggtccatggaatcagaggaggaaccactcaggttagaaatggggagacagcccatcatggctaaggaaaagttatcctatcctaggatcagtctagggaggggtcatatgtgcaggccacagaggcctaaccattaagaaggaaactcaagggccagaacagggtaacagggaggagagctgcgaagggagagagaaatcaaatatcgccctctagaggagagagagcagtccacccttccagagaggtacacagtctgagtgggataagggagaagggcatgtggtctaagacgcctgggcagggcgggtccttaccctccctcttcatgccagtggccaggcacttctgatagcggcagtactgacagcggttccgctggcgcttgtccactgtgcagtctttgttgtcccggcaagagtatgtaaggtctttgcggatggtgcgtttgaagaagcccttgcaaccctcacagctgtaaaccccgtagtgtttgcctacagggaaaggggaggagcaataagaaggttgcatggagacaccttcaccatttagtctgtttccaatctccccctagcaaaacttaaagtcctccctgtttgccaaatacagagatagggaaccaggagctgagtgatgatccagtcccagtctcctcactgttcagaaaccctacacgctgcttccttttccctctgaccttccccccaatcgcgtcctacatctcagcttcagcttctttactcccatcaggcctcccccaggtcacttgctctgaccaaactccataagccctgggaatcccacaggtgatgatacatggcccagactctccctctctgttcatcctctgagccacatacctgagcttctgtccccgcagattgcacatagccgtttgccagccccagggccacctggagggggtggacagtgcaggccccggacccctaagactggtggcttcacatcttcaggggggccagacccacccccagggagtgacactgttgagttaatctgggatgggggaaatagggaagtcacaggaagacttattgggaagcagaatgtcacagaagtgatggaaatcattccctaccactaagcaaggccctgcaatgcacattccagaggctgtcatttacactgcagtctatgtgaaaggccatccctggagcacaaccccaaagtgaataaacaggccccccctgaaattgtgcaacacagtgaccctgaagggcaggtgtcttgggaaagcagatgggatcaaaagggcagaaaatcagatagatgaaaaggacatcaagaatatcagaattagccgggcgtggtggtaggcacctgtaatcccagctactcaggaggctgaggcaggagaattgcttgaacccaggaggcagaggttgcagtgagctgagattgtgccactgcactccagcctgggcaacagagcaagactccatctcaaaaaaaaaaaaaaaaaaaaacacacacacacacacaaaaacaaagaatattagagttcttttaggggaggaagcatgcactgaaagatcagtcacctcaggaaaggcaaggggtctcataaagaccacaggcctgacaaggttagaggattggaaggtcaatgggccatggggaagttcacacaaggatctggggttacaaggaaaacaagaaaatgaaagtggccaggcagtaagttggtcacaacctctcacctgggggctgctgacaggcccggagaatcctgggggagctggagggggcagaccaggggaccccatggaagaactgatgactggaaagggagagcccagtgggggtggtggcatcgggggtgggggtggggccccagagcctccaagggatggagctgttgaagggggtaggggtggcccaggaggagaagggggagggactccctggggaaggggatttggggaggagctgtctgggcttcgggagtctgagggaggggtatgtacaggcacacagacacacaagagacagaagagacaaaaaaagaaaatgagtcttcaaacatccaactagagactttaattctctaataccccaccgtgccggacccagcccactccacccatccccaagttcagagacaccctgctgtcaaacaacagtgtaactccggctggtccgatggtagtgggttatcagaacttattaacatttgtgtcactaaaattggtatacaacctcccactgctatatttgactggctaaaaaaacccaaaaacagcgtaactcctcattgtggtgagaggagggagttgacaaggagaggaggatagttcaggtgaggaaaattttccaaccaatccatttgaatgaataccaggtcatcccaaagccacacctgtctcgtgggtggggcagcacgtggggtagaccatcgagcccctctattcccagcgtaaagccaggtagccagagcgtgcaagggaaagagacaggcaggagagacccctcctaagacgcaggatctgcctgtaaacgcccaaagtcctgaggtttaagaggaatcgtgcccttcccaggcccgcgacctccggtgcccaaggcctcaagcggtcacagctaggagggcggaagctccccttccccgccccgccccgggggggagggtgctaaggccctcgggagggaggggacgcgtgtttacaaacaagggggcgggagcgcaaggaaaagagcaccgggggagggtgtgggggaggggtcgcagataaagcggtcactggctcgcctgcccttctgctggggcactcaccccgcccgctgtcgcccatcccgtcccgtccagcctcccctggctccggctccggggtttgttgttctccgcctgccaccgccgccgccgccgccgctgcgggatccagccagggccgtcgccgccgccaccgggacgcgaccccacaatgcatttcttttcgcacccccaccggcccacactgccctgcggcatgccgctgagggaggaagggcgggcgagcggcccaagacatgatccctggctgagagtagggataccgaagaggtcccagggattcccaaggattgatcggaggattagctgagcacgaggaagcccctgagagaaagactctggcctggattgggtcgaattaagcccgtcgctctgctcagtaccaaaatgacagcgccaatgtggcagccatctttgtacagacgggaagtctcggcgcgagttcccgccccctcgtctagttggaaaccgaggaggcggtctcctccggcctgttagcccgcctcgcccaccctcccctcaaatcacctccacactcgcgcatgcgtgtcagtgcaggatggattcgtcgctaccggagtgccgccatattggtaaaggcattagggcgaaggtggaacggaacttcctgttctcgcgggatctaaaggcgggactgccacgtccaagcaaaccgggaaaggagaggatcccggagccggtgagaattctctgttttttctctaccatcctttccaggccttttcctcacctaatgagtcgtagagacgagggcccagagagtctgtaaagtggctggtgaaagattagtgtcccagggccctacatccgggaggtggttcgggataaagagaactagtcttgggaacaatgtaggtgggaacttaagggaatgggagagcggcccatagaggtggacggagggcgcgattggagtaaagcggaccctgtgtaggtatagagttgagtcaagtggagtcactgcctctgtccctctggtcagcgtgatggccagaggcctgggggccccccactgggtggccgtgggactgctgacctgggcgaccttggggcttctggtggctggactcgggggtcatgacgacctgcacgacgatctgcaagaggacttccatggccacagccacaggcactcacatgaagatttccaccatggccacagccatgcccatggccatggccacactc

SEQ ID NO: 11306 - DNA, 6000 bp, Homo sapiens
caccaggggtctgagggatggtgactgactgcaccacagcctgggtctgctgcagtgtcctttccagtccaggccccactcaaagctggcctcctcctatatcacccagagtgtcagccaaagcaataaacttagatgtggaatgtggtgttgctagaacccagagaggctcacaaggtagtgtgcatccttccttctggtgaggatgcaagatgcaagtgtgtcttttactttgtgtgtgtgtgtggcggcggggagctctgcatgcccctaaccactggacccataacacttcactgcagtggccactcttgaagctctgtaagttttatcttcaccttctgtagtgcacatgttttgccagggaattcagcgtactttcctgctgttgttcatccttcccaatttatgtgatattgccaatgaaatgaagagatttagtattctgtgggatgtctgattcgtccaggtctcttaaggtgatatttatagaaggttgaggagttaaggtagccctgatgcaagctatcaataaatgtattataaatcccatgtgaatgtgaatcattccatatccatcttctaaatgaaatgggagggaatgcactcaccaaatccacagctgcttgccatgtgcctgaggccttattaatctccccaggcagtgatatccagccagcatggcagctgcaatcaggactcctacttggtcaagtctggagtaattccattcattctttagccatatcaggcttctgcaggtacagattgctgagttatatggagataacaggcaatcccaacaccaccccacatcgttcaggtctgtaatggcagtgccacccctataatacctgcagtaccctccacaagacccaccctgaggcacaatattgcttctggtttggcttggatgagggatgtttccctttgggcttcagcacagtgagatcccttactctccagactagggacacagtgtggggtgactccagttgccagtgcatcaaggccaattatgcactcagagaatggggagataaccaggacaggatttatggaactggtgattccaccatggggcataatgtatctaggtttattccctggcctctgtaagccccagtgtgatgggggacataatggtgctgtaggaatctgggcagcaatgtcagctcacacccaatgttaatacttatcccatctcctgattaaatggctataggctcctttgcagaagggctgatggaattgtcccagcatataaccatcatcgtgtcccaaggttctttctcttagggatatagatatgtccttagtcactggattctgaatctgaagcttgctcctcaattccacatgcttatcatagatatcaagcagtgcccttgctgtctgcccatcttttctgaccctgggacaccaccctttattaaccttccccacaactccttgaaggtcaagcccccttggctgatactctgggttatcacagtaaatgtgccctctatcttttgcaggtcactgaaaaggagggttcctaaagcattcactcctgaccctgagggaggtgggtgcactcactccaggactcaggttcaccacagataagcaaaaaagtcctcacattcaaaattgtcctgggccacatgcagcccacgagccgcgggttggacaagcctgcatctagaacgtatgcaccataaccccagacatttttctgtttttactttaaggatgctttctaaatgcaaaagcagtcatatccctagcagacaacaaatgtcagttgaatgaatgatcactgtagagcacctccctattctaaagcccatatctttattaatgtagccacagggcaaatgctgttttgtggcagctaaagaacataagttcacgtggacatccatgccgccagtgcttttctcaccagggctgcttgtatgtcctccctcctcccacaccaaccctcctgcacacttcagcacaaaaccatatatttctcttcaggaacaataaccctagccttatgggtacaattttccaaccacatatgaatctaaattagactctgctttataaatctatgagtttggattggagccagcactaggattactacaactcagagcaggaagaagagtaggagggcagaagaggagttccaacagaaagttaaccatgatgagaaactatgggacccctcctctctgcaaatgtcacaatctggttcctttaaaaagattggagaaaaatcgaaaataccattaaggaaaaagccctgggaggaaggcaagacctggacaggtctgaaaatttgtctcttgataccacaaggagatttgtatgcagggaccaccctaggtgacatccaactccctgtgatcacaggtcttggtgggacaaggttctactgaagggccaaggacaatggagcagcaaagatgacccaggtgagctgtgaccacataaagcccatggtggccagaacagaaactgggcacagccccatctactctcctcccctgcaacaaatcagcacaagaaacacgtggactctggaaggttctcatgtcttccatttattttgtctctcaaattttaggaatcttctcctttaattaactcatcaacctctcatggcaagaatttgagaaagtaaatttatactaaggttctaattttaatagggaaggaagaagttacagctcagtgcaccatgaagttgagacagagatggagacacctcagccccacctctctggaacaggaaagatgattggggagggagcacaggtcagcgtgggaagagggtcatggtggacatgggggtggggtggtctccccacctcctcacattatgcctacacgaacacagacacatgcaggtgcctttgcagaaacaaagtcagggttcttcaagtcacaaagggaagggcaggaacaactcttgcctctcagtcccacacaaggcagctgtctcacactatagaaaaaaatattcatgaacaaattcatatccatcacagtgaggggtcacaccttaaacagcccatcgcatgctcaatacatccaatgcaaagaaaccccatagcacagctgtgtccactgttccgcccaacacccaacacacattaggtcctccaagctctcacctttacaagctgtgagggacacatcagagccctgggcactgtcactgcctggggtagaacaaaaacagaacctggtcagatcccacagaagatgtggctagaggaggaattgtgaggtgggtgggctcccccatgggctcccaaacacaatatcccaaggacctcaggcatcagcctccttcatacttacttgcagcctgagtgtaactccctccttttctatctgtgagaagaaaatgtcctgtgagataccagaaaggagccagggccttaaggtcctagaggaacctcctagtcttggaccccagagaagtttccagaaatgtgtgactgcagacccagggcgggatcaggaaacatgaagaaagcaggtgtgggtcctggaccaatagccctcctgaggtctgtcctcagggaccttcccctgtgacttgtgactgctgggatcaggtcccatcaccgccgtaatcaaggtgataaatctgtccttcattttaacaggtgctttacaaaagagtaagtgctggcacacagggcccagactgggtaggcccatgattgtggacggtgcttcccagtaatgagacagggcacatttctagctggggcttggaaccctcagtgagacaagaaatctcagaccccacccttcaccccttctccacctgagctcttcctcctccacatcacggcagcgaccacagctccagtgatcacagctccaaggagaaccaggccagcaatgatgcccacgatggggatggtgggctgggaagacagctctgggaaaagaggggaaggtgaggggccctgaccctgctaaaggtctccagagaggctcctgctttccctaagagacatgacacccccatctccctccttaccccatctcagggtgaggggcttgggcagaccctcatgctgcacatggcaggtgtatctctgctcctctccagaaggcaccaccacagccgcccacttctggaaggttccatcccctgcaggcctggtctccacgagctccgtgtcctgggtctggtcctccccatcccgctgccaggtcagtgtgatctccgcagggtagaagcccagggcccagcacctcagggtggcctcatggtcagagatggggtggtgggtcatatgtgtcttgggggggtctgacgggaagagtcagaaaattcaggcattttgcatctgtcatgggacactccaccagcacgcatgtggccatcttgagaatggacaggacacccgggatggggaagagagcacagaacccagacaccagcctggacacaggcacctgggataatcttctattccctgagaagggaacagcgacttctggtcctgacctgagtggaggctgagggactcagaagtgctggactcagacccccacacacattgagtgtgaagcagagaacaaggcctgagaggaaaagtcacgggcccaaggctgctgccggtgtcaaagggaaccactcatcagtattcgagggatcgtcttcccgtcactccttcagagattttatcccttaattgtgtcagagagcagggcggaacctcagagtcactctctggtacaggatctggaacccaggaggattcctctccctcaggaccagagggagggtgatattctagtgttggtcccaattgtctcccctccttgtgggaggccagcccgggagatctacaggcgatcagggaggcgccccgtggcccctggtacccgtgcgctgcagcgtctccttcccgttctccaggtatctgcggagccactccacgcacgtgccatccaggtaggctctcaactgctccgcctcatgggccgcctcccacttgcgcttggtgatctgagccgccatgtccgccgcggtccaagagcgcaggtcctcgttcagggcgatgtaatccttgccgtcgtaggcgtcctgccggtacccgcggaggaagcgcccgtccgaccccacgtcgcagccatacattatctggatggtgtgagaacctggccccgaccccgcggtcagcccagtcccccgagccccgcccagccccgaccaacccggggggatttttggcctaaactgaaaatgaaaccgggtaaaggcgcctgggcctctcccggggcaagggtctcggggtcccgcggcttcggggtggatctcggacccggagactgtgggcgacctggcccgtccgtgggggatgaggggtcctgacctgcgcccccggccggggtcactcaccggcctcgctctggttgtagtagccgcgcagggtccccaggtccactcggtcagtctgtgactgggccttcacattccgtgtctcctggtcccaatactccggcccctcctgctctatccacggcgcccgcggctccatcctctggctcgcggcgtcgctgtcgaaccgcacgaactgcgtgtcgtccacgtagcccacggcgatgaagcggggctccccgcggccgggccgggacacggatgtgaagaaatacctcatggagtgggagcctgggggcgagcagtggctgagacctgcccgaccctcgtcccggcgcggctcccccggtcctgcgcccccgccaggagggccccttgcttctccccgcagaggcggtttccctcccgaccccgcactcacccgcccaggtctgggtcagggccagggcccccgagagtagcaggaggagggttcggggcgccatgacggccatcctcggcgtctggggagaatctgagtcccggtgggtgcgtgcgggctttagaacagcgaccgcgacgacactgattggcttctctggaaacccgacacccaatgggagtgagaactg

SEQ ID NO: 11307 - DNA, 6000 bp, Homo sapiens
ttagtaagtttattagtgctaccgtctgccatagttcccaaatttgaactattttttttgcctaggcttctttttttttttcaaatcctacctaattgatttgcacagttgtttcaaatcaaatgctacatcccatatcttgcagtgacgcagttattcactgctaacgtctaaatcggagaagtgaaaaggacaattgtttcgtgctttcttaagtccctgaccaagatcagtagggaaatcccattagctctattcatcgcatttctcataaatctaaaaggaaagcaagtatccaaagctttattctttaatagttcttatttgtaaaaccttgacagggctttattctaaattgcttccaaattacataaagaatagttagaaatatgatgggcagtgaatcgtgatagtttcagtcatcgaataaataagtagaacagtaaaaggggactaatctgaaagcaaacagagtatgatgggctacgatgaggcaaaaagaacagaactgtggaattcttaaactaccatctggctcaatcccctttaagtggccaagttgaagagccttttattcagtgccctaaaacttattcaaaaggcgcagtatttgaatattaatatttccatacagtaaaaaaaaaagtcttttgtaaccaaaaaggaatgtttaacaaaataatgggtaatcctctggctaaacatgagggcgtggggagcaccctgtgggtgggaggtcggctggaacccagggtggctgcgggcagcctccgggccttcccctcatggcttctttgtggttagggtaacttattaaagttgtcattgtggtttgaaatttaggcaagaggtgtaaaattaaggaattcattaggaaaaatgagcgcagtgatttctagtaccttatttcatcaaaaagaaacaataaggtagaattgccatatgagatagttgaggcaaggaacacaatggaaatttgaacctgtggttgaaattgtgcttttgtgtaatgggaacctatttcatcactttgtaacagacccctgacaattggtgttttgtttgttaagccctggatgtttaaatgaaactaaacaggcttttattttgttttcctgaggtgtgtatgaaaagttgagcaaattcgagtgcacttcttatcttcagcaaagatgctttagaaaggtattttagcattctccgtggtttaaaagacaaaaccaagtcctgccggctttgtgttgtgcttctcctacaggctgcagtgccttctgtctgctttagggtgtggcatctgccattggggaggaaaaactggcatgtgtcgccttttatagcagactgatttcattgtgctgggggcctctattttatagtctcttagttccaatcttctagttgacttgctgaagcaaatggaattaaaagagattttgacttctctactaatttttttttagtttcacgatttgccaatatgaaaaaatattttaaggaaaagggccatagctgaacttggtgactcattttcccttttaggattagttgtgaaaataagccacaacatatggctacacttgtatgaactgactttgatatattttatcaatttgaaaaaatgcacttttaggatgatgtgtacatacttagtttgactatgtctaaaagcataaatatgtaattgattttagaatatatgtatatacacacaaaacagacatatatttatatttgcatatgaaaaactaaaaattcaacttctgtggtgtaatgcgtataattagtatgtatttgaatatataaagggagaaaatccaggaaaaaatgtcaaaaaggcacactaacaaagatgtagtattctcttggcaaaaactgatgaatgatttggcacgaattcatcttatggttctgttattctctctaacacacgatgatatatcccgttttccagttgtttgcgtagaattgcaatttgttgtttctacactctataatgacccttgggtgtgcacctgattccctccccccgaccccaattagtcaccagttttcccatcaatccttttctatttagtcatgtaacatatttacacttggtcaaacaaataaccactgctgcagtggaaatgaactaaaatagtttttatggaaagctgaagaatgaaataattttggaaaactatactctaccaaaaccgtaagtattgtttctgccaggttttaaatgctttctctcaatgaaaactgagtccacactagtacaagtgggtcattgcctaaggttaagaagtcttgctttttaaaatgttactaggggacaatgcacatattgaaaacattaataacaatgcaaatattaaaaacattataaaatgttaatagacaccaatttttaagagaacaaagtatggaacatttctacattaggactagagttgactgttttatattattattgaagttatatttattaaatataatgtctataatattttagtttcgttccacatctctttgaaatgaatgtatatcgagagggttaactgtgcacacgaagctctgaaacatgatgaaaggtgtcatatagatttatgaagatacgagctaacccatagctgtcgctgttctggcaccaagagttaaatgttcatgtgaaagttggcgcagaaaacaccactgtacatactccacagaggacatccaagtgcatgtaagaaaaatgctcctttgggaatacgtggacatattcctttggaaatacactgacaaacctacatacgtgtttaaggtgccttcaaaaagagttatgtaaacattctctttggggcgggtgcagtcagtcataagcatttattgagtacctactgggtacaggccatagggctctctgaccggggctaaccttcatttcaaatctttcctaattttgcagttggaagaagttgtgggaattacgccgatggcccgaaatcaaggcagaggcgaacgttctgaaaattacataactcctgggagagaccgtgcttttgcagattgcctaaatattttctttctccgtcggctccttgtaacctctgaggccaatagacaactttgtttcccagcccttctccctcttttgtctgctcgtcagactcgttttccacctttgtatcgttccttttagacgtgaaaacaaacatgcgaacgcccggttggcaaggagacagcggcccggggggaaagtgcaggttccggccgccccacgccgccgcgctccgagcggccgccgagccgccccggccccggccccggccccagccttagcccaagcccggctgggtcccgcgaggctgcgccggggcgggcggcggcggcccggggacgagtccagtccgcgttttgcgagtgcgcgggagtaatgcgagcgaagtggataatagttgctcgagctcgcccgctgcctctcaagccatgctgggcccgataggctcagctagtcgtgtatttacccatatccgggctagagaggaaaagagaaaagtttcatttaaacctgaactaaaaactttcaccatgaaagcacacagcaggagcaggcccagagcgtaaggcgtgcccggcccggcgctccggcggggcctgcggagggggagggggtcgcggcttcccggcgggccgcgtggatgcgcacaggaggggccgcggcctgaaaagtgggggttattgtctccccccgccccccgcccggcctcgccacgccgcggcgatcatggccgcgcgggcagcagcggcggcggcggcggcggcggcgcgggcgcgggcgcgggcaggcagcggcgaacggcgggcgccccccgggccgcggccggcgcccggagcccgggacctggaggcgggggcgcgcggcgcggcggcggcggcggcggcaccgggacccatgctggggggcggcggcgacggcggcggcggcctgaacagtgtgcaccaccaccccctgctcccccgtcacgaactcaacatggcccataacgcgggcgccgcggccgccgccggcacccacagcgccaagagcggcggctccgaggcggctctcaaggagggtggaagcgccgccgcgctgtcctcctcctcctcctcctccgcggcggcagcggcggcatcctcttcctcctcgtcgggcccgggctcggccatggagacggggctgctccccaaccacaaactgaaaaccgttggcgaagcccccgccgcgccgccccaccagcagcaccaccaccaccaccatgcccaccaccaccaccaccatgcccaccacctccaccaccaccacgcactacagcagcagctaaaccagttccagcagcagcagcagcagcagcaacagcagcagcagcagcagcagcaacagcaacatcccatttccaacaacaacagcttgggcggcgcgggcggcggcgcgcctcagcccggccccgacatggagcagccgcaacatggaggcgccaaggacagtgctgcgggcggccaggccgaccccccgggcccgccgctgctgagcaagccgggcgacgaggacgacgcgccgcccaagatgggggagccggcgggcggccgctacgagcacccgggcttgggcgccctgggcacgcagcagccgccggtcgccgtgcccgggggcggcggcggcccggcggccgtcccggagtttaataattactatggcagcgctgcccctgcgagcggcggccccggcggccgcgctgggccttgctttgatcaacatggcggacaacaaagccccgggatggggatgatgcactccgcctccgccgccgccgccggggcccccggcagcatggaccccctgcagaactcccacgaagggtaccccaacagccagtgcaaccattatccgggctacagccggcccggcgcgggcggcggcggcggcggcggcggcggaggaggaggaggcagcggaggaggaggaggaggaggaggagcaggagcaggaggagcaggagcgggagctgtggcggcggcggccgcggcggcggcggcagcagcaggaggcggcggcggcggcggctatgggggctcgtccgcggggtacggggtgctgagctccccccggcagcagggcggcggcatgatgatgggccccgggggcggcggggccgcgagcctcagcaaggcggccgccggctcggcggcggggggcttccagcgcttcgccggccagaaccagcacccgtcgggggccaccccgaccctcaatcagctgctcacctcgcccagccccatgatgcggagctacggcggcagctaccccgagtacagcagccccagcgcgccgccgccgccgccgtcgcagccccagtcccaggcggcggcggcgggggcggcggcgggcggccagcaggcggccgcgggcatgggcttgggcaaggacatgggcgcccagtacgccgctgccagcccggcctgggcggccgcgcaacaaaggagtcacccggcgatgagccccggcacccccggaccgaccatgggcagatcccaggtaaccctcgcgccagccgggcctgcttccgcccggcggcctcgccgcgccgcgagcctgagtttctttctttgccgcgtacttttccccgtcttcccgcgggggcggcgggggcgcggcgcccaaagccatcttgacgggcggccgcctcccgccgcggtcggggcgccccgggggccggcgcgctgtccaggcctgggagggcttcgccgggccgggccgggccgggtggcttctaccccgccggcccgcacccgcgtcccccccctcccccaggcccgggaacgcgaagcgagatcccgaggcgccacccgcgcggtcgccgtttggggcggcggggaccgttcgggtgcttttgtaacaaataggctctcccggccaggacggctggggcgaagagccacccgatcggttctgggagcgcccacaatgtgctttaacgggggaaagaatgagga

SEQ ID NO: 11308 - DNA, 6000 bp, Homo sapiens
aaatatgtgattagatcttaattgggagctggctcttctagttggatctgggctatctttgaaccagtagtaagttacttgttgcaagtatctgttcaaagtagcaaagtgtttattcatatggagataggtattaaaaatgtctaagttatatatatttgctctaagttttgtttgcattcttccttaaatagaaatatggcttacatgatatttgtatccatatatagacacataggagaattaccaatttttagggattaagttacaccaaactaacatttagggaataaagcacctgccttcattatttggtaagaaagacctcaaaatttctaataaaacagatggaatgtaaataccatgacacaaatatcaggtcaaaggcctaatgtgagggccaatgaatatggaaagggatctgggcctcatatggtttggaaatcctcagaatttgtccgcaaaaattacatgtatatctatgtatgtatatggtcatttatctgaacattttcatagttttcatcaaggaagtcacaaaggatggtaagaaccaagtcactgggtggacctgatagtttcattgccatcagtcagttctttaaggaatagttactggaggaagtataagataaacctagaaatgggctgccagcacacattaggatggtgcacacatgagctggtggtctcctgctgcccgtttctgaagtgaaaatatatatatatatgctggccatagatggaggaagcagaatttgaaagaagcagcaagacaggcctccacaccagatttctcaagcagtgggatggtgagtgcggggttgtattttcctgtatcaaaggagaaaagtgacaggcgcatgagtgttctaacgtttttctttcagcaaagcaaagataaaatcaggactttctttgctcctgggcctggacctctttcaatagttactctctggatggaagactctagggatgctgaaagcaagactcagtcgccgcaggcaagagagctggctagggctgactaaggttagctgactgccagcttacatagagttgagttgcaataaattccgtgagatatctcttgtggttgctgtaggcagagtatgcttcccttgacagtgtccagtctggttagcgctgcgctttaaacttcccagcctgcgcctcgaatttggtgctgcagctgtagaactacatcttcctagcatgggagagggttcctcgaggattcatttttctttggttcctccgcagccagctcaccgctaggatctggttttgtgtcggttcactgacttcatttcagttccagagttattctccacttactcagcttctgccaaacgtacacgtgcgtggaattgataataagggaaccacattaattcgcagttttagtgcccggtgttcatacgggagcttatttctactcaactaagttttgctgcgctcaggtaatccatctccaccctttcccttccgctactgattccctctctgctcctcccctgtcaggtgaatttcccccaaaacttgcctggaggttccttctagcgccgctggggactgcagagctggcacttggaccttacccagcgacccctactccgaaggggtgacccaggcacaggcgactttacagggtctctttctctcttgggtgtttcacacacatgcgcctctgtgcaaacacctatgttttatgtgttttaaagtgagaaaggaatacttgaaatgcggaagtcaggttaaggaaatggggttcttcactgaactctgccaacatccggtcaatatgatggcggtgtgtgtttaagcagctctttaccaaagagggtaaaatcaaactgcctacaaggggcggattcctctgggagtctgggactctgcgaagcagtggaggcatggctggagaaagccacaggtccccaaaccgctaaagccaaaaaccgtgtggggaacaaattttgctttgttttttctccgtcccatgctcccgagcagaaattaaaagaggaaaggtcgcatggagctggttacattcctgtcggccttcccccgcttcccatccctttaacacttgtctctaatcgtttccagttctcctaggataacgggaaaattgtttcctggcaccccgcactcccacaggacacacccgcaatcgcacacacttttgatccgtcctggccaatgcccccacctagcggtttaaactcgccggctttgcttccctcttctatggtttctaagtgagcgctgcagttgacaaaaataattgtttatctaggtggatggggtgggagaatgggaaggatcccttaaaatgtggtgaaaatgaggcttaaggttggtggcaaaatgctaggtgctaggactggaggagaaaaagagagaaggctgtgcttttatcctcagggtggctgctgcagcccagaccgcatctagaggacgtccttgaagagctgccaccttagttaaaggagtaccctcactctcaatgcatgcatgtgtgtatgtgtgtttttcttcaaaacacttaacactacagaaaagtataagtattaattatttacttgttcatgtagttattgtctgtctcttctagaatgtaaactgctggaaaagagggtctgagtctactcccactggcctccatacctcggatgcctagaaaaatactcagcatagagtaggcactctattttttgcctgcttgcctggtttagagaaccgggaattaagggaacttgggtttgtgctttattgccttgggtaaaaagctcttctttcaaaggatctcaattactcttcctctaaaactgggtggagggatcagatcagatagccttaggttctgacacagaatgattctctttaaaatatatgtgcgcttaaacagatgaattcatttacaatgcagtttttattagatacactctaggtgccaaacatggatctaggctctaggaattcgtagtggggatcatttaatccttcgagctgaaaataccttgtcctttcctggagcttttcttcatactttctgatttgcatctctaccctacatttgtttctgttgaggtcagaggagaaactgaggacaggggatccgtccctggtcatgagacctaggtactggtattgcatgctgcagcttatggctgacattcccacatattagttgaaggcaaaggagacacacaagatggtgctgatgatggttccagtcctccccgccccaccatcccccttttttcttgaattctgatgacctcctttctaggtaggctgttggaaggaacacgcttactggcaactgttttccagaggcactgaagcactgagcagctggaagaggatggtggagcagaaggtttaatttcacatacagttggcttctgtttgtgataacttttacattttcgcagatagcttgtctttttccctgttgactcatagttgagtgaaaaacacaaatttctaaaactagatgaaaaaatagtttttattgtatcaagagttaaggacggcaaagtacaaaatgcaaacattgggccctctacagcgatattactggtgcctcctaacctgggtgtggccatcagggctggatatgattttagagcggagaggtcagagaccagggcttccccgcctaacactggcctcctagggtgggagtggtaggcaggagcctagggccagactgctggactaaacctgtgaccatggctaaggacatgggtctcactggaggtcagcgcagcaagctctgatgtccgtagaggcgagaacaggacgccttcttcccctgaccagaaatgcagctccaggttgtcagggctgggaggatggcccagggtgggaagcggggagatagggcggtaggacccggcgggagcttccttggccaggaaaggaacagggcggggggaaaagagggagggagagagaaaaagggaaggtgatggggagcgggcgtccgcacccgccgcgccgcacgagttgcactgctctggcggaccggacctggactctatataaagagcccatctgctccgtagctcgcacgcttctcccgggctggtgcacgccgcgtccctccagctcccccagacacctgccccttcccagtgtgccgcgccaggtcctccagacccgcgcacccagtggcatggctccgagtggctcccgtgggaccagggtggcggtggcggcggcgcggcccgagcagccgcaactccagcccccgtgtccccccttttatggctccgtctccgcggggcagctcgtccgagtggccagagagtgaaaagagagggagggcagagctccggcgcgaggcgcggcgcagcgctgctcctagacttcaccccacccagctctggcggccgctgcagccccccaaaagtgccccagcttggggcgaggggtgggaatgcaagatctcgggacctctcgctggcctgcaagctttggtctctacacctaggaaactcctgtgggcaaagtctgcagatccaaaagcgtccaggttaggagacgctcagcctcaagcaactggggtaagagatcccatttggtcaaagccttctcctcaagcagtacttcaccctcctgcactagacgcctccagggagctggagcggagcagggctcggtgggccagctcttagcaacccaggtctaagacccggtgtggagaggaacaaccacagacgcggcggcttagctaggcgctctggaagtgcaggggaggcgcccgcctgccttggctgccgcacccatgacctctagtttcagctgtgaacctgggcggaggaataattgaggaactcacggaactatcaactggggacaaacctgcgatcgccacggtccttccgccctctccttcgtccgctccatgcccaagagctgcgctccggagctggggcgaggagagccatggaggaaccgggtgctcagtgcgctccaccgccgcccgcgggctccgagacctgggttcctcaagccaacttatcctctgctccctcccaaaactgcagcgccaaggactacatttaccaggactccatctccctaccctggaaagtactgctggttatgctattggcgctcatcaccttggccaccacgctctccaatgcctttgtgattgccacagtgtaccggacccggaaactgcacaccccggctaactacctgatcgcctctctggcggtcaccgacctgcttgtgtccatcctggtgatgcccatcagcaccatgtacactgtcaccggccgctggacactgggccaggtggtctgtgacttctggctgtcgtcggacatcacttgttgcactgcctccatcctgcacctctgtgtcatcgccctggaccgctactgggccatcacggacgccgtggagtactcagctaaaaggactcccaagagggcggcggtcatgatcgcgctggtgtgggtcttctccatctctatctcgctgccgcccttcttctggcgtcaggctaaggccgaagaggaggtgtcggaatgcgtggtgaacaccgaccacatcctctacacggtctactccacggtgggtgctttctacttccccaccctgctcctcatcgccctctatggccgcatctacgtagaagcccgctcccggattttgaaacagacgcccaacaggaccggcaagcgcttgacccgagcccagctgataaccgactcccccgggtccacgtcctcggtcacctctattaactcgcgggttcccgacgtgcccagcgaatccggatctcctgtgtatgtgaaccaagtcaaagtgcgagtctccgacgccctgctggaaaagaagaaactcatggccgctagggagcgcaaagccaccaagaccctagggatcattttgggagcctttattgtgtgttggctacccttcttcatcatctccctagtgatgcctatctgcaaagatgcctgctggttccac

SEQ ID NO: 11309 - DNA, 6000 bp, Homo sapiens
tatgtaaataattagctccttttattttgaaataggtacattgtctcctaacttctgattcgctcagtgccacattaataaaaggtcacaatgttttaaaatgctaagattttagcattatatcaggactagagatgaatttaaaaaactgagtttgcatatatgaagaaaaactttaggtttgatttggagactctctgcctgaatttacagctctgaaaaatctgctatttctaatcagcgataaacctcctctcccttgactcatggaactttgttttcactgagtctagaggcgttagtatcagttgcaaaatgtcctggaagagggatttagagatcctgaatggtctgcgcctgcttctgctaaacatctcagagacactctgccccctggtggattgttccagggtgggtttcgattaacagtgcagacttcccttctcccaccctttctctacctcgagtagatgccccagttgaaagcctttatccccaccaattacacattcctttggttcaacaattcccttttagataatgtgaaaacccttaattacttaatcagcccttcacagttaaaacaagaaccataaacatcattattggttatcatgatttgatacaggtaagaaaaaagtagagaagtgaaaaatgaggtgctgcaaattaaaaatgtggatgtggccagggactttggattctagaaagacagccagaaatctctagacaaggaagaggaagagggtttaaaagtgaataaaaggacgctataagaaataattaaacatttggcaatttcttcttggccgatagagccaccgcaaaccatccttcatgttcccttttgttctttggggtgtatgtcacctgcataggggattagttgtaaaaggctgtaaagctcagtcgcttctagtttttgccaagtttttcccattcaggctagtttgatcttctccagtccaacttctcccaagtacccctgttctgtgctacaggcactctgcatccacaaaggagacaatgggaaataatggctaagaggaagtcctgtctgctgagagccaaaaaagtgtcaggcatctcaataagtgctttacatgtataggttctaggccttcacatcaacttgtaagtagacagtatttgagaaaaagaaccacatatttctaacatactttatttgcaattcaaacctaggactgactacaaaagctacctttctgcctacttcactggtcttaagataggtcagtctactcctcttaagtcttcttctaacccagttcctcctgtattttaagcaccatacagtccttggaatctcactacctagcctagagactaaaggtcccctctaaaaactaatctggaaaactcttgtgatagtggatctaaccctctctctttgcagaataggaaagcacaacccatttctttcctttcaaattcttccttcagatataaactaaatcccccaagtcatggcagcacatatcaggcagccacagtatcatttactattagtcattctctcatgaagggtcaaactcctaaacacaaccccagaatccaaggaaccaatctttccataataatagaactactacccgacgctttttagaacacaaaaggacttttatttattttcctaaatttcatttccaatgatacatttcctgaaagatggaataccaaaggcaattttcagtcacagcaactccatcaaatacacataatctgatattttactgcttcagtgaattataatcttctcagggtttcctggttaaagaagacaaaactaagataatagagaggaaaagttaagaatattgttctttagaaaatttgttgaactcaataaacattcattcatgggtgtagtgtccatttttaaaaggaaactctaaaattcctagaaacacaagacaatactggtaatattgagtgagtatacattcatatatttctgtgaaaatttgtgcaattaaacaatatggaaaatgttgtttattaccacagccaatgaaaatatatttccattgctatgtaagttaaacatttccatctcccgcttcatgttctgcaaaaaagccatgtgcctagtttatgaaataaactatgctataggcaacagtaactgaaaaggagcttaacagtcttaactacatacccctgggatgaatactacactttgcataatcatgtgcaatgctgaatgatgattctatatctcttataactataagggtttgcaagcttctatttcatacaatatgccccaaatccaggcaatacagccaaatagtcaagcaataatttaggtggttaatctacaaaatggcaaacaacccattcgactaaactgattgtgttttgttaatgtgaggacaccatcattgcaggtaccctataaagaaatcatttgaaagtggctatttgtttcaattaatgtttccccctaaggctcttagaagttgacttaattgcctcttaggaccaaagaaaatacaactgtataaacagaagaccacagtattaataacataaaaacaaacaccacgctctatgcacattcctccataggagaaatatcacaaaaagcaaacaaagaaacttgggatccagcagaagtataggcaaatctaatgcctaaaattttctctcacaccagtgacaggtataaatattgatcaaaactcccctttttagttagcttatgtgtgaatctttgaatagtatattttcaagagtgattactcaaggtgaaggtctgcacagtaggcaagcagtgtacttcagctcaatgtatttattgtctgacaaacaggactggggagtttcaagcaaggagtgaatccatttcacaaagacaacttgcttctgcagacaaaaggtatcaactgcagaatgccctctgaggaaaggagtgtgaattttctttggcatgttaaatgctgtacatatacatttttttccgtgcagataatccctcagggctacttcttattaaaatatacatttttttcatattttatttcatgactttatcctgtattagggagctctcagaggaaatttgaaataactaagtattcttgaaatttgaaaagactgataaatttaaagtattccagatattatattaattgagatatcaggttggtaacaaatttacaaaggtcaaaagcttgccagtttcctgattgttagtaagtctgaggtttggttctgcaattttttcttttttaaacaaacaaaaaacaagacaaaaacaggctcaattttagtttctctaagcttttctaaagttcttatatgtcattttctagcaatcttttctcctgcccaaacttcaataacaacaacaacaaaaaagaaacaagtttattttcttttcaatatcgtttttagggcccttaactgtatttttaaggtttctggagaaggaagatagttctcttggtttctttatatgttagcacacaaggaatcacagatgggaaggagagtgcaaatgactatcagataaaagtttcatgcattttaagatttttttacaagtcaaaatatacatcctcctattgcccccaccccattcctcaattgtgtaagaactatccccatgtcatcagtctccttcacatctcactaaattggataagaaataaagacacttttcttgttaagaaacagtatatttccaatactaatcggttttaccaattgcattagtaagaaatatagcagcagtgtgggctgagtcacccatcatacccttcatttatggggatttaaatgtgtaaagtgacaggtacatgaaattaagagaaaaaataaagcagtctgcagacttcggcactagcacacataatggtttgtttgttagagttgtggcttgacaatcgctaaacaggaattacaaaattgtaaatctgcagaaaacaaacaatcataggtgttgattctcagtttaacactcctcatctcccattcccacccacccacccccatatagtttcaagtataataaaaatagagatctcagcatcagaattttgctgttaactcttcaaggtttctctgcgccatccaagccacacatagggtttgaagcaccaaatccacaagtttctccaaccaagtttaaatagacaaaaagtgaagactgaatgatgccaaagtaactgttcttaaattaagctgtaacacaaagttctccccccaaaaacacagggcattaagcgtctagttcaagtactgccaggctgtatgtagatctgtctcagacaggcttcagacaacaattacaagtacactgcttctagtgggcattatccacgataccaaagcagggcagggattcccttccattatcaatttttaaaagttgcaaccccctttgggattggctgccgcagggtcagtgctgagcccggggcttgaggggaggaagtgagcctcctcctgggcagggaagctctacatttagtttcaacacttctcctttcagagctctctctcaggactattctggcttctcaggatccattgcccttgcccaggagagagagcctcgctgggacccagaaaccgcgaaagaagattcgacctacctgtggaaccagacacaacttggtccccaaaggtcgcttaggcgaccccactgcaaacggcaagtcaacttgtgcacttaaaacgtatcagtttatggaatgcttgtttaaagtcctcattggacatggtatagattatggggttgatgagggagttgagatagcccagccatgtgaagaagtcaaagatggctaggtggaaccagcaggcatctttgcagataggcatcactagggagatgatgaagaagggtagccaacacacaataaaggctcccaaaatgatccctagggtcttggtggctttgcgctccctagcggccatgagtttcttcttttccagcagggcgtcggagactcgcactttgacttggttcacatacacaggagatccggattcgctgggcacgtcgggaacccgcgagttaatagaggtgaccgaggacgtggacccgggggagtcggttatcagctgggctcgggtcaagcgcttgccggtcctgttgggcgtctgtttcaaaatccgggagcgggcttctacgtagatgcggccatagagggcgatgaggagcagggtggggaagtagaaagcacccaccgtggagtagaccgtgtagaggatgtggtcggtgttcaccacgcattccgacacctcctcttcggccttagcctgacgccagaagaagggcggcagcgagatagagatggagaagacccacaccagcgcgatcatgaccgccgccctcttgggagtccttttagctgagtactccacggcgtccgtgatggcccagtagcggtccagggcgatgacacagaggtgcaggatggaggcagtgcaacaagtgatgtccgacgacagccagaagtcacagaccacctggcccagtgtccagcggccggtgacagtgtacatggtgctgatgggcatcaccaggatggacacaagcaggtcggtgaccgccagagaggcgatcaggtagttagccggggtgtgcagtttccgggtccggtacactgtggcaatcacaaaggcattggagagcgtggtggccaaggtgatgagcgccaatagcataaccagcagtactttccagggtagggagatggagtcctggtaaatgtagtccttggcgctgcagttttgggagggagcagaggataagttggcttgaggaacccaggtctcggagcccgcgggcggcggtggagcgcactgagcacccggttcctccatggctctcctcgccccagctccggagcgcagctcttgggcatggagcggacgaaggagagggcggaaggaccgtggcgatcgcaggtttgtccccagttgatagttccgtgagttcctcaattattcctccgcccaggttca

SEQ ID NO: 11310 - DNA, 6000 bp, Homo sapiens
cctgattatatatgcttactacccaaatatttattttgaggaactagagtggagttacctatgcaggacctttagccagccaggcagcatgttatcactaagaacggccacaaagatgactacatgatgtgatgtagaatactgaaaaacactggtaggtgctcagtaagtgattttcactaatggcaaaatgattgaggacagtactggaaataaaagcagccattgaacacacatttgtctaaaagttacaagaaatttataaatgaggctgtgataaagtcattcaaaagcggacagtccaggataaaataaaaagtacaatgtattaaaatgtagtaaggtgtttcttaatgtatttcactggtgttactatgtttctaaggaatttggagagaaactgtagtagcctgatgttaaacttaaggttctggaagtccagactccacagtggtgggttccaggtgtcaagtcggagttgtgtcagcgggaggattagggtcagctgcccgctaatggcagccagcaagcctccgctgcaggaaatgctgcgggatggggaaggtctgagcttgcttctttactggccaaatcccatgtgacattgaggggcagaccttagtaggtatgagtgattgttaattgtttatctcccctatgaaggacaggaccaaggtaattatctttcattttcaaggcatggcacaaggtagactctaggtaaatttgttgaatgactacatgcagtgtatctccatccaggtttattatccccacaataattttcttagtaagtttattagtgctaccgtctgccatagttcccaaatttgaactattttttttgcctaggcttctttttttttttcaaatcctacctaattgatttgcacagttgtttcaaatcaaatgctacatcccatatcttgcagtgacgcagttattcactgctaacgtctaaatcggagaagtgaaaaggacaattgtttcgtgctttcttaagtccctgaccaagatcagtagggaaatcccattagctctattcatcgcatttctcataaatctaaaaggaaagcaagtatccaaagctttattctttaatagttcttatttgtaaaaccttgacagggctttattctaaattgcttccaaattacataaagaatagttagaaatatgatgggcagtgaatcgtgatagtttcagtcatcgaataaataagtagaacagtaaaaggggactaatctgaaagcaaacagagtatgatgggctacgatgaggcaaaaagaacagaactgtggaattcttaaactaccatctggctcaatcccctttaagtggccaagttgaagagccttttattcagtgccctaaaacttattcaaaaggcgcagtatttgaatattaatatttccatacagtaaaaaaaaaagtcttttgtaaccaaaaaggaatgtttaacaaaataatgggtaatcctctggctaaacatgagggcgtggggagcaccctgtgggtgggaggtcggctggaacccagggtggctgcgggcagcctccgggccttcccctcatggcttctttgtggttagggtaacttattaaagttgtcattgtggtttgaaatttaggcaagaggtgtaaaattaaggaattcattaggaaaaatgagcgcagtgatttctagtaccttatttcatcaaaaagaaacaataaggtagaattgccatatgagatagttgaggcaaggaacacaatggaaatttgaacctgtggttgaaattgtgcttttgtgtaatgggaacctatttcatcactttgtaacagacccctgacaattggtgttttgtttgttaagccctggatgtttaaatgaaactaaacaggcttttattttgttttcctgaggtgtgtatgaaaagttgagcaaattcgagtgcacttcttatcttcagcaaagatgctttagaaaggtattttagcattctccgtggtttaaaagacaaaaccaagtcctgccggctttgtgttgtgcttctcctacaggctgcagtgccttctgtctgctttagggtgtggcatctgccattggggaggaaaaactggcatgtgtcgccttttatagcagactgatttcattgtgctgggggcctctattttatagtctcttagttccaatcttctagttgacttgctgaagcaaatggaattaaaagagattttgacttctctactaatttttttttagtttcacgatttgccaatatgaaaaaatattttaaggaaaagggccatagctgaacttggtgactcattttcccttttaggattagttgtgaaaataagccacaacatatggctacacttgtatgaactgactttgatatattttatcaatttgaaaaaatgcacttttaggatgatgtgtacatacttagtttgactatgtctaaaagcataaatatgtaattgattttagaatatatgtatatacacacaaaacagacatatatttatatttgcatatgaaaaactaaaaattcaacttctgtggtgtaatgcgtataattagtatgtatttgaatatataaagggagaaaatccaggaaaaaatgtcaaaaaggcacactaacaaagatgtagtattctcttggcaaaaactgatgaatgatttggcacgaattcatcttatggttctgttattctctctaacacacgatgatatatcccgttttccagttgtttgcgtagaattgcaatttgttgtttctacactctataatgacccttgggtgtgcacctgattccctccccccgaccccaattagtcaccagttttcccatcaatccttttctatttagtcatgtaacatatttacacttggtcaaacaaataaccactgctgcagtggaaatgaactaaaatagtttttatggaaagctgaagaatgaaataattttggaaaactatactctaccaaaaccgtaagtattgtttctgccaggttttaaatgctttctctcaatgaaaactgagtccacactagtacaagtgggtcattgcctaaggttaagaagtcttgctttttaaaatgttactaggggacaatgcacatattgaaaacattaataacaatgcaaatattaaaaacattataaaatgttaatagacaccaatttttaagagaacaaagtatggaacatttctacattaggactagagttgactgttttatattattattgaagttatatttattaaatataatgtctataatattttagtttcgttccacatctctttgaaatgaatgtatatcgagagggttaactgtgcacacgaagctctgaaacatgatgaaaggtgtcatatagatttatgaagatacgagctaacccatagctgtcgctgttctggcaccaagagttaaatgttcatgtgaaagttggcgcagaaaacaccactgtacatactccacagaggacatccaagtgcatgtaagaaaaatgctcctttgggaatacgtggacatattcctttggaaatacactgacaaacctacatacgtgtttaaggtgccttcaaaaagagttatgtaaacattctctttggggcgggtgcagtcagtcataagcatttattgagtacctactgggtacaggccatagggctctctgaccggggctaaccttcatttcaaatctttcctaattttgcagttggaagaagttgtgggaattacgccgatggcccgaaatcaaggcagaggcgaacgttctgaaaattacataactcctgggagagaccgtgcttttgcagattgcctaaatattttctttctccgtcggctccttgtaacctctgaggccaatagacaactttgtttcccagcccttctccctcttttgtctgctcgtcagactcgttttccacctttgtatcgttccttttagacgtgaaaacaaacatgcgaacgcccggttggcaaggagacagcggcccggggggaaagtgcaggttccggccgccccacgccgccgcgctccgagcggccgccgagccgccccggccccggccccggccccagccttagcccaagcccggctgggtcccgcgaggctgcgccggggcgggcggcggcggcccggggacgagtccagtccgcgttttgcgagtgcgcgggagtaatgcgagcgaagtggataatagttgctcgagctcgcccgctgcctctcaagccatgctgggcccgataggctcagctagtcgtgtatttacccatatccgggctagagaggaaaagagaaaagtttcatttaaacctgaactaaaaactttcaccatgaaagcacacagcaggagcaggcccagagcgtaaggcgtgcccggcccggcgctccggcggggcctgcggagggggagggggtcgcggcttcccggcgggccgcgtggatgcgcacaggaggggccgcggcctgaaaagtgggggttattgtctccccccgccccccgcccggcctcgccacgccgcggcgatcatggccgcgcgggcagcagcggcggcggcggcggcggcggcgcgggcgcgggcgcgggcaggcagcggcgaacggcgggcgccccccgggccgcggccggcgcccggagcccgggacctggaggcgggggcgcgcggcgcggcggcggcggcggcggcaccgggacccatgctggggggcggcggcgacggcggcggcggcctgaacagtgtgcaccaccaccccctgctcccccgtcacgaactcaacatggcccataacgcgggcgccgcggccgccgccggcacccacagcgccaagagcggcggctccgaggcggctctcaaggagggtggaagcgccgccgcgctgtcctcctcctcctcctcctccgcggcggcagcggcggcatcctcttcctcctcgtcgggcccgggctcggccatggagacggggctgctccccaaccacaaactgaaaaccgttggcgaagcccccgccgcgccgccccaccagcagcaccaccaccaccaccatgcccaccaccaccaccaccatgcccaccacctccaccaccaccacgcactacagcagcagctaaaccagttccagcagcagcagcagcagcagcaacagcagcagcagcagcagcagcaacagcaacatcccatttccaacaacaacagcttgggcggcgcgggcggcggcgcgcctcagcccggccccgacatggagcagccgcaacatggaggcgccaaggacagtgctgcgggcggccaggccgaccccccgggcccgccgctgctgagcaagccgggcgacgaggacgacgcgccgcccaagatgggggagccggcgggcggccgctacgagcacccgggcttgggcgccctgggcacgcagcagccgccggtcgccgtgcccgggggcggcggcggcccggcggccgtcccggagtttaataattactatggcagcgctgcccctgcgagcggcggccccggcggccgcgctgggccttgctttgatcaacatggcggacaacaaagccccgggatggggatgatgcactccgcctccgccgccgccgccggggcccccggcagcatggaccccctgcagaactcccacgaagggtaccccaacagccagtgcaaccattatccgggctacagccggcccggcgcgggcggcggcggcggcggcggcggcggaggaggaggaggcagcggaggaggaggaggaggaggaggagcaggagcaggaggagcaggagcgggagctgtggcggcggcggccgcggcggcggcggcagcagcaggaggcggcggcggcggcggctatgggggctcgtccgcggggtacggggtgctgagctccccccggcagcagggcggcggcatgatgatgggccccgggggcggcggggccgcgagcctcagcaaggcggccgccggctcggcggcggggggcttccagcgct

SEQ ID NO: 11311 - DNA, 6000 bp, Homo sapiens
gaccacacatttgattacggaggtcttctgtgttgatgactgttcatggaatgagagcaaaggaaaaatatggtttgagttttcttcaaacatcatatataaaaattaaaccacaaaaattgatcctagagttaaggaatcaaagttaaaaccaaaaaacttctagaggcagagacaggagaaaatctttgagaccttggggtaggccagtggttctcaattggatgtgattttgccccctcccctccagggcctttgatatgcctggagacatttttatttgttaccactgggggagggggagtggtagagtatagtcttagcatctagtgagtagaggccaggaatgctggctgacatcctacaatgcccaggatagccctccaaacaaaaaattacccaggtcaaatgtcactagttttaaggttgatttctcaagctaccaaaagcacaaaccataaaaagttatagtccatcaaatttttttaaatctgttcttcaaaggatatcactgagaaaatttaaaggcaaggcaaagactgaaagaaaacactcatacctcacacatatctaagaaagaacttgtacccagaagacatgaggagctcctaaagctcaataaggagaagaacccaaaaacaatttttaaggggtaaaagggacaaaatatgatttttaaaggacactacaaaaaatacccagtcagtaagcacatgataatggtgaacatcatccaggattccaataaatacaagaaaagatgttcctttcttgctcaacatcatgagtcagcagagagatgaaagctgaaaccacactgagataccattacaactccacttgaatggctaaacctaacactgacaggtgttgacaaggatatagaactggaactctcatacatcactggtggaaatgcaaaattgtaattcggcattacagtctggtgggtcccatgaagtcaaacagctgctacgcccacctcctcatacaccattcatgaccagttacaacattagcaagagctctctgtggctaggacaatccaaagaagaaaaggaggaagaaaaagaacagcacctgcaaagtgataagctactctctgccactaggctcagttctagagcctgctcagttctttccccaatacaatagtttatataccaagatcaaaatagggaagggaacatctcaattatttctctcagccccatcttttaaaaatccctctctctatgaaatgctgacaaaagacgtgaggcccaacgcaggcattcatttcctgggaatctgtcaggatgctgttctgagaattaatccatgagatctaatgtaaccataattaacaaccttaggcttccacatacacttactgttgaaatgcacacacacaaatggatgtgatccaggtttaacatgtggcccaaattaggcatataagcactgttcctttggaaaaattacagggaaaaaaaaatctccttagagacagtaactaaaccaacctcaactcccagctggcttcattattctcttgtcctcaatataataaaaactttctagcatttatacctaaacaatttggggaaaacttgtcctgtacaaattttgaagctcttaactaccttaaatctaaccatcccaaagcattattttatcattaatgcacactgctaagacctcacccattaagcatcttgttaacacctaactaaagggtggaaacttgcatattacatatataatatgacattttacaaagtttaaagcatatggtaataagtaaagccactgacaagctgagatcactttagacactgttgttggttttgcatggcctggcctctgctcctctcctcctgaatgccctctcttcttgctctactattcccgccctccactgaccttcaacactccttcctgccccaggtcttttctacaggccagtcccacagcctatcacactagcctcagaaacaagttttctactaactttgtactagcaatatcacctcccaagaaatacctgcataagaatcattaacttctaactcagcactgggaccacctggcaagtaatccacttgacacttgaaaaatgctttgctgagtctctccaaaaaaaaccatgcacttatttaaagcgctgcttcaagccagatacactttgggaaatgagcctttgtcgtgcctgctgttcaatgcacaactcagagggcaggcccctccacgtgcacggacacagttaaagctgctgctgaaatggtgctgtctccttcgttcctcccaataactaactgcaccaggaaccgcaccccatcccaggagtgctcagagccaaaggtcaccttgaagctttgcccccacaaggtgcctcgcaggcacccctgaagcaggccctcatgtccctcttgtgggtctaagcgactgcagatgaaaaatattctctctaggttctagagagctgggcttgggaggagaggtagttttcctggaaatccaactccatcttttagagacaatgagaatttacggctaggattctgttaaagccatatggtgtctgggtgctccaaaacctttgcaaggataatgactttctgggggccatacaatgaacaagaatactatcaatggaaaaacacattccacgtatgaaattaccaatttacaaacatttggaatgtgatccttctgtacatttgggactgcctccatgtgaccaagcagcaaaaacaaacggggacatttgtaggactcgacttttcatgctcacagtggagacctggccgagttatttacatttcagcaaactgatgcccaggaacaaaattaaaatggagcttaacacgtcacaccttggtgacacgataaaattttttgtatcaaattaaaaaaaaaatcaacttacattcctattcctcaactacatgctacatttacggaaattttagccagttttatctcataaaagtacagatgactgataacctcccccgccccaagaaaagttttcaaaaagtatttaaggagaggtatcagtttaaaacaggaacataaacccagcatggtgcctcatgcctgtaatcccaacactttgggaggctgacgcaggaagattacttgaggataggagcttgaggccagcctgggcaacatagcaagacgtcatctctattaaaaattttaaaaaatatataataagccaagtggggtggcacacacctgtaatcccagctacacagaagggtgaggtggaaggactgcctgagcccaggagttcacgactgtagtgagctatgactgcaccactgcacttctgcctgggcaacgcggtgagaccctgcctcaaaaaattataaaacaggaacagacaggaagttcacttggcacatgttgggtttaaagtagagattgcaagtggttctggagaagtctgcatgtgcaactacagggaagtaacagggaaagaggtgggtgaaaatccgtctctgaaatgattggcagatttgtcatcctaagaaaatctggcagaaaaattaaacacaacttttaagatattctaagactacaaagggcagatcttattatattcacaatgcatatcaacctcagaaacctcttcagcatttgctaagtatgcccacgtgtgacagtggccagaaaaacgtaaagatacaaaggccattcctactagaccaagaggccgtgttccacctggagatgaagttcgtgaacacaggttcaagacactgccatgactaacctaatgcaaaagtaagggtcccatcaatcagccaaagtatcagtctgcccttgaagccaccttaatcttaactgtgaagaaaacaaacttcaatttgttaacaagaccaagacttcaaccacactaggccagctgggttaatttcttattgtatttatttatttatttttgagacagggccttgctctgtcgcccagactagagtgcaactcgactcgatcacaactcactgcaacctcgacctgcggggctaacgttatcctaccacctcagcctcccttaactgggaggacaggagtgtgccaccgcgcccggctctaattttcatattttttgtagagacggggtttcgccatgttgctgaagctggcctccaactcctggactcaagtgacccgcccacctcggccttccaaagtgctggattccgggcatgagccaccgcgcccaggcgagttaatttcttatttttggtcacagaagccattattccaaaatgccttcctctaaatgttgttctcagcctgacctcgtttaagctgccaccatttctctgtatcatactagttactggagtaactatgtatcttagggtagctaactggtctttaaactagtgtcacaaactctccctccatccacccttccccttccaaaaaagggagcataaaaaatatgggcctttccaaagagtttctatcgtgagatcagcctcaccctccttagactaatttctgcatgttctgaacacaggggtgctaataaaactatctctgatgcatgggaaaaataagaaccccccccataaaccctaccacaaactccaagttcagcccaaagtaggctcaactttgtttcactctgaaaagtaacttgtaaaagtaacttgtaaaagtaacagtaacagggagaaactgttgtctgttcaaaacttttcatcctgcttcctttttaccaaagtttaaaaaaataaacaaaagctgaattttccatcatcctaaacagtccagaaaaggatggtcagaaaattcctgaaattcgaagttccccaggccctggactgctagcagttgcgcgaggtgaacagccctcgatgggactgatgggttatacaatcatggttcccagagcaagatccactagaataatccgccccggagacaatgacatcatgtgagcaaccaggcaggaagttgggctcagagaagtgaagggtcaagtcttgaaagctcacactggacgacaccccctgcccccaatctaaagaagacaaaagtcaccgcctgctaaaaatatatatatatatatattctttaaagagaaaatgagcccacggggggaaatcaatcagcaaatgaaaccacaaacactcaactccaggaccattcctgcgggctccaacgccccggtgagcctctccacaccgaggggcctcaccggtgccccgctggcgaaactctgatgcaaacgcgcagcgggaacaaagcaaactggagttcctgcctccaactttcccggacgcccggccgcgcgagggcaggcgccgaccccaagggccggggcgaccgctccgcacaaagccacccccgactcagcgacagccacaagtggccggacgcggggctccaggaccgccacgaccgcgtgtgcccccgcgccccccgcctgcgcacgggacccggcgggactcgcggacaccacgcaggcaactttccctcgggaacggggcggaccccggcgcggaacggaggcgacttggagaccccaggagctcctcgagcgctccccgccccccacgccggccgctcaccccgggcaccgcgagcggagcctgcgtccgggcgggccacccacctgcacagctcggggaacggggcggcctgggcctgcgtggaccccggggcagcgacgagcagcagcagctgcagcaggagcagagagcgctgcgggcggcgggcgggcgcgggccccaggtgggggctccggccggcggcggcccccatcgcgccgggcccggactgcgcggcgggcgcgaggctaacggcgcgcgactgctgggggccgcgcccgggacggggtcgcgccgccagggcaaaggcggaggtggagacggagcgggagcccgaggtgagcgcggctcgactgggctcggcgacagcgacagcggcagcggcggccccggaaccgcgtcacgtgacagccgcccggcaccgcccccccacccccgccccccg

SEQ ID NO: 11312 - DNA, 6000 bp, Homo sapiens
ccaagctggtctcaaactcctgacctcaagtgatcctcctgcctcagcctctcaaactgtggggattacaggtgtgagccactgctcacctagccaagatagtgtagcactggtataagaacgacatacagaccataaaacataattgagtgtccagaaataaagttttacatttatgaaggagcttcaacaaaggtgcgtaggcaattcagtagagaaaggatggtcttttcaacaaatggtgctgaggtaattggatttctacaagcaataaaatgaatttaaacccttacctcataccacacacaaaattaattcaaaatggataacatacctaaatataagagttaaaagtataaaacctctatgagaaaacatccataaccttgaattaggcaaatatttattagatattaacactaaatggatttcatcaaaattaaaaacttttgttcttcaaaagacaccattaagaaaaaaatatatttttaagtcacaaactgggagaatatatctacgaatcatatatctgataagggacttgtatctcagacttataaagaactctttcaataataagacaacccaattaaaaatgggcaaaatatctgaatagacatttcacatatgatacacattatgctagtaaacacgtgaaaagatgcttattgtcagtagttattacagaaatataaattaaaattcataagaatctctataagcaaaaaatcaacaataccaagtatgaacaagtatgttgaaattagaacgcatgcactttggaaaacagtttggaggttccttaaaacgttaaacatagacggccgggcgccgtggctcacacctgtaatcccagcactttgggaggccgagacgggcggatcacgaggtcaggagatcaagaccatcctggctaacacggtgaaaccccgtgtatactaaaaatacaaaaaaattagccgggcgtagtggcgggcgcctgtagtcccagctactcgggagactgaggcaggagaatggtgtgaacccgggaggcggagcttgcagtgagctgagatcgcgctactgccctccagcctgggcgactgagccagactccgcctccaaaaaaaaaaatgataaacatagactttcataccacctgccagttctactcttagaaatcttcccaagagaaatgaaaatatatgtccatgcaatcacttatttacaaatattcacagcagcattattgataataatccaaacctggaacaatccaaatgtccatcaccttgtgaaaggataaacaaaaatgagtatatccatacaatggaacactactggacaataaaaaagaatgatgtactgatatatgctacaacacaaactgatctcaaaaacatcatgctgagtgaaaaaatcagtcacaaaagactacatattgtatcatttcttttaaataaaatttccagaaaaggcaaatctagatacagcaaaagtagattagtgcctagggctaggctgggagtggggattggctataaactccatgagggacctttgtggaatgatggaaatgttacaaaactggattatgacaatggttgcgcaactctatactttactaaaaatcactgaattgtatacttcgaatggatgaatggactttatagtaagtagattatactcaataaatgttttaaaggaaattatactctcataactgagagtgctgagtgtctatatccctcagcactagccagtaggtttttaatctttttttaaaccagattggttattttaaaaattacatctcattattcttaatattgtacatttctttgatttctagtaaaaccaaacatttctgtctacttgagtcttcattattttcctataaagatatacatcttttccataaggaaatgtgagatgctatctttttaaaacagcaaacctttttcagtgatatgtggtacaaatattttttcccagtttttcataaatttaaaaattttgttaacagttttttttcccatattgaaatattcattttcatgtagccaaatttatctgtgttttcatttacagtttctgtttttggtgttatgacaagtaatattcttttcaaaattaactatcacaaaccttgatcatggttagttaagcatcccctgtgctaataagcccaatgctactgctactgggccttccattttaaggaaacagataaaaacctaattttgagtttcaaagctagaggcagatgggctttccttccttaaacctttaagtgtcaagagacatgactgcttacatgccacattcatggaaaattgcctcattagagaatttctgatgtgatacactagacatttaaaatagttctagtgataaggaactggaaaatattaataaaaagaaagaggtaaaaatgtgtttcctgtcgctaatcatgccaggactgtgactctaggcctcgctggctcatgtctcttcgtagaacatcaaatcatcacataacaacatgaccactgcgggcatttgtggatgtctggccagaacagtctagaactcaatcactcattgtctcaccactgagtccatgaatgttatcatttcccctgtaattccactcacccaccatccattatctaaaaaatacaggaaactcacttttatttacatctcacaaacttagagataatatgcactgaagaactcttcactaagtgctgtattacttcacaaaatactatggcatttataaaaaaccacttggcttaatgtagttatgactatcacacacaaagatacacataaaacttacaaagaaatgtcatcagaacattttaatattaattcagatgatattatagccctgaagttgcaaaactgaggcctggtcatgttaagatacaatcaggagacacacttgaatacctggtaacaaaaaatgactctgacttctttgtatatttgagtcctacccacacttttaagaccagcctaaagttaactttccttatctgtcctactgcttgtgggatctataactacacattctggaacacatacacagttttaatgttattcaactgttttgtgctgctagtcttatcacctcattgaattaaacacaagttccaagagggcaaaaactgtatgtccctacagcattacaacagggctaggattccagatgttttcattgactttatctgtaccacttcttgctctgcagaacaacttactcagatgttcattaaataacatttcttgatttctaggaaaggttgatacagggggctaagaaggcaaaaaagtactagggggacattttaaaagcttattatattgtagagcagacaattctttagtcaagaaaaatattgtgtagtatgtaaatgctttggcagttaccccagctttgaagatcttgaagagctatgcatggattgtctccagttcttttttgtatctaagcaggctttacctaatgacagtggttcctcacataagttccagtgaacttcaggattccatgaggctgctctaagacttgactgatagatggatggccatgatcgccgtgtttaatctgaggttgttcctgcccaggtaccaactgaggtcgttaggcttcaggtataaatggaaagccttcctattaatcaaggagaggttttccatcaccggagaacactctgatgtcctcaggaatgacacacaggtgcctgtacacagttttgcccctagtctcaggaccattggctagcttatgcatgggggttccctgccttccagggaaataaaactgtagctgtaattttactgttattttagttttttttttttttccttccgtctccttgagagaggcagacaggggaagtaagaataatggtttcagcagctctggcccttgaataaacagcaaggaagggttccatcgtcagggtccattatacataaagtgtgcacacctaacctactgtttatgtaaacaatggttataattcccaggaaaaaaagatggcctccagctcacttactctgtaacccgtatcttgatgattagttcctttgtctctactagaatttccaatccatcattaaccctcagtcaaaatgctgaaaatggtgacatcacttaatatcctaattctagtaaaacagggctagaaaataccttcataaaattaagtttaaataataaatctcaagtattagtgctcttaatatgccatctgtcttcttaaactgggagtacctttggatttccttaattcctcttgacccaccctttcgtaagtgagtacgaaatgggtgagaataagactttggcatctatagcatctgattaaatctttactagtagttattggttggtgagatgcaggacaatttatgtctttaagtcccagctgaatgggggtaacaccgctcaagctgttttcaggattaaatgagataatgcaagtcaaattctgcacagcgtgagggacacagtatgtgcacaacaaactctaagacttttaaacactttcaattatttttaaaaagtggggtaggagacaagtttctacccaatttttagtaataacatataagaaggggaaagcttttgaatttttaaaacttcagtattttaaaataatgcagtcactctcacacacaaattagtccatggtctttgataaagcaagacattaggtgtaattttgcttcaaatttaatacccacactcgttgacactgttggaaacactgaggctggcggtgggagggtgcaaagcacttgcttaggaaccagctgagaaatcctcactgatttctcagggaggaggaaacctttcccttccctccccgggacaagtcgaagccccaccccgagggagatttgtgtccctgaatgtagtagttggtgtccggggcctgcgcagaagaggacagtccgcaaggggcggaagacaagacaaaaatgactccagttcgctagacgcgcagaggggcggatagcgcgcggaccccgccttccccaaccgagtgtgggttccagtcgctggggaggacctggtggccccctgaccttggacgagccatattggacgccccggcgccgtcccgtcttccacgctgccaactccaccgctcccgccccgaactgcgggtaggtccaggccgccaggccccgcctcgccggccccagccctgattgacactggagttggtacatacgggtctgcagcggaggcgagcaggagggtgagcgctattttaaacatggctttctctttcccttagcctaggagccaccgcagcgcacccagcccgcgagtacagccgcatgggaataatcccaacatttgcctgatttattttcttccctctccttacgcttgtacttgtttttctcctctcgctgttttcccttcacactaattcgcaacctggcagtttgcaaagaggaaactccctttcggaatggaaagccgcttttgcttcttgttgttgggggtggaaaacattccagcgagaatgagttcaaaaagaagggaaaccgcgtcactggagagaaagtaacattaagagatcgatgaggacggagtgggtaggggggacagagagaggaacgtctgcaacaggcatctaaaaacaagcgtggaggagcaaagattcccaatccccgggttactaccgcgcgcgttctgcgcgagccattgcaatgccagcatttactgtaagcagaatttgaaggcttttgaaatctttttttggtaagacttacctttctcttcggcataatgactatgtcggtgaagcaaaaagtaaagcaacggactggaactgctggcgccgccgctggatgctgcctctgcctctgcagctgctcacgcgcagggcacgacgtagcccggcctcttcgacctgcacctccgcggctccctctgggggccctctgctcgcctccctgctgctccaatgaggagccccgccagccggccgcgaggcccca

SEQ ID NO: 11313 - DNA, 6000 bp, Homo sapiens; identical to SEQ ID NO: 2447

SEQ ID NO: 11314 - DNA, 6000 bp, Homo sapiens
acttcagaatacccagcagcaagactacaagtctacaaaggagcatcaaaattctgagggaaaatgacttccaatctagacttctatgaccaaagtgtacctcctatgtggttctgtcaaggagcattataccaaaacatggtcgtcaaccaaatgaatacaagcaatgaagaaaaaaagggtttcaacctaagagagaggaaatgtacatcctcattagaggataaagtgagatccaggatgaaaacagttgactatagactagagcaggtcagaagattctgggagagataacctccaaggttcgatcaatcatgacatgtatctgaacttagagatgcatacagctggggaaaagtctgaggttaaataatttaaatacactgaaaataggctgggtgcggtggctcacacctataatcccagcacttcgggaggccaaggcaggtggatcacttgaggctaggagttctgagaccagcctggccaacatgacaaaacaccatctctactaaaaatataaaaattagctgggtgtggtggcacatgcctgtaatcccagctactcaggaggctgaggcaagcgaatcacttgaacccggaaggttcaaagtcgcagtgagctgagatcgcgccactgcactccagcctgggcaatgcagtgagattctgtcaaaaaaagaaaagaaagcaaaccaatgaacaaaaaatgttgtgcatgaaaggaaaagtcattgcatatttagtacaaggctgacctatgaagagcattacacaaataaagaactaacatgtaagtgcttgctacagctttacatatataaacttatttaaatagtcacaataatgttcatttaccaaaattatttagtattatggaaagctatggggacatcaatgtgtgtgtgtgattttggtgggggtagggatgagggccagttgaaatcaagggatgactgctaaatcttcgtcttccatagttagaagacaatgtctaaaacaaataaacaaaatcaagaatacactatatgtatgttaattagaaatacggcaataaataccaaaagaaatactgtctccaaagggaggaaatgggagtggtatactatttttcttaagcgcatagagaagtatgtacatacagaattatgaattaaaaaatttaaaaatgatacaattaattaaacctgggaactaggggaatgggtgaatattgatttgttccacctttcagagaagtgaatctaaaattaaaatgtccttaaaaagttactccaacttcaatgtcttatacaatgtttttcttaaacttaaaccagactttcttaaccatgttgttattgctattttgggctgaataattatttgttgttgggggctatcctatacattgtagatttagcagcatccttgtcctctaccaactaactagatgctagtggcacgcctcaccccaggttgtgacaatgaaaaatgtctgcagatattgccaaatgcccactggggagcaaaactgtgtccagttgaaaatcactgctatggaaacacctccttagaagaatctttttaagaaactctcctgacaaatgttaacatttaagaattacttttttttttgttaaattcaagaaacattaaattcaatgctttgcttaaaaatatgtttaagatgctgccattcctaagaatatatttttgtctattcatccacccatgtgtatacaaatacacaatgcacccatgcattgagagagaaggaagattttggggggacatttttatttaatttctactctgcattgcttgaccattcatagcaactataaatcatttctataaaacaagtcactgtattaacaaaaatttaggaggttggcaaaaaatacgcactcagtaatcactagttcttaacgacttaactaaactaaatatcttgataggtattgtatataaggctcacccattcaaaaaaaaaatcaattctgtctactcactaataccaatgttgagactgggatggggaaaagcatgtaagtaggtattagtgattggtaatgttatagttataggattagttggtatgatgtttataatgtttaaagtaattaacaatcaaaaaaagagacaaccatgcatgaataaaaaattatactgccatgaaccaaggattatgatcaatctaattctaggtctcttagcagcaaacaaaaagtgaacaatttaacactccaatttctgctcagtggtattacacataatttgtctctttatagttcagacattttctacaattattttataaataaggaaaaaacttttactaaatttgattaagcctgcagaaacttgtactaattaagaatgaggttggtttgtttttaattctggcttacctgatctaatttaatgatttgaatgttactttttttttgttctgttttttgtttttgttttttttttttttgacacagagtctcactctgttgcccaggctggagtgcagtggcgccatcttggctcactgcagcctccgcctcctgggcttaagagattctcctgcctcagccacccgagtgggattacaggtgtgcgccaccacatccggctgatttttgtttttttgttttgttttgttttgttttctgagatggagtcttgctctgttgcccaggctggagtgcagtggcatgatctcagctcactgcaacctccgtctcccagttcaagcaattctcctgcctcagcctcccgagtagctgggactacaggcatgtgccaccatacccagctatttttttttgtatttttagtagagacggggtttcaccatattgaccaggcggtctcccactcctgacatcaagtgatccatccacctcatcctcccaagtgctgggattacaggcgtgagccactgcagcaggctctgagtgttacttttgaaaagctgaataaattttaatttcatcaaaacctctaagtaaatgagcacattaactgttaagaatgtggaagagatggtccccttcaatgactattggcctgcagtaaaatcaaacaattaatgaatagagacagaggcacaaggaagaaaagggaaaaagattactgaaactgcaaacaataaaataaattccaaactgagcacggtagcacctgcctgtagtaccagctacctgggaggctgaggttacacttaagcccagcagttccaggctgcagttcactacgaccatcccctgcacttcagcccggccaatacacttagacccccatctctaaaaaactgcctcactgcttctacctttttaatgtacttcgctattaacacagaaactaaaaggcagggtcaattttatcacggacattcttctaatcaataaaggtggcgatctattttgtaaaagggaaaacatgtatctcatcttttaaatctctattatatacaaaaaactacagcacgcccacttcataactggacaagatacgacattacaaattgaattgcataacatcttccaataaaaaaccgatgaaaacaatcttatatgataatcaattatcagttttcaaaactgtttatcacactaaatatgcctcttttgtataaaagtcaataattaaactctctaatatcttgagataaaatattccaggcttccgtgcaagaagaaataccatataatcaaaagaacagactggctggagtaacaatccccacattattatttgattaaaattcaacatttttagttcaagacatatcaaaacctttaagagtatatataacggaatcatttgggaagtcagaaaagcaattgttagaaacagaattaacaaattccagactaaagaaaagtgatttgagtccaaatacctcgcctaaaattacaaatatctttattaactgcactgccaatgttttgcctactattttggagggggcagagattatcttaaataaactgaaatttgtgccacacggaccaaagtcttgccactatactgaaaatagttttactctaacaactctttaatgaaaatgcaatgtacagctaattaagcatgaaatttcagatgacacacgcatgttttgtgcctaaagacaaaattgtcattaggcacaaggcatgcgtgtgtcatctgaaatttcaattttaagttgaaatctgaaattgacacttcaaacagttacggcagagctatgactatttgtttcaaaaacaatattactacattagcattactgccaggcggttccaaatgacgacaggcactttttaatcataatctgcgccactgaacaaagagggcgacatgaatccaggaacgacagtgcggcagtctgaggtcgccaggaaagagatgacaacagagtgggtaccccaccgaaggaaaggggcaaagacctttgtagagatggcctgcgcagatacaaacaaaaccacgaaaagggacctcaaagaatgggagacagcgttcacgaagcaggggtgggggaggggccctattctagttctcttcctcaatttgagtcatcttcccatcgccactaaaccttacggccagtgatcagttcttcgcaagacccaaagctctgaagctgagtctgagtgacgagaggagacgggaagaaaacggggacagagagggcactccctgttgggtggggcaccacattcccgccgggctcacccagccccggctcggatcgccttctctttggtctctcacactagcaccccagaggccgcaaaaagcaccttacccagctcgccatggagcacagccccaggacgctccccatctccacaacgtcacaagagcagcggatacagacaagatggagacagcttctttctcgcctttccgagattatttactatctgcgagacacttccggacgcacagcgcaacccgcccctcagcctcgcgtcacttccttccaggcctgggtaggataaaacacggagcgcgcagcgctgagactgcgcatgcgcgtcactagacgacacggctgtcttctttcctggagaatttctcaaggactgctggctggaaacttaacggctaatgtggatctgaccgtagtttgccaaattaagaaaacggtgtgagcaaaacccacctttacctaccatgcacttgcatttgggcattagtagagaacagagctgaggtggtggttgacgttttgccctccttcatctgaggaacctctctgctttttaggggattgcttcctctttctcagtctttgtccgtcctaactccacttatttcccatttttcccacgtttgcatcctgttttgctcttgcgtttgcaacgtattcctgcagcccgctgcccggaacaagttttattgggatatttatattcatctgtgtgcttcagtttctctgtatcatttctgtttgctattgacttatattttaatttcttatgctattaagatgttacaagaaatttgcacgttaaaattatttttaattagttagataagacattatcaaactcaaacattgatttcgaatgtcatgagctgttgaggcatgtggaacccttgcatattaggtgatgatgcacatctgcagggaatgcattcctataaaagttccagttatttttttagagttatttgttcttgaaaatattctgggaaacagctcaaacttgaaatagtcattcccataactaataataagaaagtgttgtaaaatctacaaaaattgcatgggtcgaggtggggtaaacacctaagaatctggaagaatgtcagaatccctactcctagttattgtaaccactaagggacaatcttgctttattcttctttgccttatctgtggttttgtagaccactcttaaagcaaagtattataatagagcatccataaggtttaaagaattgtggaaatgcttgtaatcccagaactttgggaggctgaggcaggcgggtcacaaggccaggagttcaagaccagcctggccagcatgg

SEQ ID NO: 11315 - DNA, 6000 bp, Homo sapiens
tcatagtaaggtgtttgtgagcaaattgtttactgattccggacttctaaaaagaagtgtaaaggttggaaaactcaggggtgtagcagtatatgatgaaccccaatgccctggctgatccagcttttctggtttagccacagtgatctttgtcactgagcatttcctttccttgtttgcttctgccttttaaaaaattaatattagcactcaaacaaataagaaaaatgtaccagaacagcagtggaaacacaggctaaagacttgaacgagccatcctcaaagacaaaaactgcttatcagtatgtcaaaaagtaatcagtcttattggtagccaaagaaataaaagtttgaaaaatattattttcacctatcaagttagcaaagattttttaaagaatggcattatgttggcaagaactagctgttctaagcatcgtgcccaaaggagaaactgcaatagagatacgcatacaaaatttaggcatgaggatcaaaatccaaagataaaagaatggctaaataaagacattcataaggtgaactatatcactaaatcgcattaaaaatatcaattttaatttcttgagaaacagcaacaaaggaatgttaatttttttagaaatatgaagttctaaaacagccatcccaacctttttggcaccagggaccggtttcatggaagacaatttttccacggatggcagtgggggtgggggaatagttctggaatgaaactgttccacgtcagctcatcaggcattagattctcataaggagtgcacaacctcaattccttgcatgcgcagctcacaataggggtcacgctcctatgagaatctaatgccagccgctgatcagacaggaggaggagctcaggaggtaatgctcacttaccagccactcacctcctgctgtgctgctggcttcccaacaagtcatgggctggtacccgtctgcagctcaggggttggggacccctgttctagaatatgattcaaattcttaaaacaatggtacgtttatataaagcaaataaacttgtggtaaaccatgctgtgttttcaatagcagttctttaggtattgagataattataagcactcagtacatgccaagcactatgttcagtactttatatacattgcattgtatttatgcttgcatcctgccttcatccctcttgtatgtctgaggaaactgaggctcaggacagattagtaacttgcctacagcaataaagtttttaaagggaggagccacaatacaagctaaagccagcttgacccaaaattcatgctcttcacatccatatctgcctataggtaattttgtatcgtaggggatctaagataagcaaatatagagcttttataattgggaaacaaatcagtaatataaatgttgtattaaacacatatatattcccaaaacgacaattctgaaaattgcttcctccaaagatgtaggaccataaacacgagttttaggagcccaactagtgtacttggtaaacagtgtaagtgctgattttaaaaatgcaattcttaccttggaagacttttgcgagccatgtcgaccctgcaaaatttattaatttaggaaaaattattttacacctgcctttgccacatactgtgccaggtgctggcacaatagcaggaatgatcgtctaaatgaatttctttggaagttaggaaagtgtctttttttcagagataagtgtgggtagggagagaaggaaggtgggagtatccatcaatctcacactgaaagtcttggctacctattggctacctatagcaaaggattattttaaggttttccataaaaatatatttgtctgaggacccttgacactcccttggaaatgtcatataattttacgcctccacaatgcattcacacttacactctaactataccaatcaggtgaaataaaatgcttttaacatcacatagcattattctcaacctctgggtatatagcggtccttcgatttgccctctttggtagtgcagtattctcagtgttaagtaagcagagttggagagtatcagaaacaggattctcagcagaaatgtggttgaatggactcccagccctcttggcatcgtacctcatcatccatgcctaccttccttttccaggaaagcccatgtattttagcaaacggacttctgacacaaaggccattatctctacggctttagattaaaaggtaaaatctttcttagactttactctgcaagtcaaccagaattttgatcaattcagatttaaaattttcacttttacttggctgttacagtaagatcaaacgggtaagaatatatatttctccttttcttcaaagaccgtggccctcgtggtaggaaatgttaaggaaggtttattattattattatttattattatgcaaaagtataaaatggtcacaggaataaggaacttagaccttaaacatgatgaattcaaataaataagtacctcagaggaagagccctacaaccaaagagatacctatttgagaaggaaatgctgtttgccttagaatgaacaggatagtaaattaactctccttgttaattcccttccgtggggactaaacgccaaggagtagttgcggaactatagcaaaaagggtcgaaatcaatcagcataacagacaccttatgttatttgttctgtaaattcgacggttttcttaatcgttcagactaatttcaggaggaaggatgagtgcccctggctctgagatcacgtgtcattgccatggagatttatcttatttaataagtaataccactcaatctttttgtaataacgaacacttcttttcttgttacctcaaactaaataaactactctcctatggtggctctaagtgcgggtttcaaaagactataaaaactagtgaataaatccagtctcccatgagtgtgctaattactgttttagttcatgttaacagaagaaatggcttaacaacagtaacaactggaggaggtcaaacttctcattcatttgtattaaatcacccttccattagataggagtgctataatgcatatttcttggataatactctcactacagaagacttcggaaacaagtacaatgtactttaaatgtttcacggtttgcaaattatttcgtacacgcagcgtctggcagttgtgaatcgaggaggaaagcattattttccactacactaataaaaatcaattctcacgtcttcaattaaatgattttcagaagggttcatcacccggaaaaccagtatgtatgaacgccggaaatgcagatggcacccagcctcagaactgcttattctagatgggaaccaaactaagatttctctttattatttgtgaaagccatcccacgctggagagaatctcgccgtaaaacaatttaagaaaagaaagaaataactctgaagagtgtgaagttctccagacaaatcttatagtgaatcttttgaaagaagcatttatggaaaggtcaggggaggtcaggagagttatgccaggagccagggtcaatcgtccccgggcgacaggggttctcccacgtgaaccgacgtcccgggctccgggcgaggcgcagggctcagggcgcagggcgggtcccgtacgcagggcgggcgcgcgggcatctttgtggccaggcgaccccggctcgctctcccggagcccagggactcccgaggctggcgcgggctgcccgcgacaaggtgccagcagcctcgggctcgcgaggagcagctcccacccgcggcttccgagtccagctctgtccctccgccatcccctagtcctccggcatttattcagggagacagggaggcagagagaagaggagaaagcggccgtgtctgcacccagcctctgccgcagcactcgatgagggacagcagggaggctggcggggaggcagagattaaactatgattccatcgatcacggaaagaccaccatcacctacagcaaaggaggctccgatgcgcccacccgggcagcgactcgcggttggtgggcgttcctcgtcctcgccccctcggtggctgtggaatccaccccgcgccgcacacgccaggactccctttcctttgactaaggggaggggaaggaacaaaagagaccccccaccccctatacatacatacacatacacacacacacacacacacacacacccctccggtattttactgctggtcaaaggattcattttcgcaacctcttcttcgaacaccttccccacctgagcagtgcattttcccaaaggtaaagagagataagggaggaaacacagcacccaaggtgatcagtcgattggacactgttgatggcacattctcctcgttcccaaccaaccgcacaaaacccgcaacacctcgcgtccccgcggggtctcccgcgcccctggcccggccctcccggccgcccccagcaggcgccccgctctccgcgggaactctgggacctggccgagcgttccccggcgggcaggacactcgcccggttccctgcagcagctgagggcggcgagcggaccgcgtccaggcagcgacgcgggattcaacttcccggacccgcggcgcggcccccgctcccgctcagggcgccgcggccacagctgagaccccagcgccgcgcagccgcccccgccggggcatgggcggtcgcgctctccgccccctccttccttcacctcccccctaccttgaaaaaaatccatccattggtgcaaagcagacattttgatgtcatttacttagcaccgcttgttttggaggcagcgtcttacccggtcgcctggaggtgtgggcagcgcgccgatgggtccgggggagcggggctgggcggctcggtcctctagcggagccggtttgctgccatccgcccaacttcagcacccagcgggcgaggagagagggagagcggcgaggatgcagaggagggggagggggaggagggagcggtgggcggggagggagcgagagccgctcggcagcgcgcatgcgcctcgcgggccggcgcagcccctcgcccggcgcggccggaggggcagcttcccagcccctgcgcgcggccgcgagagtcccggccccgccccctccccgggcggcccccggccccgcccgacctcgcgcgctcgcctgggcgcggcgcccaccgtgcggaggggctcggccgggactctcggcttcggtgacgcccgtccggagcttcgcgggaggcccggagtcccgagagcttccctgggtgacagcggctctccgcccgggcccctgcaactccactcgcccgtagcccgcgcgctgctgtcctgggctgcgcgggagccttgcacccaggagccggcctgccaggcacagcagcctgcctgctccgggtcccggaggaagcattccctgcgtgggggttcaaggaagtgtgaagttaagcaagttttgcttcccgaaggactttatgaagcgtcctttactttattgacttcctcgcccagaaagaggaccttttctcctaagaatcagtgcaggtgctctctggcctagcccatgccagctgcctcaggcgcccggaccactcgctggagcagagttttgagtgagaaaagccgatgacaaggcaagagtggagaattattaacggaggtgctgatgcttggggcctagagcatccttaggggacagcttggtagttaccaggtctgataatcgttctgtgcccaagtggagcccagcttggtagggaaggagcttgggatacttaatgcaacccgagcgctagattgcatctccaatgattagactaaagtgtttgtgcggaggaagtggagaagcagtgtcttgctcttcagataccacatctgtgggaagaggagggagttcctgcaggagtgaatgggcttttttttcttacacctaattaaaacagattacttgtaaatctgtgtgagttccccttccttgtgtgttcatgtaagca

SEQ ID NO: 11316 - DNA, 6000 bp, Homo sapiens
cctgactggcctgaccctcctataggccctgcagacctttgccaagacctcaggcaccatgaataactacccaacatggcgtcggactctgctgcgccgtgcgaaggaggaggagatgaagaggttctgcaaggcccaggtgaagcccgggggttcccaaaattctgatggggtcaaagttctgagactgagatcagagttcctccagtgctctgttcttgagcaacctagagactcctggatattctgtcttgtacccctcagaccatccaacggcgactaaatgagattgaggctgccttgagggagctagaggccgagggcgtgaagctggagctggccttgaggcgccagagcagtgagtgacaagctaggacacccctctgccttctagcactgtgttcagctccacgctccagcccgtaggagtcccagtggctatgccacacagctaacacatacctgtgacacccggctctcctgtctcccctaagcctgtaactcctgtggtgctggctggaagcctcctgatcaccctacccatcttccttcttctcaggttccccagaacagcaaaagaaactatgggtaggacagctgctacagctcgttgacaagaaaaacagcctggtggctgaggaggccgagctcatgatcacgtaaggggaaggggatggtgacagtggcccatgggccaggctccagccccttgggcaccttagacagctctgcttctacaatccctgacctccacagggtgcaggaattgaatctggaggagaaacagtggcagctggaccaggagctacgaggctacatgaaccgggaaggtaggtgaaatgtggggagaagcagacacatcccagggatgtgtcatgcaagcctcatgatctcagatactgaccaagcaacatgatgctctagtctgtgtacctctgagacaattcaggaggaagccagaggagggggctccaaagccccttctcacttcagttcaatcagagctgcacagttggcttttgtataagatctccttcaaaaaaaatcgtgctgctcagtagtgctagaaaaccactggtgttggcaaccctcctaatttggcagcttaggaaacaaagcccgggttatagaaatcacataggctgggattaggttgtggccctcctgcttccctgcccagttccctgttctctaagctttgtctcctccttttagaaaacctaaagacagctgctgatcggcaggctgaggaccaggtcctgaggaagctggtggatttggtcaaccagagagatgccctcatccgcttccaggaggagcgcaggctcagcgagctggccttggggacaggggcccagggctagacgagggtgggccgtctgctttcgttcccacaaagaaagcacctcaccccagcacagtgccacccctgttcatctgggctgcctggcagagagccttgctgtttacaattaaaatgtttctgccacaaacagcgttcacaccgcctacaggtgggaggtgggggcgtgtatggggacaggagaagatgtgtaggagccttaaggtctgtagtgtgacagtcacactgacccctggctcccatcgcctctacaaggaaaaaggcagagccactaaagggccaagctttattgttctttagttctgtccccctcctgctgccccaggagtagggctggctgaggctctgggcccagatcctgggcctcccttgcccttcctagcacatgctggagctcagcctgggccctatataagccattgacctcctgtacgtggaagaggtagaatgcacctgcccacagcaccagccctacactgggggtccagagcagtatggcagcttccccggcccctcctccagccgccaggacacacagcagtgccaggagaagcagccccaggccaatcacatagctagcgaaggtggcccaccagcgagcctgagccatgcccagacccagctccgtccaggcctcctttagcacacacatcaacggcgacctctctgctggtcctacaacagagcagggcagtggggcaggagagagtcaagagtggaagggctgcttcaagcggggcaagggccaaggaaagggtgggggtgactcaccgtgggtagagctggggttctgctgtggggggctgtgcctcacaaacagagtagccatcagggcttcatgatcagagaggggggtgcccctgtgagggtcaaagcctgtagtggtttcaaaactcttacaggagatgtaaaacccagaaactgcctaggaaaagtaagggccagagagaagcttatatatgagggcctcttcccagagaaccagctcccggctaccccactttccacccatcagtggtccaagactagactagctgagcaaaggatctacacaggttagtagacaaagagacacagcatatgaaagcatgttgaagggaggagcctgaccttgtaaagcacgtagtcaatgcggacaccaaagggaaatggcttcagctcctgctggctgacgtagcagttcttgggtaccattgtgttgccttcctcagagccctaagggaatcattggctcatgctaggatgtgggggagaaggagggagagaagctggggatataggtggggaagtaacaggcaagtcctcaccttgaagtcccgagtttcaagataggcatcatgaagccctgtccactccttcagcaggcagcagcccaggtcttctgggtgcatgttgaggtctccacacaacagaaccacgtctgccttcttggatgtgtggctgggggaaccaggttggtgaggcgggagttcttccatcaccagctcttccccatgactggggccttgttcaccctcagcccctgggtcccatcccacttcccatttcaagcccaggctcacacactggatgaactgggccaattcccaagcttgggccacacgatgtgctaggtagatgtccttctgtcgattgtattcggcatggagctgagcaagatagatgagatcacagcagataagactgagggtcccaggggtatgtctgaatcaagcctgtgtctgtcacttggcatggtgtttggtatacaatggataagccttgcccattgcttccttataagatcttgcccccacacctcatccccaggtatgagagctagagaagtaccatctctctgtcccaggactgggctgcatgtcccagccctaggcactgccagcttcactcacatgggtcacataggcgttgagcaccatgccacttagatggagcaccagcagccccacagccttcccactgaaccagtcaccatgatggatctgcaggcaggaggagatagaaactcagggcaccgccaccatctttctgcccatcccctgcagctctcagagggctgcctcctctaccttgtattactggaggtggggaagggaggtggaagaggtcaaaggtctgccttaccatgtaggggtagccattgagagtgtagatgtgctgggtaagctcctggattggatgtttggagaagacacagaggccactgccaatgattccgctgaaagccaagccctgcttaataaccagaaaaacagggagagacacccagccttcttcccctcccttgtcttccagctctgatcagctatttttttctttttctactgctgggactagccctagaaccaaggcgacagcctttggaggagtatagggcagccagaaaacaaagctgaaatgggctgaagtcataggaccttcttggttcacccttctccttctctcacatccagagggagaggaggctggaggagactggagagtgcaggcaggatagggaagggctggcagggccaagagcctcctgggatgacaacaggcttcaggccagtgggcttctcacctccggaagtggtgtgcagctgggtaggtaggtgacagcttctgtctcaggtactggaagtcctgctcactccacacctgagggaagcggtgaggatgcctgcttggtctttccccagtgggacggtctgtccctcctcccagcctgggttccgcaccgtgctgcacaatctcacctcctccagcaaagccaggtcgaagctctcctggttcagaaagtctcccaggcgcctcatgcggtcggcccggtgcttgctcaagtacggaatgcccctaaggaagggaagagcggggcaggggaggcgactgctgggaccaccggcgctggggccagatgtggactttggaggttcgggttttccctacaccctgagatcgtggggcgggatagggggaggaaggctgcatgggtgcgaacggaaggtggcccccagaccgcactccgcagacgcactcaccagcagttgaggttgaagatccgcagtcgcagggagaagttgggcttcatggttggggagctccaggggcgctaggcggctcgaactctccagcgacggccgcggtggggacgggggcggccggcggcgccttctccccagaccgttccttcttcgcaggcggcgcgcacaggtgggcaccaagcccgcgtggctcaggtcgggcccgactcccgcgttcccccggcaaccggccggctgttcccaatcaggcgggccgccaacccggaaaggcgatccgctgccgaaatccgggcgcccaggctcggtaagggccgcgcgctaggaccctgggggtccggagagcgcccccgggtgggcggctcccggttccttttcctccaagctcgtccccggcggtcgcggccgcccgcgcgccggcggcccagcaacaggcgcaaagttgaggaaaggcccagccgccacgggccgccctcgacccgcccctgggccccgcctcctgcgagcggcggaggcggggccgcgcggttgccggagcgacgcgcagtgtttggggtcaccgggcgtccccgggcgcggccatggcaaggccgcagccgtgcgggcccccgcacgctaggtgcggctcgccgtcgctgccggagcggccgctgcaggtgaaggtggtggggctcttcagctgccccaactttcagattgcgaagagcgccgctgaggtaaccacagagaaacctccgtcgtgggcggccctccccgctacccgctctcggccgcgtggactgcaggcgccgcgcctcctcgaggcggcgggggtcgaggccccaccggccgaggaaggggctggcgtgtcctggccgggcgggctccgtctggaggaccgggaggagagtataggggggcaagtgcgggtccgggggcgggcgttccacttggcgacttttaaagggagaactgagcgaaggaagggttcagaaccgcgctgggagataaggtaatcccctccgagacacacacacacacacccgcagattttgttctacgtcaattttttctttaattagagatatttaaatttatggaaaaatgattactatataactagctaatttttacaaccccgccacctcggcccaagcgatttttgttaactattcatgcggggagattcttttctttgaattttatagagccgtcactgcgttccaatcgaactagatgcttcacaagtgctttggaaaatcatttctttgtaaacactcagaacgatactaaaggaaaagcacttgaggaaactggaagaatttggccagatcagtcatgctgcagcacacttacaacctgaaatgcaggagaaatgtatgaaatgtcggcatgtagaattcagcccttcttacagggtttgctccagaaatgctgtccatggcaaacttctcgccgaagctcacttgactccaggaccatgccttaattaatgtttttaactcccgaagtacccagctggatacttgacaacaaaatgttcccaaatagaagatatcttggcgcggtgactcacgcctataatctcagcactttgggaggcagaggcggagttctagaccagcctggccaacatgg

SEQ ID NO: 11317 - DNA, 6000 bp, Homo sapiens
tgtgcacatcagtgacatttccctgcaggattacattgcagtgaaggagaaatatgccaagtacctacctcacagtgcagggtggtatgccgccaaatgcttccacaaagctcagtgtcccattgtggagcgccttactaactccatgatgatgcacggctgcaacaacggcaagaagctcatgactgtgtgcatcgtcaagcatgccttcgaggtcatacacctgctcacaggcgagaaccctctgcaggtcctggtgaacgccatcatcaacagtggtccccgggaggactccacacgcattgggtgcgccgggactgtgagacgacaggctgtggacgtgtccccacttcgccgtgtgaatcaggccatctggctgctgtgcacaggtgctcgtgaggctgccttccggaacattaagaccattgctgagtgcctggcagaggagctcatcaatgctgccaagggctcctccaactcctatgccattaagaagaaggacgtgtggccttcttggagcatgtggccaagtccaaccgctgattttcccagctgttgcccaataaacctgtctgcccttcagggcagccctaccaaaaaaagcaaaaaaattacaactaagttattataatgactttaaaaaatgtgcatgttgatatacaatatgaatttcaagaaaggaaaagggagttataaagcacgttataaaaagaaatatctggccaggtccggtggctcacacctgtaatcccagctctttgagaggccaaggcgggcagatcacctgaggttgggagtttgaggccagcctggccaatatggtgaaaccctgtatctactaaaaaaaaaaaaattagccgggcatggtggcaggtgcctgtaatcccagctacttgggagactgaggtagaactgcttgaacccaggaggtggaggttgcagtgagccaagatcttgccactgcactccagcctggctgtgacagagcgagactccatctaaaaataaaataaaagtaaaaaataaatgttatatctgatgagctgagaactgttaaggcattgaaacacagaatcatgaattcttgtttctctttagtaattgggcacttcctcaacaattgtcactaattttatggatgggggcaggctatagactgagtgtttttgtcccctctaatatattgaaacctaatccccaatgtgagagtatttggagctggggtcctctggggggcaatcggtgccctataaaagagacctctggttagagccctaatgagattagtgccactataaaagaaaccccagagagatccctcactcctttttgcatgtgaggacacagcaaaacaaaacaaaacaaaacacaaaaaaacaacaaactacagtctaagaatcaggatgtaggccctcaccagacaccaaatctgttggtgccttgatcttggaattcccagccttcagaactgtgagaagtaagttactgtttacaagccacccactctatggtattttgttacaacagcctgaatggactaagacaggtaaaggaaaagaagataaagaagaaagttcaacattaaattgggatggtcatgtagtcttatttctaagaaggtggcttttcattttatgggttgtgtaaggttgcagaatactatggtgaatgagtgcacaggctctccagtcagattacctcgttcagattgtggctctaccacttgctgtgtgatcttggataaaccactttatttctcattgcctcaatttcttctgaggcatagggaaggggaggtcataatatcacctcacagggtccttgtaaaaattaaatgagatacacatttaagcacataaaagtatatggtatatagaaaacactaaataatgaaccagaaactatatcattctgaaaaagaaactgctggtcaaagatgtaacaataggggatatttcacaaattttccaatctttatactttagtaaagtcattcctgtttgactgtattaatttatgtttgaacttccattaaatatcttttctccttgcaaataaaaattacctcatagattttcatggcattttctatcgatattttcccatagaatcataagtcactgatgtagttttttctgcttagtaaggtttattgccaatttccagtagaatagactttactgtgtacaaaatatatattattctaatgtgcaaaaaatgtaaaatataactcatagctactattatatatccacccacctcaaaatgaaacacaagggtagtcatactattcattttggtaaaattttttaaaatttttatttaaatttaaattttcacttaaataatcaagattcattaaaacattctatgagatagtaactggactatactgtcgtagatgctacagaagctgctatgcagtcattatctagctgggataaaactgaccttaatgaaacaaccaataaagttaaaaagtagaggataaataagtacggtcatttgctgcataacattttggtcaaagatgaactgcatatacaagtgtgggaccatacaattgtaatactctatttttactgtatcattcttatgtttagatacaaaaatgcttaccattatgttacaagtgcctacagtattcagtacagcaacatgctgttcaggtttgtagcctaggagcaatatgatatactatttagcttaggtgtatagtaggctattgcagctaggtttgatagatgtactgtatgatgtttccataatgacaaaatccctgtcattcagtgaaacgtaactgtactaagttggatagtaaaagtcataagggctatacagaaatcagaagactgtcaaaatggcaagtaattaaggaaggaggtaaagtaataaggtgggaggaggcaatctgccaattaatacatatgtgaccatgggcatgttaactgctctgtgctcactgggtctttgtttataaaatctaatgtatttaaactgcctagtacaatctacatgaactgagtgttaaagaatggccaggtggttatgagtgaaaaatgattcaggtgacagaactaatacaggctagagatgggaatgctttgagtagtagagatataaatctttaaaaaactttggcacacacaaaaagaaaaagaagttcacatgtaattttatacttttctataaatttgtatagtagcaaacttgttttttcctgctgcatggaaaagtaactttcattcagtattccctgcttctcttcatcttgactcaggttataatggaaaagttactctttcaacagtgcaaaggttctttggaaaagaaacagagcagtgtcaataattcaaagtcacaaagtcaattatagcacgctgtttatgtgtttacaaagacgatacctcaatagattgatttcaccccacaaataaaaaaagagcgtttattaagacaaagaggaaagagggagagaaaaataattgctctctgctgtgtgaatcttgtttgcatatttcttatgggataactgattagctggcaggcagtaaagaggtcattctggacacattgtccttgggtaggctgactaggcatacaaaaaatcctgcaaggcaggctgtttctccgtattgtctgccagtgacctttcatcagtactttatcttagttgaaccagaactacactccttccctcgctagaagtctcagtatatatgatgtattcctctaagaggaatcctttttctctaaatctgtacttctgagcctgtatttgaaagtgatcataatctggggggcttaaaatggagtttcttttacaaagagttataatcataaccgtttatttgaatataaatttgacattaaacataaatatgcaaaatttaaatttccctttggtcttgcatttttctaaggattaacaccattattctcacactccaacaaactaatatattgtactgataatcactatcaaatgaattgtaagagctaactgactcgaatagacaataactaaccttacttttaaagtattttaagagacagtagcatagatgcctgcacatagctgattattgctcctgtgctgcagtgaattaccacatgaacacattttgaaaagatttgttagcttcatgtccacaggcattatgaagcaggaaccacttttagattaagattgtaacctgaggaaaagaacatatgcatcagtttagaaattaaaatcccctgagatatttctttcagtaatgcttaaaagcctaaatttgtgctcgtgtgccagtcacctctacgtaaggaaaaacattttgctactctttgttaaaagtgaagaggaaatattgtccacttgttttgtagatgttggccaaattatataaactttaaaatctgtaagacaaattgaaatattcctttattatgtcttgttaggatgagagaagtttgcctttcagctgctccttaattttaaaaataacaacacagcaacacttctctttaaaatcaaactctgctcatttaaattctttggtaatagccatgaatccacaccttaaaagaaggaaggcctgtgagttcgtgaatccactttcctactcaggagaagccctatgaactgacttgaatagacagtaactcaccttaaagtaaatattttcagaaacaataggttaggtgccttagaaattcattcagaggcttagaaatccacattaacacagttcttacatgcttgagtctggtctacatccatttacgtaagtaaaactccccttccagactgacgaaattctttttgtgacaagaagacaaaggaatacgatggattgataagcgtagtcaaccgcgcagagagttctcgcgcgatgttacgacgctaccgccctgacatcaccagttgccatggtagcaccgccgagagtaaaggaggggtggtgctagacgtttcgggcagagctcggccgctgcggaggacaaggaactctccctctcccactagtctgacttcttccaaaatgagcggcctggatgggggcaacaagctccctctcgcccaaaccggcggcctggctgctcccgaccatgcctcaggagatccggaccgagaccagtgccaagggctccgtgaagaaaccgaggcgacacaggtgatggcgaacacaggtgggggcagcctggagaccgttgcggaggggggtgcatcccaggatcctgtcgactgtggccccgcgctccgcgtcccagttgccgggagtcgcggcggtgcagcgaccaaagccgggcaggaggatgctccaccttctacgaaaggtctggaagcagcctctgccgccgaggctgctgacagcagccagaaaaatggctgtcagcttggagagccccgtggccctgctgggcagaaggctctagaagcctgtggcgcagggggcttggggtctcagatgataccggggaagaaggccaaggaagtgacgactaaaaaacgcgccatctcggcagcagtggaaaaggagggagaagcaggggcggcgatggaggaaaagaaggtagtgcagaaggaaaaaaaggtggcaggaggggtgaaagaggagacacggcccagggccccgaagatcaataactgcatggactcactggaggccatcgatcaagagttgtcaaacgtaaatgcccaggctgacagggccttccttcagcttgagcgcaagtttggccgcatgcgaaggctccacatgcagcgcagaagtttcattatccagaatatcccaggtttctgggttactgcctttcgaaaccacccccagctgtcacctatgatcagtggccaagatgaagacatgctgaggtacatgatcaatttggaggtggaggagcttaaacaccccagagcaggctgcaaattcaagttcatctttcagggcaacccctacttccgaaatgaggggcttgtcaaggaatatgaacgcagatcctctggccgggtggtgt

SEQ ID NO: 11318 - DNA, 6000 bp, Homo sapiens
aggctgccagtctgcacatacccctaacccccacttaggttggtgaggattccagcctgagaagaaaggagtcccctctgacaacctgactgtctttagccccagcccctattactcaggtctccccttaatttcagaaaaacgaaaaaaaaagtcatcctccaaattggattaaggttctaatcctaaaggacagcacaggctaattgagaaaatgggagaggttgaggggggggcggagcgggggagaagggaagctaaaaatgatttctgattaaaaaaaaaagtaaatggactatttttctaaaacttccatgctgctattttaacttttgtgcttcattattctaacactgctttttaaagctaaggacaacctgagtacaattttaagatcaaactcatgaaaataaatatacactatgtatgtatcataaatctcagagaaatcccagggttaatttacaaaattttaacagaggtgaagggaggaagatcttaattctattttgaagttttacatcaaagattcatcatccatcaaatcagtagtggaaagcatttaacattttttgtgaagcattctgtacaatgacctatttgaaattaacagagtatctcccctaagacacgaagttgttaaaaatctactgcagtactagtaacataaatgtgccatagatataaaaaatagtattgactgactttgaaccaagtacaaaataacaggttgactcaaattacaatccagtcttccaacatgttagacttgagtgcactttctaaattttaactataagtgttggtgcattcaggtgtgatagagaacctaagtataaagagaattagaaaatacaggaacaggtcaggcatggtggctcatacctgtaatcccagcactttgagaggccaggcaggtcgatcacttgaggtcaagttcgtgaccagcctggccaacatggtgaaaccccgtctctactaaaaatacaaaaattagctgggtgtggtggcacgtgcctgtaatcccagctacttgggaggctgaggcaggagaattgcttgaacccaggaggcagaggttggagtgagctgagatcaccccactgcactccagcctgggcaacagagccagactctgtctccaaaaagaaagaaaagaaaacacaatggtaaagaaaaaaactaaggcaaagatctactggttgataacaaaatgtccacagtggtgcctgaaactgaatccaaatacgtaaagttaaagtccagtgccctatttacaatgggcaaccactcttgcctctctaaagccaaatatttacagcacagtttttagaacagcatcataatttcttttttttttcttttggtttacaaaggaatatatctgcctgaactaatctgatggaaaatcataatccatttcttcccattagcctttgactaaacactaaagctaattatgctggctcttttgggttctcacagcaacaaggaattttaaagaacacatttagttccactgctttatgcaagactgagcggtttcaaaacatctaggtgctaagatgttagacagagactacgtaaatctcgtttacacggttaattaagaccttgtgatttaggcatacagacaacatggatctactggatggatatgcacactgttaatatgttgtcctgagtctgagactgctactgccccactggttctgctctgaatgcacttgtaatcactcttggtcagtaccaacagcttaacatctatgtatctttcgtattaaaatcttttcctcggacaactgtgatttttgtactagctaactggcagctcgtatgactttggaggcatgaaatgtatgaattacaccgttcaaatttaacagaaacacaggcagatacagatcatttgggttaatttcctatggttttggttggatattattaaggagtctgggaggatttggtaagaggtagagctttgttccaccttcctgatttggtagcacaggcaggatttcatggagaaaggaaactgctagacagttgttctggaaagtagaatccattcccccaagtatgggagggttctgtccctgaggaggggtctcagaaaagcagatatgctgatggactgtggaaggaagctatctgcataggaaggatgaagacattcttcctaaaccgaaagggatccaagtccactttaacttgctcaattacagcttaaccaaattcagctgatcttataatacaaagtcacaaatcccatgacaatcctgctgccttcattctgcagccacttaagctaaacacctctcaaccacctcaaaaatctgtttactctctgaaaatgggatcagggacttcctctcctgattacctacccaatatgaaaatacaatatttattttcacagatcgtattattttttaaatggcaaaaatattacttccattcatattttagaaaattgaaccaagatttggaatgacatgcttttaatgtggttcctacagcttttctatgtaaaacgcaggctggcaccgtttcacacagggaagtagctcagagaggaggcatgtccacagaccgcgtggtgacaggtgactgggggaagttcggacctcgggcttcaagtcctgactcatcactaacgggttctagagctctgggcccttcgatcttcatcttgaaaatgacagcctgaaaggactttttacggcccccttcagctttaagctggtcctgacctaatcacatgtttcaagttctaactgaaaattacgagaaggaaattaggaaagatgtatcaaagtccatgtttatcctggattaactttgtcaccattgtgctgctgtggaggcaaacctgttgcatcacatggaataccctatttctggctgtgcattagaaatacaagaggcagccgactggctttttatattttcattttttaaaaaagtaaacaatagtatccctcgatgatgggaagttctcaggtttcacctttatagtctgaaagtacacacagaatgccacctggcagacaagggccacacagctgaacccggggtatgctggctagctttaccacgcgtgaagactcactttaaagccacgtccccaatccttaccagggggctgatcagtgccgtcgctgttactggtggggcgattaaccgtgtagcggccagagaatgaggtttgcgtattacctgcccatgtatttatacccacctcgtgtggcttgtggtcaccagagcaagagcatgcaaattaaaagcaacgagatttgaccttagatcttactggacacatctactactatattggaaacaggaaaagaaagagcttttgacacagcacctggtggaaggggcaaacctccatctccccatacattgcattgttgcagtcttcagagtttcaaaggcttgccgtttctccctgaaaaacacggccggtcgggagggatttctggcgcggcccactcacctctttgatctttgcccttttctcgcggatggcggcgtcggcgggctcccggctctccaccccgattgggggcacgaagtccaccgggggcaggcctctgaacggcgccttgtcacgcagctggtcctgggccaccttcttcttctccagtaggatgtctctttggatctcctcgggcagcttctgcagggtctccttggcttccctgagagcccgctcgtggttttcgcggatcctggccaagttgtcctccagggcggcctccgggtccccgggtgccccctcctcgcggcgccgggctcgcccctcggccgcgtcctcggcgcgcgccccgggcccgggcttgtggtcggcggccggctgcaaggcggggctggagtggaacaggaccccgctgagcagcttggaggagtctggcaggaagaagatcgccccgaagcagagcgtgatgaaggcgctgaataccagcagcagcacgaacttctccgtcaggcggagggcggcggggcccgaccccttcctgccaccgccgccgccgagccccccgcccaggacgccgcccgcggggctgctgaagagcggcaacaggccccccacgggcatcgctcccgctgtccagtggtccggcgccgcgccgctcagcagccaaacttcgccgccgctgggagtccgcggctgcggggctgggtcctgcgtagccaggccgcccgaccccctcggctgggctgcggatcctccctgggggaacaactccgcgccgggtcttctccccggggcggctcctcgggcacacaggcacgcgcgacagaccgctggctgcagcccctgcggggagagaaacagtaaaacgtagtaattacggcgatgataaagtttccagcgggtctccgccctccgactcctggcgagcctccaggaccgctccccttaagcagagtcctgtccagtccgggcaccgccctcgcagcccactctctggacttggggtgaagttatcaggtcccgtgggtaggggaggggtgtcccgcgcaggaaggggtcagggcagcgcgcgagcacctcggggaggggcagcgcacctctgggcaggaggggcgcagcgtgggcgggagactcgtcaacttcgcccgctccccatctccgcgctgagactgctgcctctttcctaggctgggctgagcgcgctgtcccacggtcccgcagccccggcgcggctcaggtgggcgagcgcgccgacctgcgggcgaatggcagcgagtagagcagcacggtacactccgccgcggccccgcgagcactaatctcactgccggtcttggggcggtggaaagcgagggaggcgacgcggccggagagtgacggcgcggccgggccaatcacgcgccgcccagggtcccgcgggggcggggccgaggcgaggagggggatgcgcggggcggggagtttacgggaagcgcagcctcggcggggcccggccggcggcggggaggtcgcggggccgggaggcgcgaggtaggcgggagccgcggtgaggaggacggtcgaacccgtggctgaggcccagcgccgagaagcggcaggcagagttcggggtcggggagtttatcctgcgctggcctcggcaggggtccccggggtggttgatcctcgactggcccgggaggcgcctgggtccgcgcgggacctctctgcctcctcctccgacccgtgcggggcggtcgggggcgctcccgagggggtcccgggaaaggcggggtctggcagggggtcctgggcgctgggtcgttcagaagcacggctttactccagttaccctctttttatccaaggccggggttccccgggtgcctggtagcagtgaaaccccaagtccctcggttaggggagccgtgaccctgggagcttttgagctctctggtataacatccttttacatcctaagagacacagttctgtgcttgcttaggacttttttcgtatgcgccctttcttcccccaaaaaacaaaaaaccgaaaaaacttgtatgtctctcccgcccacccgtactttcactattcatttacctcatagaagttggtcaaattttccattcgaagacgagttttatgctgcggtagcttcaagcaataagtcgaacactgtgttgaaattaagtcttggatccgactacttccagcgaagtgaggagttggtccaatagaaattattttccaaaatgtgttgtaattctcctgttgctccacaaataaggggttatcagagaggaaaacgttgactgacttcgcatttctgaaagctggtttgtagtcgccttatttcatccttacccttctctggaaatgtgacattagttctgtttgtgcttaagacaaaggaaacagctggcacctttcgggaaggtggctccagtacagttgtttccaggtgttaagctgtatgagaaagtagaaaagtaatcagaaatccttactagttttcatttaatcatttaattattaat

SEQ ID NO: 11319 - DNA, 6000 bp, Homo sapiens; identical to SEQ ID NO: 3762

SEQ ID NO: 11320 - DNA, 6000 bp, Homo sapiens
aagtggtaccatttattaattaaggaggcagtggaagagaaggtcttataggaaggaagaagatattataaattcaatttgggagatatgtgtagatacacacacatgtatacaacacacacacaccctcctttttttttttttttttttaagagacagggtcttgctctgtcacccaggctggaatgcagtggcatgatcataactcactgtaaccttaaattcctaggcttaggtgatcctcccactttagcctcctgagtagctaggactacaggcaagcgccaccatgcctgcctaattaaaaaaataataatttttagagaggaggtctcactatgttgctcaggctaatcctgaacctctggcctcaagcaattctcctgcctcagcttcccaaactgttggaattataggcctgagccactgtgcctggccagggggacacgttgtttgtaaaacctataggccatgtaaatagagttatctggtaagcaaatgaacacctcagtctatgccttacttgttctgcttgaatattatagcacaaatcacattgtgtcatatttacctgtctgtgtgctttcattctagagagtaacctgagagactgtttagcctgtgttcccagtaaagccaaaacagattcaacagattctagctctccccctctccatccttgtttccctgaaggtagaggaccatgtccaactccctcccctactggaggcagcctcatgatttcccttcaggcttaggcctatttattatcttctcttccaaaacatcccttccattcactgctatctaattctacccttaagcatttcagtatttaatattaaaaaaaaaaaaattggtcgggtgcggcggctcaggcctgtaatctcagcacattgggaggccaaggtgggtggatcacaaggtcaggagattgagaccagcttggccaacatggtgaaaccccatctctactaaaaatacaaaaattagctgggcgtggcagagcacgcatgtagtcccagctacttgggaagctgaggcaggagaatcgcttgtacctgggaggtggaggttgcagtgagccaagatcgcgccactgcactccagcctgggtgacacagcgagactgtctcaaaaaaaaaaaaaaaaaagaaaaaaagtcaatggtatccgccatctactacattaaaatattctcagactagaattccatgtatttcaaagtaatcatttattcaggaaagttttatggtgcatctacttctccaaaaaactagagttaacgagagacaattccaataattaaaggcttcacagactaaaatggccctaccctatcttttctgtttccctacccacacctctggtctcgatactggcttctttctgttcctttatgaagtcccaggcacgcttatgtctgtctttgcttaatctgcatcctccatccagaacacatttcaaagtttggggccctcctcctccccaaaaaacaaaccacaaaaaacaaacaaaaaagttaaagaaaaaaaatctgagcccagtattgggtgactagtgtgagagttgaaaaattgtgcaggattaataataaaaggctttatatgctattccaaggagtttaatcctaaaggcattaggaggaaggatctactgaagtacctaagaaggaaaaacctgatcagctcaccttatcaacacagatgactgactcatcccagacactaatttctccccaaggactaacacagccataccatctctccttcctttaaatctcttttgtggccaggcacactggctcacgcctgtaatcccaacattttggggaccaaggtgggaggactggttgaggccagaggttcaagattagcctgggcaacatagcaagacctcatctctacagaaaacaaaaaacaaaaacaaacaaaaaataagccaggcatggcggtgtgtgcctgtagtcccagctacaagggaagatggcttgagcctgcgattgaggctgcagtgagctgagatcgcgccactgcactccagcctggagtgaggctccgtcacaaaaaaaaaaaacccaccaaaaccaaaaaaatcttttgtactttaatcactcttatccacttcattatagggacaggaaaagcctccgaagagtttcattgtgagaaagtataatccccaaggaactgaaaaagattaagtgtggctagagatatactgtgtcttctctcctttcgtatatcgcttaagctgctccttcaaggcaagaaagcaagccttctttacccttatacccctctcccccattactgtttcgtattcttgtcctcattgggtctcaaaatcgtaattcacaagcttcactttctcttctcccatacctttgaaacatactgcaatctggtatcatctccgaatgaacactacttctgccaaagttgccactgaacccttagctcctcaaaccacaaagtattttttggtccttattttgcctgacttctctgcagcattccatgctgcctacctccacaccttttttattctcttctatcattatttaatttctgggatcttgctcactcctggtttgcctccagtttctctggctgtttgcctttctcagtctcatctcttcagcctccttccccacctgcttcctgcaattgctgaagttctttagggttcccacctttaaccttctttttggttcaatctgcaaacactctctaggggactcttccatatccagcacttcaactctacttgcctgtgtctttactcctagtatagttgtctctccacagtgactaaacaaactctcttcttgccatttccttttagaaatcctcagaaacgcctaactcagcattcagaagttcaccttatctctttccacttcttactctcctgtccattactgctttcagttaatagtctactagtcactgggttacttaagtgtcaaccttacttctcccttcatttaatcagttctcagttccgatcaatgccgcctccttagtaactctttattcttcaggccttggcttatccccttaccacttctcacctagatcatggccagagccccctaaatggtctccccgcctccatcttgaccagttcaaggccattcattctccattgctcagtgctacaggtgaactgttcataatcattccttatgcacttcaatgggccttccttcttaatgtctttaggattaaactcctcggaatggcatctaaagcctttcattatctgtctcctgagcatctttctgacttcatcacactagtcaccaggctctagtgggaccagtcaggcttgcctacatctctaccttccacaaacttccttggcttggaatgcgcttccccttgctaattcacgatgatctttcaagaataaactctggggagcagatgtagtggctcacgcctgtaatcccagcacttttggaggctgaggcaggagaattacttgagcccaggagtttgagaccagcctaggcaacatagccagatcttgtgtctacaaaaaattttaaaaataaggtgtggtggtgcatgccagtagtctcaactacttgggagactgaggcaggaagatcctttaaacccaggaggtggaggctgcagtgagccatgttcatgccactgcactccagcctgggtgatggagctacaatgtgcctcaaaaaaaaatactcagctattacatattcttgggaggctttgctgacactcccttacctgtctgagtagatgctcctcctctcttctacagtcccataacattcttaagcaccttcatcatactctgacaaccactgtctgtctggttaatgctctgacccttcaccatactgggttgtcccttgagggaaagtcttatcttttatctctacattcccacttcctccacacagtacctggtatacagtaggcatccaataagtgcttttaaaattagttactgtgtacctactggggttagttgtgtccatttatgtcccccttaaaactgacttcaaccctgggaggatatcttcatgtttttttccttcccctctcaaagcacagtatatagagtgcttaattaaaaacaagcgcttaacaaactttcgctgctttttaagtaaaccttaaccctcattccaacatcaaaaatctacactcttgctccagttgagtgagaggggtgtcttaagaaagaaaccatgaaggagtcaccctctcttgagaaacaagggggatcacaggctcccaaggtgtgtgtatgcgcgcgcagggggaaggggaggtcgaggcagggctcatatattcctggtggaatacagtgtatggtggggcggatgtccaaattttttaagcaaggttttcccatttctccccatctctccctcggtgccatatgctctttcttttatctcgcccagtctcacttaggtcacgtgcgacatctggatctctttcctttaaccccgattccaaacccactcctccccggcaaactcctcccgggcccacggcacgcatgcgcagtaactcccgcaggggcccggtcagtctcgtgccccatgaccctctcttaaaacacgcgcagtctcctctctcttccccctctgctcgtttcttccttgcctaccagcctcacctgatgggctcgtgctctctccgtccccgatccactcgggctccggcggctgctgcttgggcgccttcggcatcgcggtggcagttacagctactgtggcggcgcccggtgctatttccgcttccggcggcggggaaccccgatggggctggctctccaagctggcgcggccaaccccgcccccgggctgcgcacgtgcgagcttcgccgtcatctcgggggcgtggccctggttcagtggaggcgtggcctgcaatgacggagcggggccggcgtccgcttgctccagtcgcgtaaacacatggcgtttacgactgtctgggaagcctgacgccgtgacctcccgacgccgcgagactcaaggaatgaacataataatttcctactagtatgaaggagttgaggcatactgtttttttgtttgttttgttttttgtttttttaaaaagcatattctagtttctatctgtaactcgtttctagttctgccaccgcgatgccgaaggcgcccaagcagcagctgccggagcccgagtggatcggggacggagagaacacgagcccatcaggtgaggctggtaggcaaggaagacacgagaggaaggggaagagagaggagactgcgcgtgttttaggagagggtcatggggcgcgagactgactgggtcatgggcagaaaagacagtgcagaccaatggctaagggagaggtctgatcggtccagtgttgaaatgtgtcacaaaatcccgaagtgtacaattgtaaacagggaactggagcccaacatgcagaagtcacggtgcagtggagcttcggttcatttattttttttggtaacagctttactgagatataattgacatacaataaactgtacacaaaataaaatggcacccaaaataaactgcaaagtatcacttaaataagttttgacctgcataaacccagtaaactatcaccacaatcaagactttggttcacttctaactctaccacttaatatgggagcttgagcaaggtgctcctgtagttctgtcagctctcaaaccactacaatcatgcttttgttgccaccattgtctgaattcacacttgccaaagtcaacagatctggggccatcctactcactctcccatcaatgtttgatagacttggtcgctccctccctcctttgttttcttcagggacactactctctataggtttcctttgcatctaatgggcttctcctgaagtctaaatgttgaagtgcctcagggctaaatctttgacactctccttaatctagacttatcacctatcacctcctgactttaaataccatctataaccaa

SEQ ID NO: 11321 - DNA, 6000 bp, Homo sapiens
ttttggtagagacaggatttcaccatgttagccaggctggtctcaaactcctgacctcaggcaatccgcccaccttggcatcccaaagcattgggattacaggcataagccaccatgcctagacaataatagataatatttattacaagccgggcatggtggctcacactcgtaatcccagcactttgggaagctgagatggggaaggattgcttgagcccaggagttcaagaccagcctgggcaacatgatgaaaccccatctctacaaaaaatttcaaaattagctggttgtggtgttgtgcacctgtaatcccagctacctgggaggctgaggtgggaggatggcttgagtctgggaagtttaggctgcagtgagctgtgattgtgccactgcacttcagcctgggcaacagaataagactcttgtctcaaaaaacaaatattactaagcattttctatacgcttggcactagtcgaagtattttgcctgaattagggttattataaggattcactgagttagtaatgtaaaatacttagaagagtgcttggcacagaataactgtgaattattatgggtttttttttctggaaattaggaattgaggttatttcttaggaattgaggttagttctcatttgtgagaaattgggatctgggaaaagtaagaaattgttgaagagagtgggggcatgaggttctcagtgaaacacaggaatgctgagcagatacccatacagaattggtgggaacaatctgccctagtgtgtaacttcataagcactgcatgcctgtgctcaggagtaggcactaagaaagcagatagctggcaccgagatggatgtgatgacaaagaagggggcaagggaatcgagagtattggcaagaaaataaagtgttgggctgggtgctgtggctcacgcctgtaatcctagcactttgggaggctgacgcaggaggatcacttgagcccaggagtttgagaccagcctgagcaactaagtgagaccttttttctacaaaaaaaaaaaaaaaaaagaaagaaaaaaaggccgggcacggtggctcacgcctgtaatcccagcactctgggaggccgaggcaggtggatcacgtggtcaggagatcgagaccatcctggctaacacggtgaaaccccttctgaactaaaaatagaaaaaattagccgggcgtggtggcgggtgcctgtagtcccagctactcggaggctgaggcaggagaatggcatgaacccgggaggcggagcatgcagtgagccgagatagcgcgactgcagtccagcctgggcgaaagagcaagactccgtctcaaaaaaaaaaaaaaaaaaaaaaaagaaaaagaaaaaaattagccaggtgtggtggcacatgcctgcagtcccagttcttcaggaagcttaggtaggagggtcacttgagcctgggaggttgaggctgcagtaagacctgtttgagccactgcattctagcctgggcaacagagtgagatcctgaaaaaaaaaaaaaagaaaataaagtgttggactttgattgtaacccaagaagaaagcaaaatggagagggctgaaagtttaggaaaatatacactagaatataaaagtctataagggcaggagcttttgttctgttttgtttacttctttgtatctccagtgtctagagccgtgtatgggagaattagcatgctgacacaattctactttctacacttgtattctacttatggaatagtcatgacggtaattaagacagacagactcataatcctatcaaatcttcagatctactaattaccaatttacagtaaatcaggagggcagaagatgttaaaggacaacataaggatataaaattgcagggaaaagaaaaggagcggggcaggggaaacagattaaaagagacaaaaaacatttcaatcatttggaaggtatggacattattgagatcctgatttgaacacactataaaaaattaggacataggcccggcccggtggctcaggcctgtaatcccagcactttgggaggccaaggcgggtggatcacctgaggtcagaagttagagaccagccttgccaacatggtgaaactccgtctctactaaaaatacaaaaattagctgggtgtggtggcgtaggcctgtaatcccagctactcgggaggctgaggcaggagaatcacttgaaccggggaggctgaggctgcagtgagccgagatcgcaccactgcactccagcctgggcgacagagcaaaactccgtctcaaaaaaaaaaaaaaaaaaaaaaaatcaggacataattgaggaaatatgaacactgagtattttgtaagtattattattattttattattattattttttgagacgaagtcttgctcttgtcacccaggctggagtgcaggggcgtgatctcggctcactgcaagctccgcctcccaggttcacgccattctcctgcctcagcctcccgaatagctgggactacaggcacccgccaccacacccggctaattttttgtatttttagtagggacggcgtttcaggcgtttcaccttgttagccgggatggtctcggtctgctgacctcaggtgatccgcccgcctcggcctcccaaagtgagtaagcattatttttatttgctgtgataatagtactgtagttatgttaaaaagagtccttatcttttagaggtaaataattgaaatatttacatatgaaatgacatggtatctgggatttgcttcaaaatacacagtatgtatgagcataaggcaagactggccatgaattgataactttaatctgggtgctggttacatgggggctcattatatacttctcttaattgccatatatgctccttctctataaaacttatcatattctaaatagcaaaaacagtatgttactattatttccacttcacttgctctccagtgggtatgtaaagagggaaaataaaaaaggaaatggttgtaacaaacgtagccacctaaagccaggaaggacagggccagtaccataagatccatacactcaacacatgaatcaagtagggattgtttttaaaagggatgctataagctacttttttaaaaatcaactttattgaagtataatttacgtgataaatgtatacatttgtccatctcaatctttattgagatgtataacttttctatccacatctctgctaacatttggtattatcagccttttggattttagctattctagtgggtgtatagtgcctcgttgtaattttaatctgcattttcctgagaataatgtttaacatttgtgctaaattttgattatacatatacatatttttcaattgtaacaatgtaataatctctggcaaatatctttattataacttttatttctgtatttctatattattttatgaggaatattatacaatttgaacactacaagccacagaaaatgatcagtttatggaactaagtccgacttccaggtaaaacgtaactatggtatggtatttacagtttgtgttgactaaaataagctcccggctgccagatggagctataaggttgccacctctactgccaccatctggtaacattaaaaacaaataaaaatatagaaactatacaattctgggttagccaaagtcaaatttccaacacaactctttctcacgcacagatctttgaaactatagaatgcattcaaactgatttgttctttagttttcgttacttttaaataaactatattacaaaagtgtcaaatagcaaaatattttaattttctcaaattcagggaagatgctttatgacgtacctgcttttcgatttgttccaagacctttggcaaattactttagaactccataggtatcttgaggataactgaaccttttcctaacttaaatcatagactgccagacggaaaaaaaatgtcctcgatgtttttagtctcttactgcacaatgtcaagatatcagctgggttatacaatagttgccctctgcatactcacaaatgttaactccagtccttttttgtcttccctccccgcctaagaagctaccaggtcacatgctggcggatacgcagtggcggaaacctagcggtgacagggaaggacagccctctgcctactgatctgcaggtttctcctccagtttgctcttacaccggggtcctccgctcggaccttagcccattcatttgatgattctctcccagttcgttcttccactgggtcccttgctcagcactacccaaaataaccaccagctcagcgccggctgcaccgccgctcccccgcccccgcccccgcccccgcccccgcccggtggggctgcacctgccgaggccccggctcggctccgcgatcacggtcgcggcccccggggttcccgaggggcttctgcgcaccgaggcaggcgggactgagcggcactctgaacgggctcccctcttaatgtcccctcgcgcctgagcagctccggtcccgccggcgcagggtgcgggtacccgggccatgccggcccagagaccgccgcccccggtaccgctgcccactcgaagcccctggacgaccccgccgcttaccggcttcggcccgtggggcgcccggtagaagaggcgtgcggtccgtgctctcctcgccatcgttccgggccaggtctcgaaccggagacctcatgacgcctacgtgagcaggtgtactcgccacctggcagagaagggagcgccggcccgacagcccgaagcccccgggccgagctggctggaccgggcggggcgggggcgatgacaccgccccgcggccacgtctagtccccgcggtcccgcccagaggcggccgcgccgactccgcccccgccgccatcttaggtgtgggcaactctggcttgggttggactagggaagcggagttctgggagttctcgtaggattggcgcaaagtgagcccgctccgcccgccggtctacgcatgccggggagccggtgttcggacgaccgtctcccgctcctgcacccccttgtaaagtgcaggggccaccctgcccgcagcgaggatgagtgggggcttgcgggcgggcagtggggacttgaattgcacataattaaggggagggcttcgaccgaactagggaagtgggtggtgtgcatttcacaacttgacattcgcttgttagcggtcagttgccatactgttagcaacctttgtacgatctacctcgtgactgtggcggcatatttacctcgtgactgtggcggcatattgtccctaaaatagcttttttttttttttttttttctcccaggcagggtcttgctctgttgcccaagctggaatgcagtggcgcaatcgcagctcactgcaacctccaactcctggactcaagcgattctcttcagctcccccaagtagctgggactacaggagcatgccaccacatctggctaattttgtttctactttttatttttgtagaggcttggtcttattatattgcccaagctggtttcgaactcctgggctcaagcaatcctcctcggcctcccaaagtgctgggattacaggcgtgagccactgctcctggtcctaaaatagcttttaggcggaaaaacagcaatggaaatttgttgagtcctatgatgttgctggttttataggtaaaagtaatcaacataggtagtttcatatggttcgacctatggaatcctctgatgtatgtgtgcatgctttatctccacgatagaatttggatagattgtgctagcatttgcggactctgaaagtgaaactaggaaaacccagcttgccttggcagggcagatctggatccgccaataaaggctgtctctgtggaggtagaaaataagatgtagatgctctcggagagtttggtgtagacagggaagacccacaagccactaattcagtaaaccaggttagaagcttagtgaggttcacgtgagaaca

SEQ ID NO: 11322 - DNA, 6000 bp, Homo sapiens
ttgtatttttgatagagatggggttttgtcatgttgcccaggctggtctcgaactcctgagctcaagtgatccacctgcctcagcctcccaaagtgctgggattgcaggtgtgagctactgttacccaggtgatgtatattttataatattaaaaaacggtaacattaaagaaaagttccagaagtaccaagatgtatataattctaccctctaccaaaatttgcttaatttttccacgttttcttccaatctttgacaaaacccatatattcttattgaaatcatgcaaagatattttatattctaccttttccctgctgtacatttcatacacctttttgatgtgctatgtagcattcaaatttgccctctttaatggtataacatggttcaagtttataaactgcacaccataatttacataacttcttctcatgtttaaatcttcatattcttttcattttcccctgtttattattggttgcaaggcaaagaatatctttgtacacagagatttccccctttcttcttgccaggtatggtgacttcttttcttagaataaattcttaggaatgaaatacctagttttcccttcaccccccaaattctaaaaactttctcttcctctctttattcctataacctcttactttttcagtctttttgcttatccccttgccttctctaatataactgatctctgccattggctctaacagtggttgtttagatactataaagctctcttgctgttaaatcccagcttgacctcactatctcttaggtggcccaacattgcacagtgcattgtgagggctgcttcttgctctcatttcttaacccttcccctcatcacagtgtctacttccttccttccactccactccttcactaaggttaaagtctgccagggatctctctgtaagtccaaaggcttttttctctatttttatcttcccattggagctcctgtcctgaagtgactttcctcctatagttcttcaggcctttctctttccttttctctccctactcaaggattatctctttcataaaactttctctaagggttgggatatgcctacctcttttgagtccacagtcaacccaggcatatctcatcccttaactatactttgccacattttaagttgtttaaccctcttttgaatgaagatgaagttgagggggggaaagtaaaaacttgcagaagcctctacttacagtttcaaaataaactcttgagataaagtaaacaatcacaggccatactgtattagtaacagaagatctataaagtgaggtccatggatcagcagcatcagtgtcacctgggagcttgttagaaattctgagttgtaggctccacctcagacctcctgaatcagaatctaggtttttaatataatcctcagtgattcacatgtgcaatatagtataggaagcactggtctagtggaccagtgaatgtctgccaagaaggacctccatcagaaggcctctaaggaccccttgggaacctcaaaccaatgatttacacctcttgctgggcaagggtggctgccatacctatcagccctttgatgacagctaccaactgatctcctgactaggtgggtggcctccctccctcatcattccaggtacaggcacattcctttgaagctgcaaaagagtttgaagaatacaatctttctcagagaagactgttcttcaaccaaggatgtaggcaaggatgtagagtcattggtaaagtggacacatcctactaggggttaggaaacactgtttctatcatctttcctaacataaaaatatgtgaacaacatagaatcgaaagacaagaaatatttatattcttccttctttcactcagtaaatatttactaagcactcactatgttccaaacactattctaggtgctggggatacagcagggaacaaaacaaagtcccagtcttagtggggttcacgatctctagggcagtagtccccaacctttttggcacctgggaccagtttcagggaagacaacttttccatgaaaattttgggggaggggggttaaaggatgaaacagttccacttcaaatcacaaggcattagattctcataaggagtgcgcaatgcaacctagatcccttgtatgagcagttcacaatagggttcaaactcctgtgagaatctgctgctgctgctgatctgacaggaggcggagctctggcagtaatgattgcatgcccacccgccactcacctcctgctgtgcggcctggttcctaacaggcaacagacagggggcctttactctaggggatggagatggacaacaaacaagtacataatatggcctgtagtgatagcgctttaaagaaaaatagagccaggcaataagaccaatgggcatggctgcagcagattaagcaagaaagaaagcataatgagatgagactggagaggtgagtggagccaagtcatgtagggtctttaaggagcttggattttatgccaagtacaatgggggccattgcaaagttttcagcagaggagtgacatgatatcgtctacattttaacagggtgtctctgggcagggtgcgatggctcccacctgtaatactagctctctgggaggccaaaggtggtggattgcttgagtttcaggagtatgggaccagcctgggcaacatggtgaaacttcatctctacaaaaatacaaaaaattagctggccatggtggtatgtgcctgttagtcccagctactcaggaggctgatgtgggaggattgcttgagcccaggagatggaggttgtagtgtgctgagatcatgtcactggactccagcttgggtgacagggcaagacctggtctcaaaaaaaaaaaaaaaggtctctctggttggtatatggggaatggactctaaggggctaagagtggaagcagggagccgaatagcaggctgctgtaagcaggtgtgtggttggtgaagattagggtgaccaagtggtagtggtgaaaaaggttccaacaatctcaatttccctatttaaaaagtcatcacaaggtaactgatgtgaatttttaaaaaatcttggaggggaaactgatatagaaaacaaactgtagaaataacagggcttttctgggttgagcactgttaactacaccccctgggaatcagtgtcatttaacatttcatagaagattaagaaaaaggagtattttgagatatgtctagatacacaaatcatactttgctttccacatagtaaaatgtcaaatcaatagggagcagcttctggaacatctctaaagccatgtgcataagctggaaagtggcaggtatcttgtcacatggatgagtgtatggcagctcacatagggaaagacaattcagaggatacctttaagacaatgaactctgaactgctggttgccaccaaggtaaggaatctagaagttgttttagattactctttcaagacatcaactcttctaaagtccaaacagccagcaaaaggtctggctgtccagaataaagacaaaacatcagccttaacaaagcctcagtacatccctctttgggcttagtgtgcagtgctggtcactgcatcctaagaaaaagaagcgccagagaaaggcaagtaaaataattaaaagaatagaggggctttttttctctgggttaaatgcccataaagaagataagatgcttttatagcatgaaagactcagaggaagtaaaaatagcccttgtcatccaatcctataattcttaaattaggggacaaaagaagcttgaaaatgggagtaatgaagaaaccgtcgttggaggacatataaaagaaggtccttctttggctggggccaggggtcaggtctttaagtattctccaatatgtggaagtacatgtggtagctgtaaatggagggtgggggtgggggtgggggacacgcagcccacctcaacagtccttcgaagggacaaaaaccactctggactggtgcccgccttccctctttccccaaatcaccacggaatacaaccacagaaactcaaaaccagcaaaaaacgctgacaagacattcaaaggattcaaaatgctaatactaaatctcattgtctgggaaaattagattgaaaataaattcaagggtgcaagatttataatagattaacaagggaaattaaggatgttggtggggccgggaggagatacatccttaactttgtgattcacacgatggagcaatactgtgtccttcaaagaaatggtatttggtaatctgagttggacagctatcataaaccatttcctatatacactgttagcatagtcagaaagtgagagttatggattgacatagggattagatcatttgaatttttaacccacagcacaagtccttcaatcgttttcaataaacagagggagagggagactctgatgaaccgttgctcacgtgttgaacagttagcaatcccgggctatcgggtccctgctgaccttccttcagaaaaacgaatggacatgtaaacggaatgaggaaaggagggtaataaccagagtgtcattgaattgagagatgttaaaaatgggccacaaccaacacatgggcccttacttttaggtgaaagattcctatatataaatacatagtatgttctctcttgccaagaaatattagactaaggaacttcattcctcacgaagaagataatcccctcttccttcccataggtcccttaccttacctgcttcttccctctcgcgggtaggaactttgagccccgcctctcggctcgtccaagctccgccttccccgtccacctgtgtgcccagcccctgacgttaccggtcggcttcagcggcctgcaggattccggctcccaattggtcggcccgtccacggcttgcgcagctcaccaatggcagcggtgctgggtggaggggtgcccacatccaagatggcgtccccaggagctgggagcgggtgaccggcggcggggaagcggcctgggttggccctcagattgcggggtctgggggcatctcgccgggcaaacccttggcccgcctacaaggacttcccccggccagagcaatggccgctgagaacagcaagcagttttggaagaggagcgctaagctgccggggaggtgagcccaggacgctgagagggataggggattggaccaaacccttccagatcctaatccctgaatcccgcgggcctggggcgccacagaggccagaagactggtttggggaagctgggactgcctggtggcggcagggcagctgtcaggcagcgaagcgaacagcgagctttggggacggctggatgtgggtgtagaccggggtctgggggcggaggtttcaggaggggtgacctcagcgggaaggtggccgaagattgggcgtaaaggggagtggagttgggtgaatagtcagtgtcggccctggtctcggaagttcctccccagagctgcttcccactctaattaggactccctctcaggggtctccaccacgcacaggtggttggtcgctcgaggatggccccttcccttgatccctgaggtcggcacttacccgaaggattccggtgggagtttggggccgcctgccgagagggttaggcaggaaaagtgaggacgattctcaaccctgaccttactttatcttgagttggccctttcccactaggaattattacaagacgaccacagaatcagggttattcctttggcattttctaaggatttgtccaaccccaagtgacttcttcctcccctgcattgtaatgcacttcttgtgcaaatgcactaaattcgttcattcttcagttgtttaactggagagcagaccccctaagactacccccaccctcttttcggtgtatgttgagacttttggcaaattatccatccatcaatctactgttggtttactgtttcagtttattttgggcaaagtcctgagaagtataagg

SEQ ID NO: 11323 - DNA, 6000 bp, Homo sapiens
gctgaggcaggagaaccacttgaatccaagaggcggaggttgcagtgagccaagaccgcgccactgcactctagcctgggcaacacagtgagactccgtctcaaaaaaaaaaaaaaaaaaaaaaggtagtttatgaaggggaaggagacaagcacatctgaatatcaatgcggggatccacctaaaaggaggaatacaaatacaagacaggatcctggccagtgtaaaggtctggagacggtcagggagaagacacccaaagcccagaggaagacactggtgttggaaaggagggaaacaggacgaggggaggcttggagattaaaggctccaggagtccccacctgatggctgctgttttttctctacaataggtgtgaggtcatttgctgagtggagtaggatcagagaaagggaaaatgcaggctcaagtcattctggagcatgagggagggagctgttaggcagagctgggacctggacacacctccttccccagcacaccccattagccatcacggacctcccttccccaccccagctgatatgtacagatcacacggcttctccctcccacatggcactcattctcacacggggtttgtagagaccgcaaggaacccacactcatagcagtgtctgacacatgggtggagctccacagaaatgtactgaaaaccactctgatgaggactcttatgtcctccacaccactcactgtcctcactgtccgtgctgctcacagggtacctttccagtcctgcttctatgctcatgtcttacttccccagtgaagtcagttgaaagctccttgaaagcatggtctacgtcttatatatttagttagctgactgctaaagaggtgattttcaaatgtgaaaaacgtaacgcagctgcaaacctaacccagatacgtgatattttagtgatactgaggccaatggtcttcagcggaaaacctcaacggttgacacatatttgtcttatacaagtttaatgctgactttactgggtaaatatgggtaatacaagtttgatactaattctactgggtaaacactgaaaataaggcccacagaggatggatgactttctgagagtcacacaattcacaaggtatggaaatctttccatattatctacataaacaataaacaggaaccaggacaattcccaccacccttctcctattttaaaactttgaggacttggacttggagaagcagtgaaactgtcgtaaattaagtgggaagaactcgctccatcccaccaaaccagggtcttttggaaaagaatattccagatacatgattgccctaaggagacgctgaagcagacatacctaggaaaccccaaacgttccttggatcctgatacagctggtaagcacccaggccggctagactgccgaagagcagccctgcagccagggacggcacgctgcctagaaggaagcaaacgcagcttgcattgtaatgtcaggcacttatttcactaacggaatccaccagacctcctgccctacaaaggacagcacaaagaactctcaacacagctcacagccaaggtggactcaagcaggaaggcgttaaggagagtgtgctatcttctcagagaagtcagggtcttcccaccccatttttctctcctctaataggcagggcacttccatctaaggaaaggaaagaaggccatcttccctccttagacagaactatgactaggccttcttttgtaatgcctaaccttgtttttactaaccctgtttttagactctccctttcctttaatcacctagccttgtttccacctgaattgactcttccttagctaagagagccagacagactccatcttggctctttcactggcagccccgtcctcaaggacttaacttgtgcaagctgactcccagcacatccaagaatgcaattaactgataagatactgtggcgagctatatccgcagttcccaggaattcgtccgattgataatgcccaaagccccgcgtccatcaccttgtaatagtcttaaagcccctgcacctggaactgtttactttcctgtaaccatttatccttttaacttttttgcctactttacttcagtaaaattgttttaactagaccccccccccaccccattctaaaccaaagtataaaagaaaatctagccccttcttcaaggccgagagaactttgagtgttagccgtcttttaggccccagctaaataaacagactcttaattcgtctcaaagtgtggcgttttctctaactcgctcaagtacaacactttctaatcaggcctcatcaaccatgaagggctggaattgtgtacaggcaggacctccagcaaatcacaaaagcagaaggaaatagggccaggcagttaaaaaaaaaatagaagatcaggagaataagaagtctggtgcagggattggggtgggaatgcaggcaaggactagggggcaaaaacaagcacagccactgacacacccctgcctggcctaatgaggaaacttcaaaataccagtctgtgtaggccagaggttgactcctacttaagcccagagatggcacttgggggtcatggctgatgaatggcagtcaatgataataacaaactacaaccacccctgcctacctttagataaagaggcaaaaataagtaattccacaagaggcctggctcagcttcaccagataagcaaaaggcaagggcaggagctgcaagactgacaaggaagcctgcactccagcttggggacctacagcaaagctgagtcaaacgagattgcttctcagggacacaggcactcacatttcactggaacaacgtgaagatgttaagaggctaagtaacaacaaaaccctacctgtttttacatagccaacgatcccaccagaaacaaccagtgctgtgtagccaaagccaaaccaatgcaaaggcactctgaaaacacaagagaagtcagtgagaagtcagtgctaacctggatttaaaaacaaaccatattgtcataggatggggctaaaaggtaatcattccccacaggtcctatgtgcccacaggtactatcactgaaaataagcaccacagaggttggatgactttctgagagtcacacaactaagcaaagctagagctgggactcaaacccaagtttctggcccacaggtccagtgatcctcccatcccgcacgccatcccaggcagtctactcttagggttcttttcagctgaggaaaggaactctggtttccagaagctcctggctactctctaaccatttactgtctactcacaatgggaagaggggcttctccattcttctcttctcagtccagaaaggagactaccccaggcctgcatctggggaaaacaagccggatcagcagtggttaaaagcacagctccccagcagtcagaaagaagtgtgtccaacctgcaggctatgcaacctaagtctcagtatccttcactgtaccatgaggataacactggtaccaatttcctgggggtgttgtgagcattcaatggatgtcacatgtaaaggtgcttagcacctagtaaaccctgaacagatgccgatcatttcacataggtccacaggaaactcagcaagatccactgaccagctctataatcagggaatgtgttagtcatttcattaagcactcacattatcactaaatcggaaagcaaatactcccgtgcccttaatccaactactttaatgtctcttttgaggggtggtagggatgttgcttttcttcactgatgcaacagccaatttcaatactcaatttttttttttagaaacttctgcatccaactcacagttctcgttaggagggcagaaggggagggtaaaatacacggaaactcaagtcagaatcacatgtgacattgcacccttggaaaaacagctcctattttcttacagaaaagtattctgtatgcagtgaacctaacaagatggaaagcaatgcatacgccgtttattctgtttaaagaattaggccaggcaaagtggctcacgcctgtaatcccagtactttgggaggcccaggcaggcggattacctgaggttaggagttcgagaacagcttggtcaacatggtgaaacccatattctattaaaacacacacacacacacacaaatcgggcatgatggcatgcacctgtaatcccagctacttgggaggctgaggtgggaggatggcttgagcccaggaggcagaggctgcaataagacatattcaggctactgcactccaggctgggcgacacagcgagaacccctccccaccccccaaaaaaagaaagaattaatttcccataaaacggggaagggcagcgggcttgggatcttgcccacagttcttaactcgaggcggcactgagtaagggaggcttttaaagagctggagcaacaaaaccaccaggaaacgaggcaacactatgctacaagggtaagcctttgcctcaggagctcaggtgctccgagcatccacagcctcttttaagacaagcagaaaatacccaaggagaaaagcaccgaccacacggcataaaggcccgctgaatcggggggacgaaaagcagacggccgtgaaactcctaaataatccctaaaagttaaaagtggcagaaaataaaaacaatactctccaaagacctgcaccgacctgccgaaggcccgcggagtccactacggagcgcaagccgcgggacacagcagccaggtctctccggaaacgcgattgcgtgcgcgctgcgccccggggccgcggcagggcggggagaaaggcgggacgtcgtggcgcgtgcgcagtgtccttggagagaggtgagcggagaatggggacagtgggggcggggcttgagccgcggattaccagcacgcgccctgcatcccgggggcggggagtgaggcggggcatcgcggctagcgccgttggcggggaaccgggcggggaatctctgtgcttcctcagtccccaggcccagcacctgcagggccgaccagctccagtcccaggtccaatcctgagtggccaaaagccggaaacccggagttggaattggatcttgcacaagctggaccacgtaagctgggccaggccagaggtggaggccaccgctgcgggaggagggcatctgatgattttgaaggaccccattaatagagggtataaaccaggtgcgggccatcagggaggattgtcactctggcccgatcttgtttgtttacaccaggaagggcctgccttccacctgcaagaaaatatggcagctgcagaataatgtggcgcaatgccaaatatccgtttgttttagggagtgaggctacttgagaagcatcttaaatggggagagagagcaagttaaatctgatttccacgcagctctgtggattccgaatgtccacagtatgatgttatctccattcccacttccgagccgctcctcttctgtgtttcctgcaccaccattcgctcagttgctctacactaaaatttgctgtcatcgttgacttctccctctccttcatcccctacaagtatcaacatagacaactccgatcaatataatcatcagtgaataaagcaaattgcagcgcatattcttaaagacaaactttccacttgcagcagcacctaccttccagatagctaaattgaagcccgtgtttatcatagctgcttctaaccagccagagctgataataactaagaacttgcaggaattgcagtatgccagaccttcaatttaattgaagactttcctgaacaattaatgagacttgtcttaaccagcagggaatggctttagggactcattcttccctatgcaggtgcaagcctcaaaccttaattaggatcatccaccatgatcctcgagcccttccccaccttatacttgaagaggctgaacctcagagaattaaattacctacagtcctggtcactggtagagctattatttaaagt

SEQ ID NO: 11324 - DNA, 6000 bp, Homo sapiens
catcttgccatcatttcttaatgtggtttccctgttccacttacattagaatcacttgggacaattaaaaatgtagcctttaaagacactccttgaaaatacccctaaatgggcagggcgcggtggctcatgcctgtaatcccagcactttgggaggccgaggtgggcggatcacgaggtcaggaaatcgagaccatcctagctaacatggtgaaaccccgtctctactaaaaatacaaaaaaaaaaaaaaaaaaaaaaaaaaaaattagccgggcgtggtggcgggcgcctgcagtcccagctactcaagaggctgaggcaggagaatggcgtgaacccaggaggcggagcttgccgtgagccgagatcgagccactgcactcgagcctgggcgacagagcaagactccgtctcaaaagaaaagaaaagaaaagaaaagaaaagaaaagaaaatacccccaaatgtcttatcttgcatgatgctgcatccccagtacataaactctgactgggactcagaacgcaataaatatttgctgaattaaggaattcttgaactgcactctaaacctaaagaatcagaatctggaataaaggatcctatgttttattaagctccctaagtgatttttttatccatagtaaactctagcaagcaccaatacaaaggataatgtccaaattatgtagaatggcttcataaggcccttcacaatctgtactctagctacttttccaagttaatcttttgccacttctcatttgcatagccatagtgaaatacagtttcattcataaaaagcaatgttgctgaacctcttgaattgctctttttccttctgtgtcctttctcctttgctagctctacaacttaagcagaaattcttccttatggagctttgcctgacatcttcacactttcttctcatcaatgctcccacaacaccctgctctatttttgtactatactatcatactacttttatttccatttctgtaccatgagttcaaagtcaggatctgtcttattcctttgtatttccagagtaaagtacagtgagatcagtcacttactctcattcaaatgtttgttcaatgacagaatgaatgaatgaatgaataaaaaatgtgaagccagagattacaggatttaaggtataaatccaagtcaatgttctgaggttttcagaaaccagtaagtcaataaatatcaatctggttgctctctgttctccaaaactttttccagtgcaatggttctcaaagtgtggcatgggcacccctggggtctttaagaccatttcagggagtctataaaatcaaaactgttttcgtaataatactaaaatgttatttgcctttttcattctcattctctcatgcgtatacagtggagtaattgagaggttacatgatgtgtgataccacaactgacagaatatagaaagagatgagaatccagctttcttcaattaagccaaacattaaaaagatttgcaaaatgtaaaacaatgacactcattaattttttgaaaatgttatgtatgttaatatgtaataggtttattattttaaaatgaattaatattttaaaaaatttcattttaattttgaatatcataactattaatagatataaaatttagaaagcttttgagggtccttaatttttcagagtgtaaaggagaccttagatcaaaaagtttgggagtcaattctctagtcttttcacaaactggtcaaattatgccaggctcagtggctcatgcctgtaattccagcactttaggaggctgaggcaggacgattgcttgaggccaggagttcaagaccagtctgagcaatgtagtgagacccctgtctctacaaaataattaaaaattagccaagcatgatggtgcacacctgtggtcctagctacttgggaggctgaggtgagaggatcgcatgagtgaggaaagtgtgaagatgtcaggcaaatcttcataaggaagcctttctacttgccttacattgtaaagctagcaaaggagaaaacaaggctgcagtgagctacgatcacaccattgtattctagcgtgggtaacagagcaagatcctgtctgaaaaacaaaaaaacaaaaaaacacaaaacccgaacacacccaaaccccccaaactggtcaaattatacaaacgcgtaaaccaattagttacccacccaaaatctgaggaaacagaaattgttacttaagaaggcctgctactcaaggttttacttacttacttcccccactattgaatgcccaaacttctctgcgcatgcctgttgatatactacccagctttcaagcctgtcaaaatgtgtctcttcttccatgaaattcttcctgatttttcacaactgcatatgctacttgccagtgtgatctgtacagcattttttcacctctcttgtttttctgtatcttaattacatgtatacttgcttttccttcctatcagactataaaggccatgaaagcacagtgatataatatggaaatagaatgtgctttgtggtccaacacacctgggtttgaattccagttccccttcactaattctgagacctgaggcaagtttcttaaattcttagggttcttgctgccacatttttgaatggggataataataattgtcttcttgtcattctgcttaaataggaagagcttagcacaatgcccagcgtaaagtgggcacccaataaatagtagctgttactattaaaaatatataaatcttgtatttccatttatattaccttcagcattacaggcacttgataggtatttcttaagttagactaattaaaatctaacacactgtagaactttctccctgaagcagaaagaacatgagactcaaacaaatgccaaccacggtcatctactcttcctttcttttcagactgactccttttttgatataaaacactaggattattttctctttctggccgtctgaacttttctattttttgcattcctcttattctgtaactataaagctcttgttagttttttaaaaaaattataagtttaagtatactcttttgcttcccctgtgattatttctaatctactacaaagttgttccataagctgaaggagtattccttctgagatcgctaaagagataattttccttccttcagtaaacgcaaaaatactttatttgtatttcttcaatcacacatatatttttagcttttataaataaaatggactctgtagtcttaggataatttaaatatacattagatactagcgactgaagatatcagaaaataccttttatatataaaggatttctcgaaggtgttcaaaatttacatatgcttattattgatgtgtgatagacctcagagacatgcaaaacaccatccttggctcagcaacaagaactctgtttcaaactttcaagcatcaccaaaatctgaactattgatgctaaaggtattaattgcaaattgtttggggagaacagaatacaatctaatacgtactgttaatttcaaattgtttggggagaacagaatacaatctaatactaagagaaaagccaaccaaattctttgggaaactctgttcttgattttaagtacttttgtaaacatagcatgtaataagtgatgagactatttctcaaaaactcaagttctaacaaatttcctcttttatagttcctagatgtccttttcatataattcacaaaacttttattccctccttcaaatccctgaatattatcacatgagcattgtatgagggaaaagcgtctcaagatttttatcttatctgtttctaaatctcctctgggcctgtgcaactcagttatgtcagctagattacaatgatcccaaccttgaagatcctgaggaagattgcacaacatccctcaagcatttttcttactgccatagtttgtattctaaaatggcagaaacagagctaaaatattgatttgtttttctttatctaatccatatctttcagtcctttaggacaactgcgctgttttcaaaaattcaaatcgactttaaccaccacccgaagtgcagcctataggtaacttccctagattattattaaactcctgagaagggtgagagccaaagtatcaagagtgccaaggagaaatgcagaatctcacaggaaagcagaattttttttaaaaagttcctgtaagagaatggtgccttgaaacagaaacttaaactgtgatgagttctccaaaggtccgtgagaaaaaaggataggtgagaaacagagttaagagtcggtgacagggcaaagggcacagaggcatttctcaactgcagagatgggagaaccctggaggttggccacctcccttttcatcccatggttgatcgaactccctctacatatcccagactaggatcgcccggcctgtccttattttagaagaagtcacctctcccacccccttctcccaatgccccctttcaagcacgttgtcacccacctccaaggaccgtgcccaggaagatgcatttctttttgtggcgtttcagaaaattccatacagacctcagcatctttaggccctaggggtgtgggctgactaggggtgagggactgcttcaccaggaaactgtttcttcgtcacctggcccagatgacccagcaagagcgccgtcgtcccgttctgtgctctcccgaaatcacaaacgtgactttccgcagagactgtcaccggagcggcaagggggcgtggactacagcaaagcagctacgctttctgccgctgccgccgcgcagccgccgccgctcactggtccgacaagcccaggtccgttcagaaatagctcccgagtgccttttcattagactacccccggaaacggggtcccgggcccgccgcgttccgctgcccgcgctcctcctctgccgcgggctctgtagctgagtggtggctgggtatggaggcgaaggcggcacccaagccagctgcaagcggcgcgtgctcggtgtcggcagaggagaccgaaaagtggatggaggaggcgatgcacatggtgaggagcccgggaggtagatgctgcggggtgggacctttctccagccctcaacccgaccccggcatttgagcaaacgttctttctcgtcaccataatttttatggcagtcagatgttctgggtgaacaactggctttactgcctcgaaactttctgtagcccattctcacagtggctctgggcgaaggaaggggaggaaatacacaaattatttgtttcattgcggtggagtatgctgcagacttaacattctgtcgccggctggcacgtgctgcctccctttcctttctgtggtcacacactctccaatctacaaagtcacattatttgaggttttggcccttggaacatgtccagcagaaggaaggaaactgagaacgtttctggtagagagcagtatggaaacaagtccctgtacaatcggcgtctcgcattcattcattatttcctctgcccttttacttccttccctcactcccttcaggactgcgaaataaagggggctttcaacagaatgctgtgtgctagcgagcttcttaactgggaaaaaaagtttgtttgtaaatatatgtatttacattttaataactacatacagccacgtgccacacaatgacctgtcggtaaaggtcgttatcctggagcattaaatctactcaccttagccctattgtcccatccaagtactaaccaggcctgaccctgcttagcttccgagatcgggggacattcagggtggtatggaggtagacaaccctagtttctatgtagacttctgggctaaacactttcgctaccttttaggttgaccctgggctagcacatgtaaatacatttacatacgtttacaaacaaacttttatcccagttaagaagctcgctagcacttttcagctccattataatcttataggaccacatatacagcggtggtg

SEQ ID NO: 11325 - DNA, 6000 bp, Homo sapiens
ctgtcttctccacaccaaagaaaggtagagcattttggaagcttctacatgaagtggccccagcagggtggacaggatctagctagatggttagtaactgaaatcaccatgctcctctgctgtccgcctccttggggtcacaaagtactctcccctccacaacagcattaatcttcccacctgcatgggaggaaggcagggcacactcagatcactatccccattttacagggaggaagcaggaacccagtaggggaagcaacttgcacagtgacaggacaggtaaggggtggagcctgggctggcagctctgccagttgacagggctgctccaagcttttaattgtgggggtggggttgctgggttgagtttcatcaagggcagctgctctcaaagccagcactgggctgagcaactgagaagagggaagacattgaggcagaataccttggggatgggaggtggcagttcttccactccacgaggtgcctgcaccagctatatcccagtttctctagtctgatattgaggttttggttgaggtgtgtccagagagtgatggagcattttacttctagctaactttttaattttaccattaaggagtgtgtgcatggtgggggttggagagctataacttataagcttttttttgggggggttgttgtgtatttttttgagacggagtctcgctctgtcaccagagtggagtgcagtggcgcgatcttggctcactgcaacctctgcctcctgggttcaagggattctcctgcctcagcctcctgagtagctgggactacagacacatgccaccacgcccagctaatttttgtattttcagtagagacagggtttcaccatgttggccaggatggtctcgatctcttgacctcatgatctgcccacctcggcctcccaaagtgctgggattacaggagtgatataagctttttcagtggagttactgggcaagatttaagttagggctttggatcaaagcaaggccatgtggtctgaggggaggaggggaagatggaagcgagctctgttactacgaaacctgagtctcagtcttccaatctgtaacaaagagatacaaatatccttactctacccctacccacttcagagagaaaggcaagaatatatccacaagtgagcataaaagtagtagtaggtgccaggcacggtggctcacacctgtaatcccagcattttgggaggccgagctgggcagatcacagggtcaggagttcgagaccagcctggccaacacagtgaaaccccgtctctactaaaaaaatacaaaaattagctgggtgtggtggcatgcgtctgtagtcccagctactcgggaggctgaggcaggagaatcacttgaacccaggaggcagaggttgcagtgaccttagatcatgccactgcactccagcctgggcgacagagtgagactccatctcaaaaaaaaaagtagtagtaggcagggtggggtggctcacccctgtaatctcagcacttttgaaggccaagtggggaagataccttgagcctaggagttggaggctgcagtcagccatgatcatgccactgcactccagcctgggcaagagagcaaaaccttgtctcgaggggaaaaaaaaaaaaaagccaggcatggtggctcacacctgtaatcccagcactttgggaggctgtggtgggagaatcacgtcagcccaggagttcgagaccagcttgggcaacatagcaaaaccccgtctctacaaaagataccccccaccaccaaaatttagctgggcatgctggtgcatgtctgtagtcccagctactccggaagctgaggtgcgaagatcacctgagcccagggagttccaggctgcagtgaaccaagatcatgccactgcactccatcctgggcgacagacagagaccgtgtctaaaaaaaaaaaggaaagaaaaaagaaaaacagaaaaagaaaaaaaagtagtaaaataatagtattaaatgtttatttaactcttcttttgtgccaagcactgttctaagcactttacaaatgtaactcatttgctccccatcacaaccccaggaggacactgagatacagagagagtatatgagctgctcaaggtcacacagccagtctgtggtagacccagataaggacccaggctgcctggctcgagtgtatgctcttaaccactgcactttgcagagttatctgcaaacaagagccacttccaccagggagccggaggcagtcagttaccacactggagaaatgccataccctatttctacctgcttgcctttcctcttgcttgtagcttccctccactcaggccttgggtttgtgatttcaggttctgaggcaggcataggggacaggcaccatagtctggtggttaaaagcacagactctaggatgtgacagaccaggcttctaacctgggaaaattacttagtcaccctgggcctcagtttcttcatttgtaaaatgggacaataatccagttgtgttgttgttctggggattaaacaagatgacttatgtaaagctcttaatatagttcaaggcatataatgggctctaggaattagttattgttattaataaggtatggaataaaaggggttggtttagagaaagaaaattggtaaaaacaaaaataagataaaaacacagaatgtaacatgatagaaatataacagagcccctcagtcaggttgggcttcttatttagacctaagggtttacactgtgttagggactctgccactgagtgacagggaatattctcactctttgaacataccccatccatctgtggtagcctgggaggtggaggcatgggagagttatgggtcagaagttcagagatgataacccattattgatcaattaccaggaaggatgccaagctctttacttctgttaccttgtttgattcccatgataaaacttgtaaggaggtggtagtaaccacactttttttctttttcttttctttctttttttttttttttttgagacagtcttgctctgtcacccaggctggagtgaagtgccacaatctcggctcactgcaacctccgcctcccaggtttaagccattctcctgcctcagcctcctgagtagctgggattacaggtgtgtgccaccatgcccggctaatttttgtatttttagtagcgatggggtttcaccatgttggccaggctggtctcgaactcctgacctcaagtgatctgtccgcctcagtctcccaaagtgctggaattataggcataaacactttttaatgaaaactgaggttcagacaggttaagtaacttgtcaaggtcacacagctgaagaatagtagagctagaatttgaacgcaggtctctaagactctgctatacttggagagaacttgaatgatgtccaagggggttcttagttacccactgcctgccttctgccttgccatgtccccatccacccacaggccaagactgcactgagtgagccaacagcaggccccagcatgtgccacctggggcatgccaaggcctggaccctctggtgccctggaggacaatcacgctgccagcacacccccacttgaagcctggctgacactcccactccccacctcaccctggcctgggaggcaggatgggcccctcttcagcaggtgttgggcacagcctcattgctccccggctgctgcagactggtaatgggtaggcaagccccagccccccagggcggtggagtgctcaggcttgccccgagcggccagacctctgcccaggggacccaggcagggggcagcacagcgccccaagggcagccagcccctctgacctctcctccccacttcccaagcgtcctttccttttctggggaacaaggtgccaagctttgggactgtccgccttaggcggtcaagacagccaggagggacaaagcggcgccccctccccacaacagggcctttgccccactctcggtttcgcgtctgaatcttttccccaccgcaccctccaacgcaggcccgggcggctcatgaatgaactgcactgtgtggggcgcaaggagaggacacgctcccggggccggccgcctctccagcccgccgaccagtcagtccccagagccgggggcagcggccggcctcgtgccagcacctgcgaaccctgcccttgcccgagcccgagcccttaccccggaccggcttcgggtgtactcgcccccgggagcagcagaaaaaataaaaggcacagaaggcatcggacttggcgaccccggggtccaaaactcgggggcgggggcggctagttccccaaacggcggcggacaggcggggcgcagctggcacccccgagggtcgcgcaggggacgcgcacctgcaccgggcaggtgggagaagagtggcactcgggggccgggggcgggggtcccaccctttgggatctccccggggctggggagagccggcggcgcgtatctggacctccggcaggggttggaggactcacatttggctcgggatggtgcggggttgggggcagcgcgcgccacccctgggtcccgcgggcccgggcacctctgggtcccgcaggaggttgaagggaggggacgcgcagctgagtccaggttttttctttgggtggtggtgggatcttcgaagaaaagagcgagggctgggtaggggtcgcgtactcacccccaggcgcagactcggctccggctcggagccccgggttggggcggggcggggctgggggagggggagggggagtcgctgggcggctcgagctccgggctcctgcggcggccgcggcagtgtatgggggagggggagcggggggagggagggggagggggcggagccccgcaggtcccgccccgcacgccggcgcacgcaaggtgcgcgcgcactctcagatcgcgtccgccgggctgggcctggcgcgcaggcgctaggaagaggccgcgtggggcgaaggcggcgcttggctggtggggcccgcggcgggattttcccgggcggcgagagcggtatggtggggggcaggggtgggcgttaagtcctcattccctccttctcctcttcctttctctgcagtaggggaggcccactccccggggtgagtgaggagaggccagagtgggaggcagagcgtcagtgggaggggtcccgacggggaggggggggtcccgacggggaggggggtcccgacggggaggggaggccccttacccggatcctcctcccttccgctctccgtgggctgcttctgcgacccccaagtccgtggccggcgctcacctgctttccccgggttgcggcgtcgacttggggagggcgggctgcgttcagccgtcgctggtcactccggagcgtctcctccggcttctccgctttccgcgctcccctcccctttcccaacttaggtctggagatgagttagccagacgcctctgtggtgtgaggattgagtttttgctttcactctgtcaacgctgatgagtgcgccctcccccaggccagggggttccctggtttcttatttcaccagagactgcatctaccagtgattaagactggaaagatgaagggagagactgagactctttctatatatcacccacacaaatagatcataaaggcacaacgggcaccaacctggtcatttaatttctggttcctggaggggacaaaaaggaagtattgctttccacagccgacgataaatgaactttgccaccgtaagagacggacgggactgaatttataaagaggttaaaagggcatatgacagacacctcaggctacttgggaaactctgggagtttgggagataattaactctcagggctggtggtggtggggaactgccactgctgaacagaaggacactgcccacctggggggtttggatcttgtagttggtcagcgtctctgctgtatgctggattttcaagagttcattagtagcttgtgg

SEQ ID NO: 11326 - DNA, 6000 bp, Homo sapiens; identical to SEQ ID NO: 2444

SEQ ID NO: 11327 - DNA, 6000 bp, Homo sapiens
aaaaatacaaaaattagcagggtgtgtggcatgtgcctgtaatctcagctacctggaaggctaaggcaagagaatcgctggaacctgggaggcggaggctgcagtgagctgagattgcaccactgcactccagcctgtgtgacagagcgagactccttctcaagttgatccgtgtccacagatgtattatgtgtgccatttgcacacgtctttctatgaacacaatagaagcaggattgttttatgatgctgctaacattcacagacaggacccgcagccacatttcaggttatgatgcctacaggtatgtctgggaggatatgaaccagtgccatggaagccatgtactagcaggtggtgacacaatgggctcccattgtatatgctacaaacatttcaccctgacaagtcaatcagtgtcaggagcagggaagaaggtggttcctgaagaaaaggtaaatctgccaaatctgcctctaaaacaatcaaaaagcaaaaaccagccatcaccaagaactcctctgggtccctcaacctttaagtcatcacagaccaaaaagaaaccaaacctacaaatgataggctcagaattgtggaaacatttctttgcagctttagagcctgtaaatgagcttaaaaaaaaagtttcagtcctgaactgacattttaaaggtagtatataaattgcttcctctctcttcggtgcaccccctttttcctcattctccattcgctaatcaaagacttttcctcttcccctgcctgtttcaatttgaaacgtggcacagaacaggacactggaaggagaagggaaggtggagggggaggaggctactttcaaatctgatacacataccccccaaccagctgtccacaccctggttgatggtcaggccagactccacctaagacaggactgaaggaccaaagagttgagtagaaaactccccctgtgccacctctcccaaaagcagacttaacggtggaaaggaaggagggggaaaataaagttccacattcctgacattttttagccaagtgctgtggctgcacagagcagcttctctattccaagcagcctgtaggactgggagaaaacctgggttcaggggggaaaagctgccccctgccttcgaaacaggatggctcaacactaaaccaaaattggggtagcaataggggtgagtggtgaggggagagacagcctttcatatgtgttcccaaaaggaaattatcccaagggaaagaatttagagtcatcatctccctggggacagagaactaaagccctggggtccctaacggggaaacagaagccccctgaatgcagaagaggtgaccagtgagtgggggaaagagcaacgcagggatgcaatgcagacacaagggctgtggctgcctggcgcgtgggctgatgggggagagggacccagcccattggcagaggcacgacagaggtccccagaaggaggaatggccaagagagtcgctctttgtgggaagaattataattgagttttcctggctcagcttccgaatgaaggaatcctagccagggccaagtcagaaccccaaaagcctatgtcctctcacccctttctcccattccccttgcacctcttcctgccgtcacttctaggaaaagggtggtgagtccccagttgcacctaccatcgcaccatatgcatccctacatacccacacatgcacaccacacacttccagagagaaacccagaagatcctaagtgatatccagccagtcctgtgcttggttatgaggcgtctccccaggctttactctgagtgtgaagatgcccacatttgtttctctgtggtacctacagtatccaggacgcttctgctctcatttgatagaggcagcagttccaaactccccctccccacccccaggaatacttatctctgtggagagttagttagtcggtgggtaaagacagtgaggcccccaccatgtgcccagcacagaagaacacaagaccttcttactggaggcttagggcaaagccctctttctcccagagaagcacagactgatgatctcacaaagtacctccaaaagaaggagacacctgccctgtaggtcctgtaggttcaaggtgctatgggaagaagtgatgggcttggcaggaaaagggggcctgtaggcatttcaaccaggggccttgctacactccccaatacaagcctaagggggaggaagagtagttttgtttgttgtttttctcgtcttgggcctttctctttcaccagatactggaagtaacagctcttaacacctttcaacttttagagtggcaggtttaatgcacaggactttccataagactagagacccagggaaggaggtaggtaccaaactcaaatgctggcagccctttctgagcaaagataaaacagggagggccacaaaccctaacaaatgctagaaatatgacggagagagccacaggctatgcgagaaacttcgtcgctgcagcctgtggctttgaggtttacagctgtcacgtgtatctttccagccacaccctccaaggctggggacacgcacttggaggcctcttagaatggaggacagcaaacagacagcagagaatgcgctgggcaaaggaaattctgttattttgttaagctattattatgataaataatcacagggctccaggcgcaagagactttttcatgttggtaggagatgttatggcttttgttgctgatatgatctcagttaaaccttacaaccaccctgtgacgaagaccagttttatgaacgtctttaatgatggggaaactgaggctgcagtcagttttcagtcagactagtcacagaacagggactgagacacacggatatgactctgtgtgacaccacacacttccaggggagaacccagaacaaggtggagcaagcccgacccaatataccactagagagagctgtgagagggagaggaaggagagagggactgaactaaaggagcactatcaaaaagtggagtggagaccccagtcctagcaccaccgtttatttcctacagaccctaaagctcagccacggacacattcattcatccaaccctgacttggccaccacaagaacgttcccagcttgagggcagcttcgccagccaattagggcccttgtcattcgtagagatacagggaacccgagacagagggacagggaaggaaatttagccaggcaagccatcctccatctccaaggaagtttgtaaatgatcacagcttcctaacccaaccgtgagaatgcaataagcaagctgacgcagaagggaggacaaggagtctcaggaaccagaggagaccacggtgagagtgaggggaatgtcgctcacatatctcacttctgagacaagatataccgcaacaaacccatgccaagcttcctccagttcttcccacttttgaatatcacatttttcttgctctgcaagagtagggaatccttcccatcagtcttgtgaattctgaccccttgctggctttctacaactccctgcctgggaggccgacaccaggacattgctgttgggggtgggatccccatcctctgccccccactcctacactataagagaatcaactttccccaaaaagtggagggtatccctgtctctcttcttgtctctgtaaagggggtgaagctctgggtcgccgcagatggatctaaagggacagttcacggagtggtaaaggatatccaaaaattggccttctagagcacagcaaaaaagtgggagcgagacgagagcagaaggccactgctgggatggggccagggccacacgtgaacatccgagcacgttccagagctgagatgcaaaacacccagaaaatcacataggaagtggaaaaggttctgggtctctcccactggaaaagcccagaagagctagtggccaccccttggggcaagagggggttgtgcaatgactgcgggtctgggagtctctgggcttggctcctggacgccagaaagggaaccccacgcgtcaagccatggtggcagcgcggcggttggttcgaggccaggctggggtttcagggctgcagacagagctgcaggatacgatgagtgcccaagggggcggcagagcatggcatggctggcacggcgcggagctgggggtgctgtctgggctggccggggtacaggccggaggggtacagtgcacaaagccggggtgcagataacgtacacggcagccaggagcctccgatcagaggagggcccgctgacctgcaggggtgtgccgggcggtgcacgacagggggcactgtccctccagctccctcctccccaggctctcacctcgaacataagcccgatgaggacgcagagcaccaggcagaagccgatgtccgcatggttgtggatgacgaactcctggctgaagagcgggtaacttttcgtcctcctgcggaaagccatggcagcgggcgcgcagcggccggcggggcccgcaccctgcgctcacgaaccgcagcgcaaacttctccagcaccggcccggtccgcccgccggcccgccgcccgctctcccacagccgctcgcccgcccagcgcggaacaacttcggggcccgcccccttcctccgcccgcccccggccgcccgtaaccgcccccggccgcagcccccgcccagcccccgcccagcccgcggcccgcactcggcgcgcctggccccgccccccgcgggcttaaccctctagccgctgggcacgcgcgggctaccggggcggaggcgtacgggggcggcgagcggggctcggctcctcctcgtcccgcgccagcgccgcgcccggccgcattctcggggcccgaggctcagccgctcgcggtggagaaagcaggccgcggaggaggcgggcgcccaggcctgcccggacaggaagtgggcccagctttcccactcctcgctccgctccttcctccgcgggaagggcaggccccggaggcagcgagcgccccgggggtggccgggcagccggatgctcccggggttgcgggctgtggccccgggggctgagggcggcgcgggtgcggcggaagcagggaagccgcgaaccggccttctggctggccacagcgccctgcacggacgatcagtgaatggagattactcaagtatttatcgagaacttgcagtgggctaggcacagttcaggtagatcaacaaaccgaaagaccctgccctaggggagctttcgctccaatgcggggagagggtggatgattgcagttttgcccagtaatttttgggaccctcatgccaccattaattagctacacacatttcaccgaaagtctaccttacatattaatcagaagaagtggaagaataaacacagaagaagcaaaaaaggaaggaactttctcactgaaagtttctatttaatattaagtcttaaaagtactcctggaaggacaaaaggtgttcttaataaattatattcgcaaatattggatttaatcctaccagtaatgaagcagtcagttactttctagatgtgcagaaatacgtaatgaacaaaaaaaactaattcctattccattttttattaggtccacagttatttcacttctaaataaatatggttttttaaaagtggcacgcggtggaatgtaattgagacaggatggagttcctagagaaattttacttcctcaatctgcactccaccttacttaaaatacagtcttgggtctgtaattcccttatctgactctcaaggaaatgacaaagtaatgcctagattggactaaacctcatttaacttcaaggctgacctttctcaaagttgaaccttcgtcttgtgaggaacagaaagatcaagaactctgaagcacctcgactttccacctgtgaagatgtgttcaaatttgcaacgtgcggccacacctatgaggttgaactttatacaattggtttctttataggtttagatggttgaatt

SEQ ID NO: 11328 - DNA, 6000 bp, Homo sapiens
caaccattgtggaagacagtgtggtgattcctcaaggatctagaactagaaataccatttgacccagccatcccattactgggtatatacccaaaggattataaatcatgctgctataaagacacatgcacacgtatgtttactgtggcactgttcacaatagcaaagacttggaactaacccaaatgtccatcaatgatagactggattaagaaaatgtggtacatatacaccatggaatactatgcagccataaaaaaggatgagttcatgtcctttgtaaggacgtggatgaagctggaaaccatcattctcagcaaactatcacaaggacaaaaaatcaaacaccacatgttctcactcataggcgggaattgaacaatgagaacacttggacacaggaaggggaacatcacacaccggggcctgttgttgggtggggggaggggggaggggggagggatagcattaggagatatacctaatataaatgatgagttactgggttcagcacaccaacatggcacatgtatacatatgtaacaaaccagcatgttgtgcacatgtaccctagaacttaaagtataataataaaaaaaaattataaacctactcttatgcaaacagtattggcacaacaagaaaatgattaagatgcagagagggtaggtcaaaaagactaaaaggattaatgcagattgtttgatgtatattaaaacagttggtaaaagttaaaaaaaaaaacaaataatgtttccattgtgtcaacaaatagatacttgtagatagctgcagattgtctatactattacatgtttaaaataactctctcagagtgccagaaatgttatcaatgtctcatgcttaaaaaatggtaaattctaataaacaaaagactgatataaccaggcagtttgaagcataaacaaaatcttctgtctcaattataaagtacaaagtatcaggtttgcaatatgggtttttctgttgtaacagaatttcgtaactaaagattgggttctagccatctcaaggctcaactcaggtagtcgtattcactacccagctgacacggttggtggcagaatttagtttttcacaggctactggattgaagacttttgatttttactggggttggccagggcctccctctattttttgccttgtaggcctctctataatgacagctttcatcatcaaagagtgcaaactaggaaggcaattgagtctgctatcaagatgaaagcctaatcacagaagtaacatcagatcacttgtgccatattgtgttcattagaggtgagtcactaggttttgttgacactcaaaaggaagtgattacacaagggaatcgttgcaagatcattgcaggttatcttagaaatctgactaccatatgtctatcgatgaggaaacttattaaataaatgtagccatatccatgcatcttcaaagaattaggagttctatatggtactaatatgtaaagagtaaatccctactgacataggaacagtgtgaataatatgacacattttgcttataaggcggaaaataaaaatctataattctatttgcttgtatacagttaaagaaactatgaaacaatatataagaaatgaattacagttgccaaggttgggagtgaggagtgagaactgggtggaagggaaaaagaggttgaagggactttccccgtagtttttatatttacaattttttgaaccgtataaatgcatgatctattcaaagattaaataaaaataatgggaagatgtttttgtggtcaccaaagttgtctcttctcagtcttctagaggagcatgagaagctgagagtgttagctaatgatggagttttagaagttttttcttgaaggttcaatacgccataagtagtgtcttatgcaggtgccatttagatgcaatttcgcatcaagtctactgagtacctgttgcagccactgcgaaaactcagaatggacccccacccaagatctggtttggatgttaagacaattactacatttacacacacacacacacacacacacacacatacacacatacacaccttgagagggtatgaagaggtttatttcatacacaatgagacttctctggggaaagaagggcagtcctctcaagctgatctgaaaatgacttgagaaaacagtgaaaagagacaggtcttagggtttcattgtggttagggggtaggctggtgtgagccttcctgcatgaaggttgaggtttgtgtgatttgaatctcccctggcaccaaaggtgggagcactctggcttttttttttatcatactgcccagattaagggtacaagaaaagacaagagtgaaccttaaaagcttttagtagtaaaacatcaaataatgcagtcatattctttttttttttttttttttttttttttttttttttaagagacaaggtctcgctctgttgcccaggctcgagtgcagtggctcaatcatagcttaccggaatctggaactcctgagctcaagcaatcctcccgcctcagcctctcgaggagctgggactacaggcatgtgccactggaccagattaaattttttatttttctatttagtttttgtagaaatgaggtcttgctatatctcccgggctggtcttaaattcctggcctcaagcaatcctcccacccctgcctcccaaagtgttgggattacaggtgtgagacacagagtccagcaataacttgttttgtttagtcaggaaagcaatagagacctcacaaatatttagccttctgacacaagcttgtaaaaaaacagttccttaaaaattatcaagatcatatgcataaggaaggctgtgggagacaaaggagtatttctttaggagatataatgtttcatctatcagactagcaaaaattgcaaagaattatggtattcagtatggcccaggatttgagaagttaggcaattgcatacagtcaatggaaaataaaaattgcatattcatacttctttttccaaaagtaacacattcatataaacaatttaagtgtgcatgtcctttgactcagcaattctactcctaggaatttattctgagtaaacaatcagataattgcaaaatgtacaaccacacaatcaatacatgcacacaaacacgcaagaatgttcactgaagcactggctgaaagaaaaaagtttggcagcaacctataaacccaactattgagatttaagtaaactattgtatcctcctatgacaaaatatagccataaaaggaagattcaaagtatttcatggtacaggaaagtcattcacattatatgttaaaatcaaaagcacataaaagagtattatactattattccattgttgttcattaaatagttgtaaatacataggaaaatgaccaaaataatataaatacactaaatttttacagtacagctggtgtgatattctgggttatttttattttcatcttagttctctttaattttctatatgttttttactaaattggaatctcagagattttgaaggcaaatgatcagtggtaaaataatgctactacgtataaattcattctacaaattgggctaaccagatggaaaatgggtcaccacagaaagtattataattcataagaataattataatatcatacaaatttattagacaatcaaataccataaaatatttgtgactggaaattgaataaaacttaaaagacattaataaaggtctgttccttaaagtgctcagacatttaaaagatactttcaagacaaaaacatctactacaaggaggattactagtctcttcaggccgtagtgaaaatggagtacatcatcatcaaataacaacgtcagctaaaaatacagagcctgtttattgtgtacggaccaactgtgcaagcaatttgtacaatactttggtgttaactccaatttggatacgaattactcattttcacaaacttaaattggattacactttatctttcccaattactgaaaacatttacttaacacatacacatttggaacttaacttcgatgaagtaaaaatacgaaaagttaatctctacttccaaaaatgtcgatgcacgctgcaattgtatttcatttctttcgcaaaattttgcacaggatattgttgttaattgttagtagaggaattcagaaatgactagatcctttagttgaggcaagcaggtatgttccccgtgttctagccctgcacttaagagtcaatgaaagaaagtttaaaaaagaaagcattgtctcctctggagaccccgtctgccacgaccacataccttgattcttgctttctctataaattctagaggggctttcccaaactcaaatccaactccaatccaaggaatccagcccttgatgcacgggggtctacgcaaattcttccgctgaaggagtaagaacagagcaaggcaacccaggattataatcactgttggggaaattagttccatgtttttgtccagcaccttccagaagcagaaaagtgtgaaacagtcctgccgtcccttgcttcttttctgtgggctacggaacctgtcgggactcccaacctttctgctgcaacttttgcagctctccttcgtaactgtagcttccttcctctgtcccagttttcaggtgatttttccattgtcgctccctcccacctccacttctctttgaatctcagccagcgcggaaaaaatgcaaggaggggcagggccgggctaggactgacgggcgagaaccagccgcgttgccatggaggccgggggcggagccgcagagggacccgcggccggccaatcagagacgtagcggagcccggcggactacattgcccagtaacctcctgggctccgctgtgtttttctattctggggtgtaaggggcagctggaccactccagctgggactgctaggaaggttgcgggtccacccggccgagccgaacgagggaaatggtcctcacccggccactcgccggttgaaaaggggccgccctggcagggaagcggccgccgcggcgcggtgcagcgcagcggcgagaaggagtgcgttatcgtcttgcgctactgctgaatgtccgtcccggaggaggaggagaggcttttgccgctgacccagagatggccccgagcgagcaaattcctactgtccggctgcgcggctaccgtggccgagctaggtacccggctgcccacgcctgggcctcccgggccagtggcacgcgccgcgctgggggagggtgcgcgggcggcttcgcgcccggcagtgcgcatcggagaggtcgccccttccatgcccgcctggcagaggtggcggtggaggccaggcccgcggtgggaggaggagggattgaggtctccacggccttttccttctaatctcttctaatgcttcccttaggcatgtgctgtggtgcttgaatgttgtactttaagaagcttcgcgagctgtcattcctctgtaggaatcattttccttttcatgaggatgacctttttaaaaacgtaatctgttttccatccttactgagatcatctctgtggtttatagtcttacacagccacactgtcattatcttgtgggtccaagttgtggacctaccttgtgggacttccgttattaacctgccactcacagagcatcgactacttgacctctttgagtgtaattcatctatactgtttaccttgcaggattctgagaagtcaataatatatgattgctaaacccaaggcaggacacccattagttgcgacatttttataattcctacaataccagggactgtggatatatatttgaaaagacccagttctgaccttcttacaggctgctggggagacagagaaagacaattataatgtgctacttgttataatgaagatattattaggtgtcataaaagcatagaagagcagttacatctgcctacatgagtaagaaaaaactttaagaggcca

SEQ ID NO: 11329 - DNA, 6000 bp, Homo sapiens
ttaaagttcttaagtgaagaaaaatgataatcagctattcactttttctttcttaaacctatacaaatttttattaagaaaattttcaaacactgaaaagtaaataatatgtaactccctctatctctaccattgagatttattaactgctaacatttttgccatatttccttaattttctaactttttaaatttattttgtattttttatttttttgagacagagtttcgctcttgtcacccaggttggagtgcaatggcatgatctcggctcactgcaacctctgcctcctgggttcaagcgattttcctgccttagcctcttgagtagctgggattacaggaatgcgccactaggcccggctaatttttgtatttttagtagagacagggtttcaccatgttggccaggctagtctcgaactcctgaccttaggtgatccacccacctgtgcctcccaaagtgctggattataggtgtgagccacagcacccggcccaatttaatatttttagagatggggtcttgttttgttacccaggctggagagcagtggcaggatcaaagctcactgccaccttgaattcctggattcaagctgttttcacacctcagcctcccaagtagtggggactacagtcatgtgccaccaggcctggctaattttcttactctttgtagagacagggtcttgccatcttgctcaggctggtctcgaactcctgggctcaagcaattatcccgcctcggctttccaaactgctgggattataggcataagccactgtatctggcttgcttcattgttttttgcttaattaaatattttaaagtggtttacagatttcatgacagttcatccctaaatacgtgagtatgcgtttctaaaaatttaggacagtaacttcttaataataatcagtagttaatttttttcttcttaagagactatatgtgttctggctgggcacggcggctcacgcctgtaatcctagcactttgggaggccaagtcaggtggatcacctgaggtcaggagtttgggaccaacctgatcaatatggtgaaaccccgtctctactaaaaatacaaaaatttcacaaggtcaagagtttgagactagtctgatcaacatggtgaaaccccatctctactaaaaatacaaaaattagccaggtttggtagcatgtgcctgtaatcctagctactcaggaggctgaggcaggagaatcgcttgaactcgggagacaaaggttgcagtgagccagggtcacaccactgtgctccagcctgggcaacagagcgagactctctaaaaaaaaaaaaaaaaaaattagctgggtgtggtggcgtgcacctgtagtcccagctactcaggaggctgagtcaggagaatcgcttgaacctgggaggcagaggttgcagtgagctgagatggcgccactgcactacagcctgggcgacagagtgtgactccatctcaaaaaaaaaacctaaataataataaaaaaagactatgtgctgtatgtgttcagttattgtatcagtaagataaaaaaactaacttgtttttggacaaacagaaaagcacaggagacaaacacagaactcataacaaacttaccagctagaatcaagataaatacctacgtgtctgtaaatggcgggtgtcactccttgccaaagctttagaaagccttcctcttcaatgatccctagagctgtgcgcaccattcccctatagggggcagattctcttgcaccgtctcccaaccgagcaagagctgcttctccttgcatttggagtcgagtttttgtgagatccaggggaaaggttgctaacaaaaacacaaatgcagggaaaaacccacaacattcagagaaacaaacaaaaatctaaaatcataggagtaatattttcccaagactggttgttctcaaattttagaatatatcagaatcagctagggagattttaaaaattagaaatttcctagccccgtgcccatggattctaattcagtaggttgaagagggtttagaaacttgattctcacacagtcccaaatttaagaatcactacgcaagagcatcctggatcactagcaaaaaaaaaaaaaaaaaaaaaaaaaaaaaaaaaaaaaacaaacattaacaataaaaattaaaatgacaagccttgggttctttctattcagaaatttaactttaatatctgttagtcattaatttttgcttttcaatgggaaataatttaaagtaccatattgtgtgctatcctcttgactgcagccatgattatttgagatctaatgtaacattagaatactgcactatatattcttatgtactataacaaatgctagatgaagctgaactctataatttcgtgggtgatgttcacatgcagatgaatgactgacataatgtttgagatacagaagatgtaatggagtttataatgttgtcttttatatgcaagggtcataagctcaatatcctttcaattaaagcatatatggaattatttttccagcactaaattatatgcatcgcctactcatggcctccttacaagtactaactgtattttggaaaaattttttggttttaagttttaaattagatacagaccttttaccttaatacagttaagctaaacggcctacataaggaagatagagctcataaccttatacagaaaacgtcctgaataattaaaataataacattcagacaagttcatgaacattacttacattatataagacttttcaatgaccaccacctgacacaaaaccttagtataccttttccaagagaaaacaatgtggggaagggaagtgaatattaaatcttaccactggtttttggaaaagttagtatcttgctgacagtttccctagaacagaagtagcttgcatagacttcaagcaatattttattgacatatgaaacctgaaaaatcttaatagatttctccatattacacagattatgtctttcaaaataagttttgttttctcgctggtttgttaaatgatgcttcaggttcctgaagtggtttgtacttaaaaccatcccacattttgattcccatccattctccacacacaattctctccatgaatttttaacgaggaatagtcctgtataaaagccattgagtcagagggggacacatcaattaaaaataaaacctggaaatatcattcagcaatctgcttttagatctttttaagctgatgaattttatttcagtaaaaacaatgaaaagtaaaaattctccatcattttcgaaaggagagacattaaaaaatagaggggctaaaaggcaaaaatggaagagcacgaaacaactgatcatggctggctatgctagaattaaaaaataaactcttaaaataggaccaactaacatttacaaatgataacgcatcagaactgttctttttatttttttgtaacaggcaagaaaatgtaagggtaatcttaaaatacacagttaaggcttcacaggaaacacatgagtatactactcacaaaatccttggaataaacgctacttgctcattcaagggcatcatcattccactctagatggcctcttaaagttttttcttactcatgtaggcagatgtaactgctcttctatgcttttatgacacctaataatatcttcattataacaagtagcacattataattgtctttctctgtctccccagcagcctgtaagaaggtcagaactgggtcttttcaaatatatatccacagtccctggtattgtaggaattataaaaatgtcgcaactaatgggtgtcctgccttgggtttagcaatcatatattattgacttctcagaatcctgcaaggtaaacagtatagatgaattacactcaaagaggtcaagtagtcgatgctctgtgagtggcaggttaataacggaagtcccacaaggtaggtccacaacttggacccacaagataatgacagtgtggctgtgtaagactataaaccacagagatgatctcagtaaggatggaaaacagattacgtttttaaaaaggtcatcctcatgaaaaggaaaatgattcctacagaggaatgacagctcgcgaagcttcttaaagtacaacattcaagcaccacagcacatgcctaagggaagcattagaagagattagaaggaaaaggccgtggagacctcaatccctcctcctcccaccgcgggcctggcctccaccgccacctctgccaggcgggcatggaaggggcgacctctccgatgcgcactgccgggcgcgaagccgcccgcgcaccctcccccagcgcggcgcgtgccactggcccgggaggcccaggcgtgggcagccgggtacctagctcggccacggtagccgcgcagccggacagtaggaatttgctcgctcggggccatctctgggtcagcggcaaaagcctctcctcctcctccgggacggacattcagcagtagcgcaagacgataacgcactccttctcgccgctgcgctgcaccgcgccgcggcggccgcttccctgccagggcggccccttttcaaccggcgagtggccgggtgaggaccatttccctcgttcggctcggccgggtggacccgcaaccttcctagcagtcccagctggagtggtccagctgccccttacaccccagaatagaaaaacacagcggagcccaggaggttactgggcaatgtagtccgccgggctccgctacgtctctgattggccggccgcgggtccctctgcggctccgcccccggcctccatggcaacgcggctggttctcgcccgtcagtcctagcccggccctgcccctccttgcattttttccgcgctggctgagattcaaagagaagtggaggtgggagggagcgacaatggaaaaatcacctgaaaactgggacagaggaaggaagctacagttacgaaggagagctgcaaaagttgcagcagaaaggttgggagtcccgacaggttccgtagcccacagaaaagaagcaagggacggcaggactgtttcacacttttctgcttctggaaggtgctggacaaaaacatggaactaatttccccaacagtgattataatcctgggttgccttgctctgttcttactccttcagcggaagaatttgcgtagacccccgtgcatcaagggctggattccttggattggagttggatttgagtttgggaaagcccctctagaatttatagagaaagcaagaatcaaggtatgtggtcgtggcagacggggtctccagaggagacaatgctttcttttttaaactttctttcattgactcttaagtgcagggctagaacacggggaacatacctgcttgcctcaactaaaggatctagtcatttctgaattcctctactaacaattaacaacaatatcctgtgcaaaattttgcgaaagaaatgaaatacaattgcagcgtgcatcgacatttttggaagtagagattaacttttcgtatttttacttcatcgaagttaagttccaaatgtgtatgtgttaagtaaatgttttcagtaattgggaaagataaagtgtaatccaatttaagtttgtgaaaatgagtaattcgtatccaaattggagttaacaccaaagtattgtacaaattgcttgcacagttggtccgtacacaataaacaggctctgtatttttagctgacgttgttatttgatgatgatgtactccattttcactacggcctgaagagactagtaatcctccttgtagtagatgtttttgtcttgaaagtatcttttaaatgtctgagcactttaaggaacagacctttattaatgtcttttaagttttattcaatttccagtcacaaatattttatggtatttgattgtctaataaatttgtatgatattataattattcttatgaattataatactttctgtggtgacccattttccatctggttagcc

SEQ ID NO: 11330 - DNA, 6000 bp, Homo sapiens
gaaagatctgaccgtcccccagcccgacacccaaaaagggtctgtgttgaggaggattagtgaaagaaggcctctttgcagttgagaaaagaggaaggcatctgtctcctgctcgtccctgggaatggaatgtctcggtataaaacccgatcgtacattctatttacttggatgggagaaaaccgccttatagctggaggtgagacatgctggcggcaatactactctttattgcactgagatgtttgtgtaaagtcaaacataaacctggcctacgtgcatatccagacatagcacctttccttaaacttatttatgacacagagtcctttgctcacgttttcctgctgactccaccattaccctctagtcctgtcgcatccccctcaccgagatggggatagtgatcaataaatactgagggaactcagagaccagtgcccatgcagatcctccgtatgctaagcgccggtcccctgggcccacttttcttcctctatactttgtctctccgtcttatttattttctcagtctctcgtcccacctgaagagaaatacccacaggtgtggaggggctggcccccttcatcttaccaccagagagaaaaagccaagtgattccatgcctgatcaaagatgttatttcctttttatgaaaagcattaaaaccagaaaggagaaattattagctctttatttctgtcaaatcttctgtttcatagctgaatttaaaaatatatatactatcatagacaaaggtgtttgctcatcacatcaggccccttacctatccggcacacacacctttttttccaagtttaaagatatccaactataactcaatctacctcataaaactgtaaacacaacccctactttcctcaacaggtggactgtcatgggtgatgtatggggagagcatgatggtgtcattaatcatagcttatacttactgagctctatatgccaggcacaattccaagtgttttacatctattagctcacttaatccttacaacaaccccatgaggaaggggttgcacagataaagaaactgaggcagagagaggttacacagttactaaatagcacaggtagactcagaaccatattactatccccactgcacaaagaaattgaggcagagagaagttacacagttactaaatagcacaggtggacttataacctttgcattttggctccagagtccatgctcttattcactatgccatcctttcctcctctgtttcattgtaatccaattccatattgatatagtttggatgtttgtcccctccaaatctcatgttgagatataatccgtaatgttggtagtggggtccagtgggaggtgtttgggtcatggaggcagatccctcattaatgtcttggtgctatcttcacgatactgagttcttcttgcaagatctggttgtttaaaagtatgtggcaccaccccacccccttgctcctgcgctctccatgtgatacctgggctcccctttcccttctgccatgattgaaatcttcctgaggcccagcagaggctggggccatgcttccagtagagcctgcagaactgttagccaattaaatctcttttctttataaattacccagtctcaggtatttatagcaacacaagaacctaatacaaatatctctgcaatttatgcaacacccacaatatttaatatttaatgcagcaagaaaaaccaggcaactgtattaaaaatttccttttggaaaaatgaaaagggaaataaactctaaaacgttgctgtacagaaatactaagggaacagaaagggactggcaaactttaggggcatgatttgttgacttcattcctaagcagaggaggaagtgcttttgtcagtatatctggtgtcttaggttttatgtgttaggccagtgctcctcaattttaaatcacctggagatcttgtcaaaatacagattctgattcagtaggtctgggtgagacctaagattctgcatgtctaacaaattcccgagtagcagtggcacgctgctggtccagagtccacactctaaataacaaggctctgggacacgggctttcaatgctggctctgcattagaattacctgcacagctaataaaaaaaaaaaaaaaagccaataaggaataatgggccccactcaagactaatgaaattagaatctctggttttttttttaaattccccagataattccaatatgcagctaagattcagcatagctgttttaagaggatttcccttgtctctcatcagagacactgaagatagattctaatgtaggggactaaatcactttagtgttcaatttcaatttttgttgatatcccaggaattcactccagaattgagattcctgcgccattcatttaagacagccaatgcccttgctcagcagggttgagtttttctggtcataaaatcttccaatcaatttttttttccctttcatttttgctaaagccaacatcaaaaatctaatcaggtcacaggccttagaaacacgctgaagtttgccccttccccatttttctctcttgagcaaactaaactttaaaacctcactctcattcatacttgacctgagttctgagagacaagagaccacagcctaatcaacacctttgcttgtttttgccaatttaccattccggggtaagagaatcctaatagccatgacaccattgatcagcttgatccgcatcttttctgagggcctattacaggaaatccacttattttgttactatttattggttacaatatagtctgttgcaaccaacagacattaactcaggttggtttgaccaaaacaggagaatttataaggaaacaaacatgtcacagagcctggtacagaaatacagccatgtttaaggaagggcagttaagggctttctctcaatcctacacttcaacttccctctgcttcattgtctctctgcagacctctgttctcagcttctctgtacacaaaaaaagatatgtatgaatcctcacaggtgctaagttaacatgttacagttccagctccataggaagactcagacttgactctcttggtcctaattctgaaaccaaggagaggatctgactggccagtttgagctaggcaaacacctcctagtccaacttgctctggttagtaaaacgggagccagagacaaatcactgtgggtgagtaaacaattccccaacaagaggcaagacagagaaaggaacctaaagaaaatatcttatcacatctgtaagccagtgtagctgaaaagaccaaagggaaaataaagtctccactatgaacagtcaattttacaggttgtacatatagctgggagaattttatacattcagtaaatatttattgggagcttattatgtgtcaaatgttgtgtcagactttgggaaattaacaatgtacaaaacagatactccttactagatgtgcagtctagtaggagacataaaataatgaacagcaattataatacggactaaggtattgtaacaggggtcatgcaggatgctataagagtacctaaaaggggactcttacccagacttaggacatcaggaaaagcttcctagagataaatcatgtctcagcttggggctttaagacaaatattagcaaggaagggaaaagaaaaaaattccaggcacaggtaataaagatctttacgaagtttcaaagacaggagaaaatgacccgttggaaaaaagtaaaagtttgataggcctggaacctggaaaggcaggttctaagttatggagccaaatagtagagggccttgtaaggcagctacactttttaagtgcaggaactggagaggggcactgaaataacaggagtaggtgtgcattaaaaaaaaataacaacaacaacaaacctgttattctggccggtcagcctagggcctagaataaataaacaatacaggaagcaaggagacttccaagttgccatttttcgatagaaggtttagccttcgttcatttgtttcaaacctctcgcttacttatttcctttcatttgagttaaacattacatttccatcttttcctccctggaccccaaatcacgttcgaagcgacagtctggtgcagtgttagatccgctgctggggcgcaactccgcgcagcagcagcaacgcaagccctgctcctctggctacgcagcttggagatctgcctcagcatcgtccgcccagctccacggcaggtcccaggacgcgcagggctacctggtatcaaactgcctccgtgcggactggctcccgctcccctcatcacttactaggtcttgggctcagagatggtttcaggtcggcgttccaaggcgctctcctccaccggaggctcgaagtaggagttcagagccctctgaaaaacaaaggcacaagggatgaggtttgtgcgctccaccgacctaggtaatggagccggaagcgaggacagcgaaagcgtacttccatctcccagtcgttctcggccaggaagcactgagccactgcggcatcgcagcttgcgaccgaggcaaactccacacacagaagtcgccgctttttcacctcaggctcgccctcttcctccgccgcctccctcccgccctccaggcaactccccaactccatcttcctgccgcctctgcaccgcccctttaagcggaacaggaggccaacgcgcggctctgcgcaggcgcctgtgtcatggcgctcccgcatcaaccgcccggcggggaaatgcgctgctctcggaaaactggtgcagctgcgccgcaagggagccgccggggcggtgggtgcgaagcgcgcatgcgcgcttcgtcacaagggtgcgaggaaagtcagtgagcaaatcgcggaccaccggggctgccagctcgcctgactcccggcctcttgcgctcctaggggcggagaagggtgcgggctcttcgccctttgtgtcctccttctttcactaacttctggactttccagctcttccgaagttcgttcttgcgcaaagcccaaaggctggaaaaccgtccacgatgaccagcatgactcagtctctgcgggaggtgataaaggccatgaccaaggctcgcaattttgagagagttttgggaaaggtatgggaaaggtaggggagaagccgtggcttctaatgaaggaaaagaaagcaccgtgcttggtgccgttgtgagctttgaataattatctcttgttaggttgtgttctagtacgcctgtaaattcaccttagtaataatgattattactttaatggagcccctaaatatgctgggtcgaacgcgtaagttctctatctaaacatagataagtatggttatgactcgtggagacagttccaaggctgggagggactttggagtttgatccttcaaccaacaaacgtctgcattgctccagagaagagtaagagaaacctctgcatttaaggcacattacagtctaattctctaggctctagaagattagaagataaataattgcaataaggtacaaaagccaagtgcttggtagagtggtgaacgaagggagaagttgttcctctgtagtggtttgggaaatttctcaaaggcacccaactcctgaagaagtaagttagcccttggaggaagactgagtgcttttctgagaccagcactcacaaagcccgaaggtgtttgtttgtttttgtttttttaggatgaggtttcgcccttgttgcctaggctggagtgcaatggcgcgatctcggctcactgcaacctccacctccctggttcaaacaattctcctgcctcactcagcctcccgagtggctgggattacaggcatgcgccaccatgcccagctaatattgtacttttagtagagacagggtttctccatgttggtcaggctgctctcgaactcccgacctcaggtgaaacgcctgcctccgcctcccaaagtgctgggattactggtgtgagccgccacgcc

SEQ ID NO: 11331 - DNA, 6000 bp, Homo sapiens
taagacagggcctgcaggttgggaagctctgccctgaggtctggccttccctccccaccgtgctcagagcctctttcgtgactgaagcttgttcctcctcataccctctgctctccgcgctgcgctgtgtgaggcaccaggatgggggcctcaagttcagtgggggagatgacagagccgcgggttcctagggtgaaaatggtgttcctgctgcggagcgatggctttgagaagaatcgtaagatgggtcagagtcagggaaaacaatgagaccataactgggcccaaagactcactatctgtggggaccccagacaggcagacgtggcctagccagccctctttcccagtactagggccccacgtgctgacatctgtgaatgggcttcagggtgtctctccctcccttgcaatcatatgcaaaactatgtgtcaaaataatgtgtgcatctttctggggagggaggctatagctttcatcacattctaaaaggtttcagtcccataggaaaaggtaaggagcagtgcattggtggctggagtcgaaagtcctcccactctcaaggcctggcatgagggttccccagtactaggatatctttctttgctgtatcttccacacccattagatcatctttctcagcgacttcctcatactaaggaaagagaaaagagaactgataaccgtctcttcccacaacacaataaaatattccttgcccagggatgtcccctcctcccagtccatgtgcccaggaatacctctccctcctgaccttacctgcaccttcatgagccgccccaggtaagagcggtagtaagacaggtaaatcttgctcagcgtctccacatattcatccctgatctcctttgctgttgctcgttcattgcccagcagaaactgatagaagaacctagggggtcaggaacatgtcagtctacctgtctcccaagaaaccagatgcccacactaggccgctcaaaaactcaaaggccatcccatgcacttccttggggttgtgacctgtacttcagcagggccgtctgggggatctgatagttggtcatgggtttcctgaaggaataaatcttctggaggataaactctcggatcttcgtcactgcctagatgtggggaaccaaacacagggcatgaagctgcaacccttttgctgtatgagaggaactgggggaagcaacaaatggtaaacataggcagaagggtggtgaatatctctttggtatttctcaagattttcagggaaacccagagagacaagaatggggctgcccagaaaaggcagggtgaagtccctggagacaggctacagtgagctctgccaaggaaatccatagtgaagatcttgggaaggctgcttccagtagcctccagggtatccatccctacttcccaccttgacccggagccgatcgagcacgcctctgacatctgcgcaggctgctgtgcctctagcttcctgctctctgactgcggctgccttggcatccagctcctgtagctgctccaagaacctgggctctgtcactggagcctccagaattgccctggttagcagggaggggtgggatgagttacaagggagacccagacatccctaaaccagacccagaccacactccttacctccagcccctgtcatctctaccaccttgcattgtaccatatagtcaggacacatgtacaaagttttctattcctggacctccccactatacacctgatcttacatcattcttaatcttaatctttgatgcctaatgcatacctaaagaaatggtggttaacctggctactaatttctaaaaagcacttaacctggagccaggagacccatatggtaaatagggtgggtcaccccagcccatccacctgctatggacattataacccttcaaactggtaactcacgtgaccagagcagaaggcaccaccagaccatcaacaagctccccaagtttcccccgaactgcctggcgatttcgaagtcgaatgttcatggctcctgactgttcctgcagtgtccggatctcagagctgatggagctgaggtcactctgaaaagctcccaacatctgctccattcgctgtagggagggtagatgttgccggagtgctatagggtttgtaggggataagtgggccaccaaagactctttgtgaagtcttcagtatttatcagtccttgagggtggcagatgatgagacaccccagattatcaggaaataacattaaatatggcagtaataacaaaaaaggctcctgaagtcatcttgaaaatgaccctaacctgtccccatcttgaggctgatgacctaaaaatggcaccagagtccatgatctggttcagagtagctattaggggtcacaggtcatgattactaacctccaggacagcatcacaggctgtgatctggttgtgtagagatgctatattctcactctcttgaatatctgatccacaaaaagtcaaggggcctcatggtgaagatgggagatcctcagatttgtagtacctctccaatttctctttgaagtgatagaaacctcagagatgttgaccccagctgggacatctgtaccacacgccacaaaatccccatgtcaatagcaccaccccttccctctgctggaggatacaatcccgaatggatttctgttcaatctgctgtagctccagctcaacttgctttgaatagtgacggagatctacaccctgggagaacataaagatgacaggtcagaaggaagtctcagtaaagggacactgtaacagaatcagtgaaggactaaagggtcagataccaggctgatacaacaaaagcaagagactgttgtttttccttttggggtagaatagatagaagggcagattagtacaggggaaagcctcaccgttttaagagcttcctttactaactcatcctccagatttgcctgaatgtgaactggaaatagaagtttatcataagggtccagctccacagctccctctccccacattgagtatctgcacaccaatccctaccttattccttccagcccccatgcctctcagattacaggtactgcacccaccccatgccatcgcttaccatccacttcatccaggatgaattcatcagaagtgatatccaactccccaagttgcagtggttcctggagcccaggaccacccgcctggaaagggataagttaatgggagtagggtacggtgaaagacagaaagaaaaaatataattggatatccccagtccttcaagtgagaaggagctgcttttactgggagccacaggtactgctttgaaaaattctaagagtctcacgttgtacccactctcctattttgtgctgatgggtaaggaatacgacaaggagtgagacgatccagtgagacagtggaggtagcccagcatggtggtgggctccttgtagtcccaactacttagaagctgagacgggaagattgtttgaggagatcaggagttcaaggtcaacctgggtaacacagggaaacccgtctaaagaaaacaaaaaaaggtaaaagacaagacagtgcagtggaggccggacgcagtggctcacgcctgtaatcccagcactttgggaggccgaggtgggaagatcacgaggtcaggagatcgagaccatcctggctaacacagtgaaaccccgtctctactaaaaaatacaaaaaattagccgggcgcggtggcgggcgcctgtagtcccagctacttgggaggttgaggcaggagaatggcgtgaacccggaaggtggagcttgcagtgagccaagatcgcgccactgcactccagcctgggcgacagagcaagactccgtctcaaaaaaaaaaaaaaaaaaaaaaaagtgcagtggagatgaccgaatgaggaaagctaggaattgcagaggatagagcagaacttgcacttaaatttaagaccctcagactcctgccatcttgggtgttctatcacacctctggggaaccccaggctttctagaaatgtcaaaacacatagtgtttacctgcatgccaggtgcaatcttacacatattcatctaatcctaacgacgatgtatacaataggttctatcttcctcaccttaaaggtgtgagaaatgatggcacagagaagctggttaacttgcccaagggcacacagcgtgtaagtggcagagatagaactcaggcagtctggcttcagaggccatgttcttaacctttacactatactacttcgtgactctaccccaaaatgtggagtgaagttgaaattttgtgccccagaacatgagtttcagccactagggtcccgctcagggtcgggtctgatcacagggaagggtacggggagccaaacaggtaatatcacgggtagcagccaagttcccacccttgtgcctaaacccagctcaggtctttctgaagctaggagcaccggaactacggaggagaaacagctccgcgctctcaccagcgggccctcttcctcctccatatctgaggtcccagcccgcaacaccagttcccgggccgcagccgccatggtcgcagcggcggccattccccgcagcctcacttccggcaactgtcagtcccggcgagtccgttccccggagtggagctacaagtcccaaagggtcttcctcagcgcgaaatcgttcccagatatttgagttaagttgtttgactccagctgtcccctttcagctctaaccacttcacccaactgcaaatggaaatatggaagtctgaaacacaaactagccccggaaccttcgctgttctcttacctatgaaccttacgaactgtaaagaaaggcgcaccggaagttgtggtacccaagccatactctcataaatccagccaggtcgcgctgaaacagtttccggaagcacttctcctagatcgcaccgcctcttcctcctggaagctatataatgatatcgcgtcacttccgctctctcttccacaggaggcctacacgccgccgcttgtgctgcagccatggtaagactggaatccgtgccgtgatccagcggcatcgcagctcgggcaaggaaagccggctgtcagggttctggaaacgtcctgccctgagggcctgcgactttctgtatggagccttggatcgcgtccctggaaagggacaccaaagatttccaattccggagagcgggcccgaggaagggtcactgctcgggcgcacgaaagctgtctaaggcttgggcgtatatggggaactctggcttttgccacgcacttttgggaatgggcaggagacctgcttcctctctccagaggttgcattttcccaagcttgaacgcttcatgtgcctactctgcaggactgaggagtttgctctgtggtgtgaaaacctaaggaatggggggcgggtgtcttgccacttgtgtgacaggcttaacctttttgtatgaagttcgtttgccttatcggccttactgtttgatagtttactgtgtctgatttcttcccccgtactttttcaactagtctctagtgatccctgaaaagttccagcatattttgcgagtactcaacaccaacatcgatgggcggcggaaaatagcctttgccatcactgccattaaggtaagtgaagtagggtaaggaatagggaatgtaaatgagaattgggttgtgaagacataagcaaaaatgaagcaaggctggggagacttgagtctcatccagatcaccttgactgctggattaagaaaagaaagtggtttagggagagactgacccctttagcatttaccacagaaaataagtgattaaagccaagatagtggtctaaggtcaagccaaaacatttcacctggggaagtggggaggaggtatggttgctcacccgaattcgctaagattttcctgaaccacgagcttgtgagatttcttctagattcggtttctttacccatcccaccatcataacagcaacccttc

SEQ ID NO: 11332 - DNA, 6000 bp, Homo sapiens
tatttgctaattataaattaagttacatatttaatccttgattttttagagcattgtgtaaggaattgaattaggttcagaaggaaagaatggtaagaaagttaaaatggctcaaatgaaagcataataaaagaggaaatcatgcttctttctttgaatgttaaattatgatgaactatatggtaggatagtgtttatggatgactgtatatcaaattcttgtgttaggtaacaaatacttccttgactagggcagagttcaacattaaaattaggactatgtaataaagtttaaaatgtaaggtacttaagtaagtatacaattcttgtttacttacaggaaagaattaattacaatgacaaactacactgtcagaaatcatataaggataaatattactgaattcagagggatgagtttggaatgtggaatccttttctgtaggttcttcttcctccatcttcctcagatgaggtgggctttcctttcccatttttcttggatgctaacagcatcttttatacctctcaggcatgttttctgcccaacagtgtacaagcgtaatataaatccctatgattatattgtcgctaaccaggcaagctattgtagctagccaccttactgggttctcttattctttctaatggcatttttatgtatccccttgaattttcctagtagctaattatttaatctgtcattaataataaaacttttccctgaccaatatttataacacttccctccttccctccttcccttccttccttccttccttcctttcttctttccttccttcattccttccttccttgctcccttcctccctccctaatggggtcattaggaggatctgagagttttagaactgctagctgctgctgctggtagctatttctcaaaatattttcttcttgctataaaatgctttccttctcataccagatttcataaagaccttccatctggtctgcactgataactagaatccagagatgctcattcctcttacaacttgtagtttaaaatgatccagatgcagaaggattaggtttcatagcttcttctaaaggattttgtcttcctaatcctacaactgcatgtgttgagaattgatcagcatgagagagtgctaacaataaacctattaaagtgtccagtttttcatttgacgtgttttaggggaatacaacaatgggatcaaaacactgacatctattcaggtaaggactgcagtaaaccagataatccacagtgcatgagacaaaataagagaactaaaaatgaaagacaaaattatagtcaatctgtattagaaagagggttctcaagaattttatcaatttgttgtgatccgggaatatgccaattgattgagtgatctctataaattctggttctcagtttcttaatccacaaaatgtgggaacgaataaaaagtagctgggattttgatgaaagtcctttcatcaccaggaagatgaactttggtaagttgactgacctaagccccaaattttaggggccacaatactggttctagaaaatgattcagggaggagaaaacaagagagaagtaagtcactctaaagtgctgctgccccatttctcttccctgttcatctgtcccctcgtcacttgtgacggcacactcatcttcaatgtttccctggggtttatgttcatataatttcacatgtaataaaaatctggtaggtgcagaagaaaggagcataaagcatgagatgctaaactcacctctgccttgagatggccttgataatttacggcataaaaagtaagttcctatttggtagaaattcagcttttgatcagtctcaagcttatttttttgtgtaaataagcttgtagaaatagagggaatgctttcccacattagagcgttagatttgatctttcacttttaaagggtagtgcagaaatagaattccagggtgggcaatcaaaacaaacatgaaaaaaatgatctgtgtgtaaaagtgagatgtagggaattagacttgagtaatgagaagatgacacaaaagttcagggcctgaggctttctgcaaagagacctactttctttttctttcttttcttttctttttttgagacaaggccttgctctgtcacctaggctgtagtgccgtggcacaaacttggctcactgcaactttggctttctgggctcaagcgatcctctcacttcaacctcccaagtagctgggactacaggtacacaccactatacttggctcattttaaatttttttgtagagatgagttctcattattttgctcaggctggtctcgaactcatgggctcatgtgatcctcctgccttggcctcctaaagtgttggaattacaggtgtgacccatcatgcctggctgagatctacttttcatttgcagccttggtatcttggtggtggtgggggtagcatattgagcccacctggggaatgggtggtgcttgagccaggtggggacaatgtgctgtgaatgatataccttacttccctcttcaataataaccccatcacgcagcaggaaattgaaatatattgcagtgttacctgaactagaggtgtgtcctggattttgtctcttcctaggcaccacttctgaaaaacgctgacttcgttatcttcctcaaaagaatggaaacttatttacatgattgttgctgaccaggcatcgataagaagaaatggggagcaaatattttgtatagacaccagaatggctaataaaggtgacatcacgctgagttgcaaggtaggcaccattcccttgggcaaatgttgagagacatgagccatcgtttccatgcacttggtctgggactaggccttgaatgaagtcattatggcagaagaggaaagaatgaaaacttgattttactatgcttgtgatgctgatttctgtggaatttaaaacttgttagctggtggatacacattgttaatttgaatactcttcattataaaaataatctgctaagttttcatccctggaaattgttatgaaagcgaaaacaagcacgtaagggaatatttgaacatgcatatacctaatgaccagagtcatggctacactttaaaaggctcctttctagctctgttactagaagtctcaattgagatctatagcaatccttggagcttctgcagcccatgtcaggtgatgatgacacaatagttaagttctatcaacaatgatgaatcaggatttgagtgagtttctctatatagctctcttagtgatgaaatacctctatgcagcaaaatagttagtggtgaggtgctatgcaattttagaaataagcaacatactctgttttaaatatgatacagaaactgagctgagtcccacttaggaggtgggcttcatcatcacaactccgtgggctggaggctaaagctctgaagggaggaaaaacagaggcaggcatattttgtgcatttgttaaatgggcctcaaatgcctccattcatttatttgttgaagacagggtcatctcatttaattcagcaggaaagcaactgtaccagaaagagaaaagctgtctcaatcttctctgtatttcaaaggtatttcacatatgctcctcatgaaggagaccgcacagggaatcagacccacgtgcctgctttgcctctcttgcgcaggattaagtaagggaagcccctgattcacaagtgcatcctggctgtttaaggttatgcatattgtgtctgaatgtacaactatgataaatatatattctggagcaatgttaaattcagcttaggacgatgtactgcttagagctttgagggaaaacataagaatgataaaatgagcctaaattattttggaaaaaacactgctcccccaacccatttgacgatctattatttcctcctgggctgctccctccccaagagatttggtgcaggaggcaaggaaggacaataagaaaggttaggaagaaacaccttgggatgctgacaccatctgccttatccttctaactcaaggacaagcagcgttgggttgaatacaaggtcctttcttccaaaactgggcacaggcagaaatatacatatagatgcaaaaccactatgatcctgtgataggagctggaatcacttccctttagactcaatttcctttccttttcgttaggtagggggtcagcctctcaccttgcagtattgggtggagatggcttaagaccaaacttctcatcttaactcttacttccaagatttattttgtattttaaaaaaaatgagcctgcctcattacctccacacctgggcattttgtttatcaggactgagcacagtattattttctgagggctggagcaacagtgcagtcctttctaatcaaaggttttttaatcagctggctttgaaatcacacagttcttccggggtccctggagcacaccacctccctgtgatttctactcaagttttccctggccccccccagcacccgttccatacctatttaatctttaagctgcctctaatccttttgcaaggaagcaggatgaaatgctcaaaccacagttatacacaatgttgattctcaggttcacacatttgaggaattgtttgaacaagaaatgctctctgtactataatccagggtgcaggcacggtgcccgggcgaccctcagtctccctccgacaccccgcatcccaactcccgccgcctttgcgcctcaaagctggcaaacatccccaagccagagctggagtacctggagtgggtgggggtaagaagggaagccaaggtcgtcccggaaggtgtgcgcccctcaccttgtggacggtgcgtgcagccgcgccgcactgggcaaaccggcacgtccagctggctccagaagtctcactcggaacccgctcctttttctcctgagctggatcagagcactgcttctctcaacattcgattctggagtacgttgagcccagggcgttctccccgccagcgtccttgcccgcgccagtgcccgccggggtgcggcgagacagaacctgggagcgcggcgcgccgggcagcccgaggcaccgctggtggcaggcgctgcgcttcgccgagtctgggcgcctggactggaagaggaggcgagagggagagagcggggaagaggaggaggaggagcaggagcaggagcatgggcaggggcagtctgctaaatcatctacgcaggtcgcagcctcccgggacaccgtgaacggagaggggggtggtgggtgtgggatgaaaagatgagcccgggtgtgaggcaggtggtattgtgaactggaggtcgcagctccgaggtactccaggtcttgcttaggttataaaagagaaattctggagctgatggcgccttagggctcccggttgcagacactagagggcagggctgtccatgttataaaccgggccagcggggttggaggtgtgggcaagggactcacctcctgagccccttgccggccacagccctggcggagaaggggaaaatagatacaacaagggggcagaccctactcccttcttctgtagcgagcctgggttgaggagggagaggaacggcgggagcagttgacgggtttgcacgctttctctacgcggttccaatggcaaacagaccctctggaggtgcatttcttagccctcctccaggggagattacagtcaacatccacaggatgcctcaaggagagagattacaaggaaggggtgagggagaagtggacgaaaattggggtgggtcaaagtggaaggggggaagagaggtggggaaagcagtgaagaaaaggagacggagagtggagtggttggggctgaaagacctgctgaagcagccttgccattttttttttttttgagggaagtctacctgggcgccatctcaggttgtcagagggctttgtgctcttctgagggtgccaggggctgttctttttgttgttctgctgccgcaaggtcagaaaagtt

SEQ ID NO: 11333 - DNA, 6000 bp, Homo sapiens
gggtgcagcacaccaacatggcacaagtatacatatgtaacaaacctgcacattgtgcacatgtaccctagaacttaaagtataataataataataaaaaaaagaaagtgagttcacacttgttcagagagtacaggcttttgagacaaactttctgggttcgaatcatgggtctattactttctgtaccattttggccaagtgacagtctctctttgcctcagtttcctattgagtaacacgaaggtcataaatgcaattacctcatggggttcttatgacaactaaaagatgtgacacactggatgttgtttataaaagtggctggtacatcaggagcagtaaataagtgaaagctatcattaattataatgataaaacctacctttctgcaaaacaaaaatgtctgaacttccgctaaactccttgctacctgagaaatcattcccaaagaatctatgattccttgatattatggagaaaaacctcagggttttttgcagatgttttcccatagaactgtattagaaaagattcaactatctttgggggtagtgaagtttattgtcaattacagaaatgctctgtcatggaccaatttatcctatattttaaagtgcaaaaaaggtgatatatgaagcatagccaaaatgtatttcctctgcaaataaaatatgccagtacagatacactgttgtttttgtaagataatttgaggtttattttattcaaatgaacaaatattgttaagaatctacccaaatctagccgggcgcagtggctcatgcctgtaatcccagcactttgggaggctgaggcgggcggatcacctgaggtcgggaattcgagaccagcctgaccaacgtggggaaaccccttctctactaaaaatacaaaaattagccgtgtgtggtggccagtgtctgtagtcccagctacacgggaggctgaggcaggagaattgcttgaacctgggaggcagaggttgcagtgagccaagatcatgccactgcactccagcctgggcgacagagtgagactccataacaacaacaacaacaacaacaacaacaacaacaacaaagaatctacccaaacctgagccccatgctatgatgaataaatgcaaaagaagctgcaactatgctcccatcccatgagatgatgctggaatgctgggatgatgagactgacacatataaatcaactagtccctaagaggagaagcacaattaagtgctaaactgcatggtgcagctcataaaagagttgcaggaattcaggtgaggaagattaaggagccataggctacttaggaaagatgcactcaggagaagggagaaagaatttaccagttactttatgtatgactttggtaaagttagttagcctctcagtgttactgtttcctcttttatgaaatttgacactttaatgcatgtaaaatgcctagcacattttaaagcaagacaggtttttggtaagtcttagagaatgtgtaacatctacccagaaagagaattcccagatagcaggataacctgtgtcatgtaaaagaaacaggtatcctttttaagcctttttagatacaaaaaggtgaacaaaaaatccacaagtaatagtcctactataataagtacaatattctgtgttgaatagcaaccacagctttgcctgtatggcaaaataactccctgagcacgtgagccttggtgcatgttgacattcctagagagttcctccttccaagcaaagattctttctttaaaaaaaaataggacataaagtatgcatatttgcttttccctctaaaatccttgccctttactgacccttctcctgagcacttgtccgaaagcaatcataacctgagctttccatcacctacaaggaatagttataatcacaatcacttctctaatgtaattttcttctaatacacagagaacatgagatacattacttctaattttaaatcacgttctctatatattcaaatattccttatcacagctttatacatgttcgacaagaagagaaggaagagttcctttaaagagtctcaacgttatttgggggaaattacattcagcagagtcctgattatacttacatgatcctaattagagttttcctagcattactggtaagagtgttaattacattaattacataatggcttctttgacaaataaagccatatattctaagattggtccaagcctgacactcctttctgcttaaaaaaaaataggagacatattggaataatagaagtttccactttaggccgaatgaaattataccagttcaaaatagaagatgatttcatggcaattagaaacagtctttgtggaaagttccaatattcctttttatttacaccaaaagtaattccagccatgcatcacaggctccatcacttgtagagagaaatgcattatatatttctgtagacagaaacgaagtaaagcctgaaatgattaccttgactttttcagaaaggagagaattggaaatacagtgctggtagtccgaggctttgatatgtaaactcacctaaatatgctggtcttttcagagttcgtttgtcatacagtgtgaccacacaaacttaaattatttgtaaaataaaattgttttctctgtgtttttcctatccttttagagcctttgaaacatatatagaaattcattctcctgagtaggaaactgttactatatagaatagagcagccctctggtttgccagtggcagataggaaggagagcagagtgacaacccatatgccccttacttctcttccgcaaggagcaagttgcaagcaagagaaactgttttctgctcatttgctcctttatttaacattttaataatctatgggatactgtgtaaggtagtgtgctaggcactcgataaacagagggaaacgaaaccatgatcatgtcctcttgcagtttacagtctcctcagatatcgtttgtggtatgtttaggctttaattttgtctttctgtgcatttgcctaagtatatttctggtcttgatattgaaagacagattcaagctgtaatacatcacagctgttgggcaggaactcacgggaagccatgagcaaggtagaaggggctgctattagaaacaacttgaggcacccatagatgcaaccaaaccttaatccaaggtgtattcatttcatattgcttctgtaacaaattaccacaaatttaatagcttaaaatgcacaaatttattttcttatagtgctggagtttagaggtaataacctcaaggtgttgtcattcctttggaggctctaggattgaatctatttccttacctttcaagcttctagaggctgcctttattcctacgatcctggctccttcctccatcttcaaagccagcaacatagcgatttccctttcctccctcccacacctattctccaccattccttccctctctctgtgctttcgtcctcttatcttctctgactgaccctcctgcctccttcttataagaaatttgtaattccatagggcccacctgtataatccagaatcatcttctcatctccaaatctttaacttaatcatatctgcgaagtccctttggccgcataactaagacaggtacatctttgagggccatcaggctactaccacacaaagcaaattaagtagaaaataacgtttgcctcttttataccttgagtccaccagctgcatgttgccctttgcaagtttgttttctacttcaaggccatcttagttgtccattttaactagcctttcctcacaaaatggtggtatgtggctccccccactgatatttctctgaggccttgtagctctctaagacagcaccagtttaactcacaagtcaacaaactggaacacttcaaccagagacattgacatccccctctaatgaactcagctgattgctaaagacagatgcttcgttagagccaaacattcctatcttacataactaaatatgataataaattaagttcttggggctggaaatagttataatttcctctttcttgcagtgaaaaggcatggaacatttagcaaactgatcctggcttaatttctaccgatactatgcagcacaaactcttatttgatgcagattataaatcgaaaattagcaatgaatactatgcatcgctttagtggtaagaggctgctgagtagctttttttccccagtaaccgtagaggcaagaattgatatttttatgtcacttttactaagaaggggggaaacattttgctattaatcttaaagagaagtcttttgctgctagttacgtggagtaacagggaatagatttaccttcctgcctcaaaaaagtgaagaccagaaaaacatttgttttcagacactggagagcaggcactgttacggctgtgattttacaactgctcctacatgctgggagcagtcgctagatgcatctcaaggtgggtcgtccgcgcttccagactcagcacaatcgacatttatttacgtaggtaaaattactgttgctatgggtaaattcacagaaataaagcccagagaatccggttggctggcagggagcggcggaaccaatcccgggctcagcaagttctcgcgataccgtgagatctccagtcctgacgacaccgccgctgaaatgttagtgagactgtagggtgggcggtgcgagcggcggttagctcccagttcggcctctgaggaaaacgggcgttcgcctgcggttggtccgactgttagcaacatgagcggcctggatggggtcaagaggaccactcccctccaaacccacagcatcattatttctgaccaagtcccgagcgaccaggacgcacaccagtacctgaggctccgcgaccaaagcgaggcgacacaggtgatggcggagccgggtgagggaggctcggagaccgtcgcgctcccgcctccaccgccttcagaggaggggggcgtaccccaggatgccgcgggccgtggcggtactccccagatccgagttgttgggggtcgcggtcatgtggcgatcaaagccgggcaggaagagggccagcctcccgccgaaggcctggcagccgcttctgtggtgatggcagccgaccgcagcctgaaaaagggcgttcagggtggagagaaggccctagaaatctgtggcgcccagagatccgcgtctgagctgacggcgggggcggaggctgaggcggaggaggtgaagacaggaaagtgcgccaccgtctcagcagccgtggctgagagggagagcgctgaggtggtgaaggaaggcctggcggagaaggaggtaatggaggagcagatggaggtagaggagcagccgccagaaggtgaagaaatagaagtggcggaggaggatagattggaggaggaggcgagggaggaagaagggccctggcctttgcatgaggctctccgcatggaccctctggaggccatccagctggaactggacactgtgaatgctcaggccgacagggccttccaacagctggagcacaagtttgggcggatgcgtcgacactacctggagcggaggaactacatcattcagaatatcccgggcttctggatgactgcttttcgaaaccacccccagttgtccgccatgattaggggccaagatgcagagatgttaaggtacataaccaatttagaggtgaaggaactcagacaccctagaaccggttgcaagttcaagttcttctttagaagaaacccctacttcagaaacaagctgattgtcaaggaatatgaggtaagatcctccggccgagtggtgtctctttctactccaattatatggcgcagggggcatgaaccccagtccttcattcgcagaaaccaagacctcatctgcagcttcttcacttggttttcagaccacagccttccagagtccgacaaaattgctgagattattaaagaggatctgtggccaaatccactgcaatac

SEQ ID NO: 11334 - DNA, 6000 bp, Homo sapiens
aaggccaaagcttacctaaacagggagagcgcgtatggcggcagcaacagcgacgaaggagggaaatctgccttcacttccggttgcaggcttccctctactccagcctcccgccttcttggctgcaagagcgcaggcgcaagggaccggaaacagggccttccgcggttatacagatccgtgcgctccaggcttgcctttggaaaatgcctgtctgaaatttgttttaaaaccgtttctaacttcactgctaccgccagtaacaaaagatataaaggaaactaacgtctcccccccactgttatctttattctcttatcctactcctctccatgcccctcatctcttcgtttaggtttttgccacgcaggtcttctctgtaggcacccctccatggatgcgcgaggaacgagtgtggcgaaggctgcgagttcccacggggtccttggcccggtagtgaaggtgacctgaggactgctgggcacgcactaggaaccggcaggccctagctgaggggagggaggagggaagtctcagggaactggattgctcgggggtgtttcccgactctttcccagtcgtggggctggtgggcggtattttcccaaaaggatgctgtccgaggtagctgatgccctagggccagtgagtcaggaaggtgttctgaatccgagcgggaagacggggtctggattcggccccaagtgttaatagtagggcttgagggttatactacattccattaatactgtttttgtttttgttttgagacagagtctcgccctgtcgcccaggcgggagtgcaatgtcctgatctcggctcactgcaaccgctgcttcccgggttcaagcgattctcctgcctcagcctcccgagtagctaggattacaggcgcccgccaccacgcccagcaaatttttgtttttttagtagagacggggcttcacccatgtatgacctcaggtgatccacccacttcggcctcccagagtgctgggattacaggcgtgagccaccgcgcccggcccattaatactgttaattcgagcagaatgttcttggccccgccccaacagccccattgttcaacctggatttttttcctgaatgaaacatttgctatccccgtctttgagatggggagctacaaaagtaagacctgatgtcctgctgtgtaataaaacaacaaacgtttggccctctccctgttaacatacttaatcatttaatactaaggagtaggtaccgttattctcatcttattgacagaagcgaagcaaagcaacatatctcaagcagtacggctggtgaggttacagccaggatgcaaacatctctcattctctattgtattctgcctccctgctcaaagaatctggttagtaaatacactgcaggttaccttattggttcaaattcttggtgaagtaagcttgtcttcagtgacaaatgaagtaactaattcaagaatggtgtcatagaaggtattttcccaagtatcatttaatttattcaaaagtatttatcaactgcctcccttgtgccacatgttgtcctaggatctggggacacaacggtgaacagccctgttctcacagtgtttacattacaggaaagaaaacacataaacacaaatataatgtcaagtatcgataagtggtcagggtgcagtggctcaggcctgtaacccaacccttgaggaagccgagcccgaaggattgcttgagcccaggagtttcagaccagcctgggcaagtgagaccccatctctacaaaaaattttaaaattagcaaggcatagtggcactcgcccgtaatcccagctactcaggaggctgaagtgggaggatcatttgagtccagggggtcaaggctgccgtgagctggaactccagcctgggcaacacagcaggaccttgtctcaaaaaaccagtagcagtaagtgctatgaagaaaatgcaaggtaaaggggcaaagagcacttgctcctacactccagcttttctctacagttgcgatctatagtcctcagattcccaaatgaggaaccatgtttctcactttagagaaataataaagtactacttgttcttgtttctccaagaagtttcaaaggatagccatttgggctgtttagggaatatgtaaacaaaaaacaagaaagtgactgaaggccaggcacagtggctcacacctctaatctcagcactttgggaggccaaggcaggtggatcacttgaggtcaggagtttgagaccagcctgaccaacatggcgaaaccccatctctactaaaaatacaaaaaatagccaggcgtggtggcacacacccataattccagcaacttgggaggctgaggcaggagaatcgcttgaacctgggaggcagaggttgcaatgagctgagatcacgccattgtattccagcctgggcaacaagagcaaaactccatctcaaaaaaaaaaaaaacaaagtgactgaaaatgagaaatgatgaggcaaaaggaggctgcttcaactcaccaatttatttgccaataattattttattgatactttttttattgttacaatgggaaagtaaggtgtcaaggatatagaaaggaagggcatgcatatgagggaacacagtatcattttagatcttagaaagcaatgagcatctgataagtctttggggaaataggaaaggaggaaaatctaataaagacaaagatcagcaaaagaaaaacaaagagaggctacaaaatgcagttatctacctggaattataagagaggggctaaatgtagtcatctcctctttttggagatcagaaggtctctgggaaaagagaagaaccaatttttcagaaaataactagggtcacagaatgaacaagtggaattagagagccagtgatggacgtgaggaaacagctgtgtaggttttgaccagtgagcaggtggtggtaatagtatcacagggttgctacttactgaatcactgctacaacatgcaaggaactgtgctagactttacagaatgattcctaatcattgaagcaaccctcacaaggtaggcattattatcatcccagtttcacagaggaggacatcgaggctaccaagttaagtagcttgtcctggtttcacagccagcaagtgacagggtcaagagagggacccacatcggccagacactgaagtcaggatgttttccacattcctacttccccatattacaaatttcacagagggtttaggtgagaatgacttggaagtttacaaagtcccagtgagggttaaagaacaacaaggagattcagatgtgagcaggatatttataagtgtcacaggaaaattattggatcctgcctcccaggatttctaggggatggaaagaagacagggattatggtgggaggtgattttgattggaggatttctttgagggagggaactggcagaaggagtcaggccctacggtggccctaggcagaaatccggtagttggggtggacctggggcctgacgtcgcagaccatgccaagaagctgggccaggacacgctctcggtttctctgctgggagctctgcatgccctgcacctggcgccttgtagcctgctccacctcagcagacaggttcccctgggagcccatggcctggggggtagggagaggggtggaagagagaaagggaaaagcagaaacagacaagggtccaggcatatgaggggaaagatcctgaaacaaagcctagaagaaaggccctctcagaaaccacccccatcccacagaaatatcccaacaccaaagagatcaacacagtcccctttccccttagacctaacatgcaacttcatcctaaaacagaccgtaatatccccaccacctcaccatccatgaccataaaactctaccctccaccacaaatgttaatcatactccacatagatgttatactttacacagactgtggcattccgcccacaagctctatgtggccttcaaaactcccagactctcctacatatcatcacaaagtttcaccaatgttgtggtccctgccagggtcccctcagcctcagccctctgccaccatattttcttgttgagtcacccttacacacctcactagatgcacccaccaacttgcagtggggtctcaacccgactctgcctcaactcaccgcctgctgcttgctctggaattcgtgctctcgctctctgcggtattgctccacctccatctgtgcctcctcctttgcctgcttcagtcgccgggccttccctggaggcagaagaaaggacagtgagtggggatggacccacacacacacaatgtaatagcaggagtcagtcccttccagaaagttatacagccttctctcagccaaccaggtgccagattctaatatccatccatttcttccctcctaaccagcctccagaccctagctgtctgtcttcccgccagccttgggttttcccaaaatgtttgctgtcccccacccccaattttctttccaaactcctaagggaggaaagaggagactcactctttctggcatctgccaccttctcagctgcccgcttctcagcttgcagaagctgctggataccttgggactgactggccatttctgttgttatggccgatgctgttttgaatgctgtcaaagtaccagatggctcccaccccccaccgcttacttctcctcctccagctcgttgctgcagtcctccactacccctgggtcttagtgctcccctgctcactcagcctcctgcaccgagtgtctctcccaatctcatcctcctattgatgactggtcctcctctccagcacttcttgctcaggcagtacccaaaggggccgcctgggagcagcagagaccaggcccaaagctgcgggcttacaacaggttagccatcccagtcggaaaggtctagggatgaggcaggggcggagacgggggagtactgaggtgagagaaggagaacttgattggtggtaacagaggaagcataaagggttgtgaatgcggtgaaaaggtaaggatgtcatcatgcaacctgtgttgggaaaagagcattctgggcttaattctaaactaactctctacctttctctctctctccaccatcccgccccctcccctgcctcccgttgttaacatctccatctttttctacatatttctcaagtccaaatttttgcatctcacttgccccatcctacgatagtcttcttccgtcttttgtctgtattttttctttttttttgatctgtccctgttgttgtcccactgtggtttttgtttttgttttccatgtttaatgtgatttttatcctgtctttatctcctctattttctctgtcttctcatcttttcgtccatcactgaaccatctcctctctctgccaagttagaggaggcgggaaaaaacctccaaataactctcttttctccctcccctcccctcgcctccttttcctcgcctccagtccagtcttctggtttcagacggcccctttaatttaagttccctagtttcccctgggagatctggccaagaactacccggtcggggcggaacgacatccggtaacgcccctcacagttcacttccgtcctccacctgcgtctctgcttgcgccatttcctccagcctggagtgtctccgcccttcccgcctcccgtctccgagcttcttaaacacaggccttgggcctacggctctgggggtacttgggggggcgggggcaggtctgatgagtaacccctccccccaggttccagaggaagaagcctccacatctgtctgccgggtacatgatattcaatttctagatcattattggagattatctgtgactttttaaaactcagatttctgctgataaaaattttccccatccggccctgttgggtttttttaaagttctttgttaaaaattaaaaatttacctgggctcctgagccttaaaccaattatttacccttttctcgaa

SEQ ID NO: 11335 - DNA, 6000 bp, Homo sapiens
taggctgcctgattgtctgtgacaaagaaatgaagaatgatgttcctaagccaatattaatggtaaattttatatctactaaatctgtacaaagacagaacctaagcaattgccagggatcattacacctatcttgaacaattattgaggactagaacatgtaaattaaacacagctatttgtgtagcaaatgctaactttgctggtatgattcattaaaactctaagtcatgggcaggcaatttttttctgtaagaggccagaaagtaaatacttcaggctttgtggacccagaagcatggtccaagatattaggtatgtaggttcttatgtaacaagagagaaaacaaatttgcaacaatttttattgataaaattcaaaatgcaacaataatatgtacaattttttggtaatataggtctactaatactaatgagaagaatggaaattttggaggagacatttctcataattgggattcaaagttagtgctctcctatcatcaaatcgattacaaatgttcatctgttaaatgttcctgggccacgcaaaacattccagctggccatatttactttcgcattccttgctctaagtactaacattacttgagaaacaagttaaaacaccacaaaccttaatttccaaaagtcagcttctaagtaactaaaatcaacttgaatattaaaaccttaaactttttaacataaaagtgcctaatctttaacgataatttatacaaagcaacttattcttccctgactcttagctaaagcctaagtataacaaagattgctaaatacagatgagaaatttaatctccttaaaaatcttataatctaataattcaatttaggagtaaaaacatacataaaaatttttatcagaaactaggacaacagaaaataatcaggattaaataatcgagggcagtaaataaaataaggtgaagaagaaagttgagagtttatcaaacgtggggaatggggagctaattcactaagatctcatgaaaatgtaccttaaatgtttttggcaacactaacttgaagtaaatgtttagtttttaaacttagtctgaataacaacctaatctgacttaaaccataaatttaaaactatgtaacttcacactgatacttttacaaaagttaagaataacctcactatatttttcaagtaacctctgtatctcagtctcaccaacaagggtcctagactagaaaatcagtgccctttgaaagatgtgcctgactcacaattgccaaattaaaggaaatcttcattccctgctcctgataataaatgaagatattaaatatttaaaatattttctcgtgaatgataaagcaattatgattttctattagcctcattttatttagattattgaaaatctaaaaaccaactaaacaagatacataaacctaaaaagtagaggaaatctgctaccaaatgtaagcattaaaatgtgaaaatatcttttttttccaggggtgtccaagacacttttcaaaagtagtaatttttaatgtaacatttctgcgggaatgagaaaaatccagtgattttatacttgaaaaagtttggatttttgattttggcactttaagctatattaaaaaagcatttggatttgacaagcctcctttgccctagtaatctgaactaaaatagcaatgaaggttttttaaataaaaaataaagtgtgagtaacttacagtatgaaagtgaatgttggtaagaacttctcattacccatttacaactagtgggtaacaaagggtagagaacaagcaggaaacaagtatgtgtgtttggggaatttccagacacaattcagaagcatttctctatacatttagcatccaaactttaaaaatatatatgtggattctgtctgcacaactgtatgtcagtgtcagtaaaaaattcccaattattcttaattttcatttcctcctgtttcaaaggcaatacaatttaaacacatcctgcttttttaaaatcacatttgaattggaaatcatagaattttagagttgaacaacctcttagacgcagtctaatctgaatcttttggctcttcaagtaaagaaattggactcaaaattatacctaagatcacaaagtacagagtgacagagctgggatttcaaccttaattccctgactcttcagtgcccttttaaccaggctaagctgcagcagattcttcaggcaacttgaaatcagaattacacatgagagccatttgaaaaatttctatttcgtctactacttagcgtgaagaaccttattttactccaaaacccaaagattttaagaaaagttaaatatttatttttatactatagtaaatactaatggaagctgagttctgaaaatactaatttatatacaattccaaattattgctattttcatcttattatcttaagaagtttaaataaaatcattcaaatttctgatgttaaattattttcttctactttactaacattgcagtaaaaggatcttagtgtagggtgaaagcttaaagctgggaatcaagacacctgagtttctgtctcattttttacaatactctcaactagtttactgtcaaatctcaacctctctatttctcttctcctgattaaggatcaggagacagatccctagtgccagacatcttatttatattgcttctaattctcacaccttagaagatatgaatgattctacctattttgcaggaaactgaagctcagagagattacggaaattttccaagaaactgagctggttagtagctgagctggaatttaaaaccagctctgcctgaccccagccaatgcccatgttccttgcatgacaccgctttgcccatatcctaatataatgtgggatcccagtatggttagaacaagtactacatttgcaggactattagggagattaaggtgataaaacaaactaaaatacatgctgaaaaaaaatactgtaactctctagttattaaattgagaatgaatttttagtaaaaaactttaaaactagttattctatagatactattcttattactgtcatcaacactgaagtaagcactgtagaattacaaaatacatcaatcttgcttttagagataacactgcaaattaaactggaaccccatccctatttcagtagttaaaaataaaattactctcaaagtcccattaaatcacaaagtatatttattaaaatgtgtgtgtgtgtgtgtgtgtgtgtgtgtataaacagaacagaaggaatcaagagaacttggtactagttcctgccctttcaaatagatttagaaaaaaaaaaattctcagatatgcaagaaaagatgagagatgcttaatactggacacctatagagtatatattaatacagtgtactgtcaaccgtcttcgcccctgcagataaagatactgtgctttcgacaaagaaatgtttccccaagttttcctgtcatgtcttacacattcagcaaagttaatatcagtaaaatgtttggtagacagtgcacaacttactccctgagtgtggtcactggctctttttgtaaaaaaaaaaaacaaaacaaaacaagacaaaacaaaaacccagcaaaggtagggcacattaataaacgtagcctaaaagcaaaaccagaattgaagtttcaggttatcttttatgtacatcttgccctacaactaaaaatatcgaattagctcaaaatgaaaagtactatgcacatttgtcataagtcctcatatgtgacctgataacatgcgacagcttctttacattagaatcgtcaatacctctacgactctggttcttctcccaacaatggccaaggtgtccatctctgtgtcttgggatacttcccacaaaggtaatggcactttgaccctgtcaattcactcagggttacatctacctagttacaattgccccccgcccccacttctctttttacctccgtgaacaacccccactaatcccccacggaaccacacaaaccgcccactgaagaagcgttctccacctgacctatcttctgcattaaacattcattccgtctcagctcattccgtggatttgctctttcgtaaatctcgagcaagacaaagctaggacaaacctgcaaattcaggaaacccgcagaaagagaaagaaaaaacagagaaacagagggaagggggtggtggacggcgcgaggtcagccagtcaactggattctgggcgctgggaaagaagtggagtgggcgcgtaggaccctcctcccgagcaacgccaactcccaccacagctccctcccctcacctcgatctcgcggatgttgttggaggtgacaaaaatgccaatgccgatgggaatgaagatgagaccgatgatgaagaaaataggtagcaccgtgccagccgtaaggatgggctgccaagctggcagccgttgctgtttgaaggccgtgttatccggtctccgagtcttcgcggtgccccccggagcacacgggggcccaccgtccacttcatccttcgcgttatagttcatcgccatcgatccctggggcgccgctccgcgatttgcaggtggaccacccagggggcccgccggctgaccctgacaggaaccgctcgagcgccgctgccgccgccgccgccgcagccaccagcgccaccgccacagccacctccgctgtagagcggaagaggcgggacactcttccgccaaaggctgctgacgggaagcgaaagtcggctggagacgccagagggagggagagagggaggagggagaagaaggagggacatggggaggggaaaggggaggaggatagaagcgggaacgaaaaggcggacgcaccctgatcatctgtcctgtgacgggctcagccattggatcgcgaatctgcgttcgcgcatgcgtggtcctagagctacggtgacacttcgcgtgcggtgtaggcgcatcttcgctctgttggccgtggctttagtaagcacacacctgcctgctactctggttatcgtggcgacggcaggtctggattgccagacaggtttttctttttacctcgaggctttctctgaagggagtcggagcatttaaaaggcggcctcaaggtggattgagtcgggggaggattagcagtatttgcttaggttgtaaaaccgcgactttatctaataaatcgccattcaaggtgcaaatacaaacttggaacagaggtgcgtgacatgtaccccttttgtcctaaagtcaagaatcaataatgtgacttagccctattatcttgcctctaattaagcgattctcacttattctttctctattgctaattctcacgttacatttccccttttctgtgtccacctttctcttttgcgcattgatataggaagtgttttgtaataggctgtagctttttctcttactgttataaaaaccaggacatatagcattactacaaaatgagatactccgtaaacactttaaaagtgccagctatttaatgacccaagaaaatactcgtgatataaaagttgactaagtcaggatattagagtagtgtagcgactatagaagtacaatatagagcgcaactaaaaagtgaaaatggtaactctgctgaccggatgaaggatttttttttctgtttctttgcacttttctgtattttccaaaatttctataataggcgttatgttatttgtaaaatttaaacaatatatacaatccatattatactgacatctttgaaatccaggccagagagtaaatcatatcatttgaaaacaaattacttttttttaggcttagtctgcagtaatgccttaaagaaggtaaactgaggaaagagaaaataaagagtgcttggtcctcataatttaccgttaagctgggctctgtggctcacgcctgtaatcccaacactttgggaggccgaggcgggtggatcacctgaggtcaggagttcgagaccagcctggccaac

SEQ ID NO: 11336 - DNA, 6000 bp, Homo sapiens
cacagaataagtttatgaataaatgaatgcaacaatgaatggaaaattctcacaattggtatcatctccttataggccatattgactccattttgcactccaatttatttgctgaactaatgaaaggcagatctttccaaaatttatatctgattatatcattcccctgattatcaccattcaatgaccactactgcctacaggataaatacaagattctatggtcagcatcagaatctatccaacagattggtgatttgccttttgctctaccaccctttcttgtggctttcctcaccctgaaaatacttaacagtacctagaattactgtgctgattcacaactccatatctttactcaagctgttttctctgtcaagattgttcattccctcctgctatgcccacctgaaaattaactactcatttgtggaaactcagcttacacctcacttcccctttgaagcctgtgctgacttttctgcccgggcttcacttctttttcttttctcatgtcactttgtaacctctctctctaagcacaccaataacattgtttcacacttgttcacaggcttgtagtagtcccttgctggcgtcttttccttcctccagagtggaggcctttgccttgttaatttgggaattagcacatattacacactctaataattgtagatggatacatagatgaaggagtagatgataagagtcatggaaatattttaggcaaggggatgatatgataagatttgcattttacgaacaatactatgatgttagagcagagagaaggctgagaacagaaaccagatgatcaggcaggagaatattacaaatcatctaatggagaggtaagaaacagaatggaatagaagtggtaaagaagaaaagggaatgtatttgaaaaatacctataaagtaaacaaacaatagttaatgaccttttgcctgaccagaaggagtaagtatgagaaaaaggatgacttcagagctcctagcttgggtgacttcttcttgtctccttgtttaatatctataattcacatccatagcattaagtcaggcaaagatacattaggcaaagtgatcaattacatgtatctgcaacaccgtttcccatgtaacttctcagaaccacatttgctgcatcaacgcaaatttatatatgaagcctcatcctgtgtccccctactaccctcattattcttcaaaattttccttaaacaaggaggaattaaaaagggacaaacaacattcagggaaatgagccacctcatgtttgaatagcacactaataaaatgaagaaaagttgaagataggaaatatggctgtcaggtaaatcctaaagaatagtaagggcaaggatctcctaatctccactaatttataaagtttaagggaaaatatttgaagtaggtcatcccttgctctgtccagccatcctatcaataggctaggatatgtactcttgaaaagacattttataaccctaaaataccattataataattatttttgcataaataatagaaatttatatttacctcaagcataactttaaacatgcttttcttgtttcttggcagtgaaaacactggttgaccaagtaaattcacccctgaagtacctcattaatcacggtgcacttgttcttggcaagaaccttaatatgctacaaatactgttattaaaataagatttggggattcccaagctggcagggaattagttagttacacctctctcgaaattattttattggggtctagttaaacttacagcataaagcaacttcgataaatgaatgtaatgtgtaaagtctggctattctaaagctcatttaaaatcacaagcagcaactgccaaagatggcctctttcctcagggtctgcttagttgtgcacaatcctcccaaaagatgatactatccattccctctttgtgctaatgtggatatagcacccctatctaattgctgaggcattgcagtttcagactctaaaatgtataatcaaaacttcacatttgctacatctattaagtacacaatttatttcctgtctactactaaagatactgctagactgataaagcctggtagacagagaagtatccaaccttgaacctttggaaaaatcatttattaatgttttaaaattctgtaagcccatacaaacctgttaacaccaacacatggaaaagaaaatgttgtgttgcaagttctcattcatgttcaagaacaagttaggagatgcaaagtatgtgcaccaaccaaggctttctttaactctctctgaatatacaatgcataatataaaaaaaagaaaggctagaaatgttttgagcatactgttgtaaagaaaaaatcataacctatacagtatatatatttgctaccaaattgagcattataattgctaaattattttagtatattctgacaggtcaaaataatttaccaggcttattaagtaatatgtttaattacatatcaggtcagaggagattaacgagaaaagtgtcagttgcatttctctatcattatcctaaccacatttaaataaatgtgaattttacataaaagttatactttttgatgtaatgatgatgcaacacaaccgttctccttgtgtgcattgtaaaacggaaagttggctggaatattctgcctaatgctacatgttcacgtcaatctgggactgtaaaattttccagacaccagagccccacagattgtagactccaccaatttcctgactcctatgtggttgaattccaggttcacctagttacaaaaccagcccttcttccatgttatttcaaaacacgtttctggtgttgatgctaattctgcatcccaggagagagctatgtatggatgacataacttatttctaaaagaaacctagtccgtgtgctcaaaacttattttactaggaaacaaggaatgtatcagcgagtatctgcaactttctctactggtcttctaaggttgatgtctttatatttcatcttaacaaaaaagaagcagaaataataatactaaaaaaagaggaagcaaaaggagaagaggaagaaaaaaagaattagacacgaggtaacattataaaaacaaccttaaaatgcccagataaacgtaactctaataggagactgaatgaatggactttgtgggaaaaacagtagtaaactttaaagccactgaaaggttttaaatgcctaagggaaaaataaacatttgcttccaatcattttctcattaagcattctctgctagatggagaaggcttactacacacacacacacacacacacacacacacacacactctttgactccgcgccacaaacggggacttaacccactgcccgatctctgtcagaggcgacccatttgcgcttctgctatcgcacctccgcccgcgttcctgcgccccaggttccccgctgcctccccgccccctgcagcgcgggagcgttgcttcgcctggcctgctggcctcctctagaccttggccaccttctccgtggcaggaagggctacatgcactgacagattttccgttggtggtggctgggtggtggcgaggcgtgtttccgggcgcgcttaaaacctagcagctctctccaagtagcagcttcccctactccgcccctaggactgaggacctagccctcgatgccccctcacttctccccgtcctaccccgccatcacctcctaacctctccagtatactctcaagcctcacacgggcgcctgtcctccctttgcattccctagctcccgggcgccccgttcggttgaagtttacgtatcttgggacctaattgctcccaattatccgcgcagcctaagtcccgcgtctgcctggctctcgccccgggagcctgaagctaccgggcagttcattgggtgtcctcggggaaaaggttcaagctgtagagatgagagaagtggggctgggggaggggagaggctccagaaggaagaccacgaacacgtgcgaagaaataaaagccaccacgtgtgcacgcgcgcgggggcccaagggcgcgagcgcggagcacgccccagggggccagggacagtggtcccctgcagcgggcatagcagggggcgcgggtactcacacgaaagcgtggtagatgaacgcccagccgcggggtctctccagcacgttgtacaggtagttctgcacccgccggtacttgacgttgcgccggcagctctggctactcgtgtaagagagcggcttccccagcaggctcatccgggccccctgcttgccccggcggctctccctcaggccaccgccgccgccaccgagcgtggccgcgcgggtgcccagcagtagcaggccgtcgcccctggcggctgccgagttcagcagcaccctgccccggccggactccacatccttcatgccgctgcccaagcgccccccgcccgccgccgccgccgctgcgccgctcttcacccagagcccggcggcgccgccctcctctcctcccgcgtggtggcggggcatggcatcaccacgggcaccgcgagggggccgccagcgcctgcggcgggggcagcggcctcatgtgcgccggcgggtttcaaggaggaagccggcggccgacggggcgcccgccagccagagacctctgagccgggggcggggaagcaggcagccagcaaaccgcccgggcttcggggcgggaaaggaggggctgcagaggaggccgaggagtcccaatttctaacagcctttagcttcgaattctaaatccggacctgtttggggcgtcactttgagagggtttctcttgctccctcattcccgcgactaccactccctccttcccaaactgcccccggggatagagtgggggagtgcggggcgctccgaggcgcgctcccacgcgcgcacacccagccccaggcttccccttccctctctccactccccacgccctgcagcgaaacggccccagaagcccctctccgaggcgcgagttcggtttggttctggcaggggctttgcagctgtccggaaggtgaagtcagccttgtgtcctgaggagaaactggagatgcaggtcgctgtgccctcccgctgctacgtcgctgcgccggatcctgccatccttccgcaaggggtgagagcgggaacagccctgccctgccttccaggtattatctagcctggaggctggagcgcaaggtaacgctccgggaagtggcactcgggtccccgcacacgggcgagtcctcagcagttcagtggacagacccgcaggacgcggctgccaagtccgcgaggcaaggaccaggcatcttcccgcgcctcactccagcctgcggactgtgactttccatcccagtatcagacaagctcgcgagtaactgaacatcctttccagtccatgggtggggtgtggaaagggcgtaaaactccaaagtggctcctccgcggtgagcgagctgccccggggctctgcctgactgcagcgcgaagcctgggagaacaaacccagttccctccgtcaagaaatttccatttaagtccgagaaagtcatatgattgagaagttcagcagcggcggcgaggacccagtgtctgggaaagaacacctggaggatggggtgtccaggacgccggcttttcggggttccgaccccacccaccttatgttgtaacatacaagcttagagacctgttgcaaggaacaactgactgggtcttccaccacccctggcacccgggtggcccaaagcctatgcgcccttggcggagagagaggccacggtgccactggccgcagcctctggccttcagaaacagtgtattacaaagaaaaggcagtttaaatctcacattcagcatagggaaaactgaagggtgccaggctcggggacttcttccaacagagtggctcttccccaaatatgaaagaaaatcatcaaattaaattgaaggcaaaactaagcttccaccacaaaga

SEQ ID NO: 11337 - DNA, 6000 bp, Homo sapiens
aaagtattgatcctgggtgtgtctgtgagggtgttgccaaaggagattaacatttcagtcagcgggttgggaaaggcagactcacccttaatctgggtagacacaatctaatcatctgccagcttggctagaatataagcaggcagaaaaatgcgaaaagtgagactgacctagcctcccagactgcatctctctcccatgctggatgctccctgcccttgaatatcagactccaagttcttcattgttggaactcggactggctctccttgctcctcagcttgcagacagcctattgtgggaccctgtgatcctgtgagttagtacttaataaactcccatatatatatatatatatatatatatatatatatatatatatatggcatatatataaaacatatatatataaaactcccatatatatataaatatatatatattccattagttctgtctctttagagagccctaatacagcattgctctaaaagtttaacttagttgatgcttactaaattctcccaaaaactctatatgtgcattattacccctcccattttataaataagaaaaccaaagcacaaagagctaagcaatttacctaagactacatagttgataaatggcagagcttggattatgaaactcaatgtctggctgcagagtccatgaacttaatagttaataacctggatacatgtttttggtctattgtcaagtgaaaaaaagcaggttaaaagatgttgtgcatgatatcaccctatttttgttagaaaatggtttgtataaaaatgacatcaattatctctggatggaagaattggtggctattttcatcttatatgccattaacatttaaaatatactatcattttcctaatcattatccaaacaagaaaaaaatccatgttaatataaaatatataatgtgtacaatgagtcaaataggttggttttgtgattgtaaagatgtgattattatgcatcctatgcctgtatcgaaatgtctcctgtaccccataaatatatacatctactatgtacccacaaaaatcttcaagagaactaatttttgctttcatgatttaaaataatgaatggaggcaataaaactcagtgaaattgtttagcagagttgcaacgccaagcttgagcttttggtgtagctgaagtgattgagtgttagcagtctgtaacccggttcactcagtggctgtgtgcctactgcattgcatgagttgttctgagagataaatgagataatagatctgaaacaaccttgaaaactactttaaaacagtacgggaaggtgaggcagatggaggtgtggaatgtgcagcacattttccccatagaaacaaggcaattcacaatacttatgtcaccatattagtcaacaaaaggtctaacaccttatatagcaaaacagtttatgaccttatttctaagtgaaaatgcaatcaacattcaaattggagacatctctctccttcacaaacgtctgtggaactgttgggattctctttttagtctcttctactaagacactcagttccaggaataatagaaaacagaataggaagtgcatagccacattaagttatagaattgcatctataactagggtgccctttcataagtcaggcattgcctatactgtatgtaaaggatgtgatgccaatttagagataaaatatgtgtgattattcttctaaatatttttgtcatcactttcgtatggaattctaaaagaatgacagggaagtatattgaaataaaggagtgtggtacagtagttcgaaaagcgaattttggtgtcttataatcatgcccttcaaattctaattctgccgccaagaacacgtgcacccgtgataaaaatatttgatttctctctgagtttgtatatctttagaatgtgcattgtatcaactcatgtgtttcctgtgaggaatgaatgagacgatgtaggtttagtacataaggcagtagttgcacatagtgaagtctcaacattgtttgtagttcacacttctgagaacactgtgccaatgacgtcagatgaggtataaaagcccctggagactgccttaggttgggattctcaagaggcaggctctgacacaaggatttgagtggtttatttcagaggtgatcccaggaagcagtggtatgaaagcagggagatgaggcatggaagggaaggaagccaattcagagcgcatgaatgagccagttactactgtggacacctagggctcaatctcggtggggaccttaatggtgtagactagaacatgtctgacggtttcccatatgaggattgaagaagctggggtatttatcctccaattcccatccattattgcgtgagggtagctcttagggctggaaccttattgttcagccaagcacctccaatggctagaaaacagactgtcccaagtgattacaaaaacgcaagcatggactgaaagggcacagtccaagaactatggtggggcactgctggagtcagctacagatagcattctgctttcctatacaacctaaagattactcaggctattgctggttgcagggaaacctctgcaggattacggagggatccatataaatgtgttgttcctatgattaatttgaggaggtaatagaatgcttttgacagtatggcagcagcttcttcaacagtcaattaacttacagctttctgtttggcaatgcaaaatacccatagccctagcaggtacaggacagctaacgtgtataaagacagaagagcaactaagagaaacattttccactagataactggcttcagttttaccaaaggttgtggaactattaccttccaggctttgcagtgcctaagagcacatattgggctcttgggaattttattaaacattgaaagacacttttcagaagaaaagcccctttacaaatgggtcgattaaaaccagacattctcattatagcaataaaatatctgtgctccataaatttaacaaagttaatccctttttggctccctaggactgacgaaacgtttctgaaaattcagtgccaggctctggagaatagtctctctgccctattcaatttatttgtatttagtcattctgatacgtcataatgtttattcaaaggaagcaatcattcgggatccttatttgtggttcccagcataactttatcctgtataaatgccatttttctcagtaggcgccaagttccagttgctacagagagctctctgcttgatgtggcttcgtcatcttaatctcttaagaagggtgctagggagctgtttgctatttagctccctaaaccatcctcttatcaatcgcgacacttcaccccaatgagtcagttcctcagtggatctcaacaaataatcttcacttcctggaaaagttaggattgctttccttagctgccagggctaaaaaggaaacttggtcctaaatatccacgccccaggggcagccacttgggccagcatgttgcgcccttcagctttccgcccgcaggtggcagcagcgggctccgaagcctgtctctgcaggtagcagccgcttcacagctttcaggccggtgctcagcggaggctggtgcatctccactaggaatccacacccagctgggactgctgtgaagctgaagtaactgagtattaaactagtctccgactctttagtattttaagtgaaaacaaacaacagtttgaagcagcaacagcaactcattgcatccctattccctccggttgctaatttttcccaactccagcagcaactcggtccccttccccaagcagggtcggctccgtagctctccgcgctccgacccttcagatcctcgggagcccaggggagccaggtgctgggcggtgcgtccggtgccgccgcgccccttctcgccacctctggcctctccgccactcgggctttccggccgctctggatgcctcggttgcacccctgttccatgaccccagcttccttccctaaccctcctcttggtcccttctcccccgagcgcgcgcgcacacacacactcggttcgctcccgcggagtggctctgggagcacgaccgacttcagctcagcaaaccgcggtcatgccgcccagactcctcgccccgaggccccggtccccgccgccgccgctttcgcgccgctcctttccgcctagacaccgccgcctgcggccgcctgggcggcagcccctgcggtcctcaaagttggccccctgggagggggcggcagggagcaggatgaaggatttgttgtaggaggaggattcacacatctgggcgaagggaggggcagcgccgctgctgggacgcggcgcggacccgcatcattgcgcgcagcagccgctgcagcagccgccggggaccgcggagccgggacgcccccgctcggcccgcgccccgctccccgccccacccccgcccgccgggcccagcaacgcagggtgcctaggagccgcgggctgcgcagggaggcgggcagcggccctcgcgcgcttctgccgcccccggagccggcgcgcggcgagcgcagggcgagcgcgcgtcgggcggcggccgcgctggggggcgtgaggcgagcggcgcggagagcggcaggggcgaaacttcgcgggccagatgcccgagggcgcggcggcgctgccaggctgccgctgctgcccctgcgggccccgagcgcgcctccgcaggcggcactgcccgcggcgcggcgtgtgcaccgagcgagtgaaggtatgtgtggcgggcgcggctggagctgccgccgccgccgccgccgcgccagcaggtcctaatgcctgtcacttcccaggacgctggcagcagcagcagcccggagcccccgagccctcggcaggtttgcgtgtccttccccgcgatctgattggataaagtgggggctcgacggtggccgacgtgggacagtctggctgtggcaggggtctcggaaaccatgggttattgcagtggcaggtgcacgcttatctttatctgtggcatgcaactggtaagtgacacttgggtccccttattctgtaatgtgtctttgagatagtgggcaggggagtgcagcaaagggtctgccattgactagaatggacgaaaaagataaaagagaaggtgacagatatattgcctatattgaagatgatttcagggagacgcactctggggtacaggagaggtgagcctttccgttcccacctatttctgtcccttttaagacagtttggcaggtgcgggttaaacttgtctttaatttctttaggaaaagcaagatgtagctcttgttctttatgctttgcattcctattcatgtaacaacgtgattgtcacctacaatttaccgtacaggttgttaaacagaggaatacggaattttggacttttcttctctatactaattttgcagtatctttgtttcttcatagacatgttttttttctttttttaaggaaaatgttgtctttaagtataatgctctaaaaaaaccactgtttagggcacatggtatccttacaacagtctaatttagactgtttgagttttagccacattgagtttttaaagtatgcagattgaacaaaaatacttaggtgaactcagcaacaccattgtcatagacggaaccagtaacctttaaatcacaattaacacagacaattccaagaaaaactattctgtcttacattatgcatattattgctcctgaaatagatactgttgtctgatcctataggatggagaattctatgtactttttgaggaatgttgtacagttgcaaaggggcaaggaaccaataatggaaaacgtcatgtctctgaatttcaattccctaagggcaatggaaggagggtctgagtagagagttgagaggtgaaaaatacaccactctaagtggttaatttgaggtaggagctacttgctcacacttgtcattaaatatatttccttagaa

SEQ ID NO: 11338 - DNA, 6000 bp, Homo sapiens
agggtttcactgtgttagccaggatggtctcgatctcctgaccttgtgatccgcccccctcggcctcccacagtgctgggattacaagcgtgagccactgcgcccggccctgagtataattattaataccttccctttcactctcaagtgtcctggcatgggtgttacttgtttcccatttgcttagactttctgctctcggtggaaaaaccatcacacacagttcacttgctctcaccttcaagttatttccctcctctagaatgctgtacttccaccactgccaaatcgtgaactttctctccttcaatatcccactgagaactcacccccaggatgggactctgctcaccccgtcctctactcaagcagaagcctctcagcgatcatgtaaataactgtataactttaattggctctgtttataagcctcttatatctttttttccctctaggtatttttccatgtgtttatcctgtctccattaatttgtaatcttccagagggcaaggcctgaacacaagcttctgttggtgtaaagtggaggcacaggtaaggctgattgctagacactgccgtccttctttattagtaatctgttaaaaaaaaaaaaattctttgttgtagtgttttgttagtgatggtcccgagactgctaacctaatgaaaaactatatccagtgtctgctagtgtccagacaaaagaaaatcaacagttacaagcttttcataacgtgaggggaaagtgtgcggatattttgacccataagggaatttatggtgtatggaaagcatgttatagaatttgttgcctttagatttttattcttgtcttttcaaggctgcaggactgtctcagaagggaaataatatttaccttccaaactgagatctaaaacccgaacaaagcctcaggaaacatactccaccaccatcttacaagtttgtgctacgggtggagggaaaatgaatctaatgtaggaggcctcccgctgtgcgtctagcaggaaagaccatacggtgcaagtctccaggatcactagaggggtggattgttcatttcagtccaggtagcaacaggaagcccgtgcaaatgttcctctctcactgcggggctaaggagtgtgggtcctttcccgcgactacctgcttgcctctctcagaacctgcaagtgaagtgcggaagatctgtctatcttctcggcggcgcagagcccaaggtagaaaccgatggaggcggtgcactagataacatcaaagccccgggcaggggccagaaaggggggcacaggcagcccggggaatgaagcgcctccctctagcatttcctctcacgcccacttccaacctaggaggcttttggtttctgcttttttgtttttaaaattaaaagttaaacccaggaagctttggatcagacttttgtgttgcagttcgggtaagtttttctctcggttcttttgtctggcgcctggcttgggaagagcctgggcgtggggcagagttggcagggcgtgcggggaaggttttgtcgccgggttgcccagaggaggaggggattcggccggtggatgggaaagcccagcgcgcgcggagggcggagggcggagggccgaggggagggacgagcggcgtgacccggcggccggcggggaggaacctccgggatctccgcgtggcggtggcggcggcggcggcggcggcggcgctgccgggccgcgcgctgggcggagggccggggccgcggggccgcgccaggggggtgcctgagccgggcccggccgggcggccgcgtgggaacccgagccgtggacgcagcggcgggggcgggcagggtggcgcggggcccagtggacgcggctccggggtggactttgtgccctctccaaactgttcgccaagaaaaacgtgtgttgagcttttcagtgacactatcctccctcgaaccccactttccccaaggggggctccagaagcgttcacgcggacggtggggatggaaccatagagaaatggacctccaggagccccctcttttttgggggcagagaatggtcacttgctcctgcattgtcccaggatttttgacagttgaaactgcagtttaccattcacattcatcctccacattcaccctctgcttcatttttttcccacgctgtgtttatttgatacattttgagaaaatatattggatttgccacaaaacaagcctaaagaagctactttatagtatagccaggtttccctgcatcctgatatctgggaagaattgtaggcagaattaggaaaagaaactgcatttagaaaattcaaaaacttactaggaaactattctgtattgtatatatttcaaataaaagtttaatatcggtttgctgctcaaggaaatagttgaaatgtcaaaatttacctatcgtaattcgaaattgcatgtatgttttgttagaaagttcgtagtaatgctgaatcctacataaacattgtgttgacagtatgttgtgctcaacaattattgggttaaacgttattcattcagttagcatttttcacttccaaagtgatacaaacttcactcattatcacattacctttctcctgacagattaatagctatacgttcacagttaaatgcatgtttacttttggattcaaataacccagttgggaagttacattatatacttttttggtgattgcaacctattggatatcatttcatttcacaaatgagagatggttatagcacaatgaaaataaaaattgcattatttcatcgtagggttagcattagtatgctagacataattgtacatgtacacagttggatgatctttgcttttataaccaaatttactttgtagtaggcatatttctccctttacatgatattatttttggctacacactcgccattactgagtattccatttttaatcattcccattctggtggtttgagcttttcttagctcaaatgagccagaggtacgatttcctcaggggaattttaggggtcaactccagcaggaaaaacctagacgtcgttatggaagcccaagggaacaaaacaattcaagtttgcacagatggccagctgtcttagtggttgtatggtcgtttagcatttttattccttaaaaggggaaaccagtttagtttcatcagggatttttttttttttgcatcaattttgtttcaccttattcctctcaagtttgaggtggcccgttaaaccagccacttttgcttcttgaggtggacctgtggaatttctgtgccccaaactgcgaacgttctttaggtctaaccctgaaaaccttcgttaccctggtccagcccctcttcactgctttgccatggatttccactccttgctttctctactgctttctagcagccggggtcacaccttggttcatgctaattactccctcttcccctttcacgctctcccctcttccctggagcccggtccgacgaccagccccgcaccccccttttctgtccccgaagtcccctcccgggttggccctataagctgtcaggctggcaggcaggggttaattgcgctcgcagcttcggcactgggaagcaccagcggggctttggagcggcctctggaataaccttggctttcctcgctcttttaatagaacatccgccaccaaaaagtggtttcagttcagggttaacatgtccccttccactctccaaaccaacaccctgccccctccgtttttttaaaagttgtttttcaaagttaatgagttttaagtttcacaatgactttccccttccttctacgcgttgctgaggaaacccccttggggtccccccccccccccgcctccccctcccccattctgcccgggcgaggggcggggccgggagaccccatgacgtcagcggccggcccacatcctgctgtagaaagtaaagagacggtaaagagaaactacggccccgcccgtcccgtccctcttcccggaccaaccgcccccaactgagcgaccccgccaggccttcccggggccgcgtgactggccgggcccgcccctccgcccccgccgtgtgctggttccccaggcgtcgcgacccagggctcccgccccccgcgtccctaaccccgcccctcccccccgggctgcgctgccacctcctcccgcgtccccctcccgtccctgcggcggctcggccgggcggggcggggaggggcgaagcggcgggtaggtggcggggccggcgcggtctggggcccgccccgccggggagacccggggcactggctccgggttcgtgccgggccgggcgcccatccagtccctacacccggtcagagctggcggccgcgccggcccagctgggccccggcgcctgggcgtcccgcgcccctcgccccggcctcaaccccagcccccgcggggacgccccctcccccgcccacgcgtcgccgcccgcggcctcccctcctcccgcccccggggatcccctgccgccccgcccacccgcgggaaagcctccgaccttcgccctgcctcccccgcgccgcccggcccgcgttcctcccgccggccccaaagacgctaaacgtgccctactctgccccgggggagaggtaaagcccgcgcccgtccttcccgccccgggccccgcggccccagggtctgtccgcccgccccgccgcggcgcgcgccccccagcccggctgcccggctccctggcggccgcgatcatgccgtggctccgggcgccggcgagcttcgccgcctcctccgcccggcggctgcggcccccgcccgcgcgccccgcgctcccccccccgccccccggcccgctcccctgtttaatatttcagtgctgggtggtgtgagcgccagtcgccggccttcagcgtggcggctgctgggcggcggcagggtggcggacggagcgggggaccggggagcggcggccgccggaggaggttatgtttgtgtttggggttgtcaagtgaaggagggatcccaggcgccgccgccgccgccgcgcgggggtcgcggagatcccgagccgcggccgccgccatcagcagcgcagctccagggccggctgcagcggcagcggctccgccgggcgtcctggcagcaggttcggcgcgggctccgcggcgggggcgctgcagctggggagggcggcggggcggaggggggggggggcaggagcacatcccttcggcgggcggggggcgtgcgggcgcgcgtgtgtgtgtgtgtgtgcgtgtgtgtgcaaccgccgaccttgcagaggggatggctgcgtgcgggagacccttggcacttctgggcgccctcgccgcgcgcgagccgagcaggtacagagggacccagcctccccagccgccttccagccgcagacgcattttgcaagagggtggggggtgaaagagaccaggcctcggcatcccaacctcccggctttgtgggtttctttccctttcgttctttgctctaagtgcctgtttactcccggccacctgggtagtttctttccgggttgggagtgcgcgccagctgcagttgggaagggggcggtgggttggggtgcgggtcggctcgggctcgccttggggtcgggctcgggaaggagttgctggctggagaggggagggggcggcggcggagcaggcggcgaggaggagtctcagggctgccgcgctcgcctcatctcgtcctcctcctcctcagctctctgcatccactccaggctccttcctgagctggcacttccattccccccctcctcctggcatgcgaagcgctttgttcagtgcagcgttgcagaggggttttcccaggctccgccctccacattcattcatgttttttctccttgcaactgtctttacgctttttgatcgtgtcatgtttttgctccatgtagtatttatttctttcccgtaaaggaacggtttatcactcgtcctagtcgctacaatgctgctgtctttggaaataccca

SEQ ID NO: 11339 - DNA, 6000 bp, Homo sapiens
tctgcggtcagcttccaagcagccaatatgaatacttaccggaacagaagtctgtcgtgttccccacttgacaatcactaactgttgagttatgtgaacaatagctctcatctgttggggggcaggggaaaagagacaaacagcatcaaccacccatttgtattatctttgactctgctactaagctctatgaaatcaaacccaaacactttagaagtgggcagggggaaccactttaggtgttttgacctaaagttaaacccacagaccaaaccctgtcattctccttttcccactgacttagagattacgcaggatccttctaacttttatccattaaaaatccacattaatatactgaaaaaataaatctgcaacacttagatctcagaattgtgggaagactactgtacaatcaagaaaggcagccatcatctaaaaagtgggcaggtggctcacgcctataatctcagcactttgggaggccagggtgggaagatcacctgaggtcaggagttcgagatcagcctgaccaatatggtgagaccctgcctctaccaaaaatacagaactctgtctcagggaaaaaaaaaaaggcggagacagtaagttgaagtggtcagggtctgtattaagaggttagtaaacagatgaggcaccccataacactgtagaaactctattccaaatctcactgctttagtcttctatactttctaaaacaactttcctggataggtagacttggaacaagagtaaggggagaacctttcccaacaaatcttaaagtagagcattccatctccaaaattcaccaactcttacatactcccatataaaggggaaagagtacgcccttaaatcccattttatgacctaaaaaaaagagacacttctataacaaaaaagttaatttggcccaatttagttaataccttaaagagctttttgaaatttatgtagtgatataatttctagaactattaaaatttttaccaaataaaaaaacttatggtttgtttttacttaaaaaaaaaaccgccaaaacaactagattgttttactgataagtgcaaccactttacattaaaaaacaattaaaataatgtatgcagtaatatggttctaataagaatcttattgaatttcaatgtacgtccctttagcgctctacctcttgtattaacaaaagcacaggaagtcaactctccctacctctttcttctctacacctaagcatccaacagtttcataaggtctctttatatttcatgttgcaggacacagttttcaacacaaccttcactcacagctaattccagtgtattaaagtactctcaatccttagaacaggctttaaaaaaagccaggtgaggaagcacgcatctgtagtcttggctactagggaggccaaggttggaggattgcttgagcctaggatttcaagaccaacctgggtaacacaggagactccatctcataaaaaacaaacgactgagctttaattatcaagtcttaaggaatctaaagggaggatgggagacaaaaagagattttcagggggagtgcgaggcaactggcactttaaaggagtactggatttgcaaaataaatagtgcacaatatcctaaatgtcctacataactttcaagtgttcaagaattactgtattttaaaatgctataacaaaacagttttgcatccccaaagtttcttacctttacattctatccaaaagcaggtagtattaacaacgctaacattaaaacaggaaacgcagctgtttcgaccttcacaggtttctggggagttggggggagagatgcatgaaatcaatgattttattagtatcttatttgaatctgtattacttatctttttgaacaataagcattacatacagcatcaaaattactaattcagataaatgataaaactttatactggtttactaagaaattccaatcattacaaagctgtaagtaaacgcattagaaaaacaagctagtggtcactctcagtacagtgcctgatggtatctgtctaaccaatcctttttcacaggacaactattggaagacacccacagccactaaggatttaggcatttcaaagcatccttaatacataaaaatatcgagaaaaaggctttgatataataccaacactacacataggaaaaccactacccccaaacatcagataaaaccctgagatttttagtagtaacagtagtagtttaacaggttgaacccaagcactgatgatgcccattctgctgcaaacaaagataatttcccagggattctcgattcataaatgatccactctcgacaggatcctccacaactggagacaacatctaaaagcccatattcaagtgcatacaattcaggttaacaaggtatttgtcaatagttcatcctaggccaaacaatccagaaacaagtactcatcaccataattcaatttctggagaagaacggactataaaattgggctctattttccagtgagaaaaagcagcaaaataaaagaaaaaaaagaattgggctccattcattttcctagaaactagatgcctccaaacattctcgtttgctttgctcctgcctaaaaaatagttctgcagaggcactgctttcaatacttcatcattagtacttattaaagactgggacatgtacggtggggtggggaagggttcataaagtaaaaataaattttctgaagtttgtatagataaaacatgctgtttaaaaacctttgtgcttgacgggtgtagcaaagtgaaatgtctgaaatgttctttacaatgaactaaacttgctacctttcagaccacactacatccacttatgatttccagaaaatacatacctcctttgcacgcacttcaattacacaaagacaaattaatttgatacttccaaccttctcttacacacacactacaattctgaaaggaaactgtcaaattaagactgagacaaacatattctgctctatcatcttaaaatagtgcggttagaattcccagtattatactgcaatttacttccctcgttttgaaatgttaccattacatcttccttaaactaaaaacaaaacattaagtttactatatactttattaaacttttataaaatactaaaactagaggagaatttgtagaatatgaatgccgtgataaaaatcattacacttcggcattcttcggtcaagaagccaatgttaactacgtaaacattactccttaactaatgttaactagaataaccaatcatacgagactgcaggttttaaacctctagtgtttctcccgcttattacctcaaacttatcttccttctctcttttgtgttgtcacggtatatggcaatttctgctttaaaatgtatgtatgccttaaccagccctatgcgactgcacataacaaaagacacgctcctgatcgggttttagaaaacccacagacctgggcacaaacccccgttccacgacctactaaacatacgctatctgagcacaggacatagttaagaaaattttaaaaacaattgaaaaaagaataaacatacaatgtcaggagagtttactcatctccgtctctgcatctacctcctaggtttcactacctaccttccagtttagccttaggatacgtacgcaaaacacccggtacatacatgggtacttttcttccttttcgcatactttgaagtgtgaagttttcactaactacgtgctcaaacgtcagctacattctattcctatctgcaaaaccaatgtaattaaatctcaagcgaccttctcagactcaagtctgagacacgaacgagcattaccgtctttaagtttctctttcccggacttccggagaaggctacctccggagagaggcgccgggagggtgaacaaccagtggcagggagaggcagctcggccccaccgccaacctcagaggcgcgacgcccggccccatcctcaaccccaccgctgcccccgcggaaggaagccacgtccccatttccgaccccaagtgaggctaggaattacgatgcacttttaaaaggcacctcgacttgcaacacttcgaggggggccccagccccgcagccactgggaaccgcgcgtccgcttccccccagcgcgctccccacccggcccggccacgagtggactccaggctggccgccatgttgccggagtcgccgccgcaccccgagcgcggcccgcccgcccgaccgtggcccgaacccgggccccgcccgcacggcgaggaggcagtgcggctcggctgggcaggggagggcgggaagcccacagggcccgcgcccacctggtgccggagtggtgaccagcgggagggacgtcaccggcgccgaggttacgttggagatgggcgctaaagtcgtcacgttcgggtgctgggtcgtgttcttgtccgcggacagcacgcagagcacgcccaggcaggtggcggcccaaagcagtgagcgggagagccgcgacatcgtgtcctcagcgctggcgttcgggagaaagctaaggctcgcaacgctcagtcaacccctcaatcccctgcggcgccgcctccgagactacgctcccccgcgggagcgcgcaggggtcacgtgagaggcccctgttttcggcgtgcgggggcgaagaggagggaggtggggctcggacgataccaacgggaatcctacggggggaagcaggggagtcgggaggaagccgaaggaacctggccctcaaagcgactgtgccacagccaagaaaactgggagcttctgcaaatcgttcttcttgccctcagattaccagacacgacgcagctggacttgtctcatgcctgcgatagggacggcccccaccctgacttgcatggaacagtcgacataatgtggcctactgcttccacctgagcgccccgccaggctgtaattccgcgggcccacgtgacctccggggccgcgccttccggacgcaactccactggggcggaagttggttttgtgcggctctcaagaactaagtttgtgctgtgctgcgggatccccagggagcttccttatatcttcggcaggaccccttctttttttcttgaagattgattttgctagaagttatcctgtgatgggactccctaggggaatggaggcaccacgtggttaaggagtttgtgcgttgccgcccacatagtgtgggcagctgaggcgccgcccggatcagagccgcagggcgtctactctgtcactttcccaacctgacttttccggattgctatttcagacggcggttgcagcagccgacctgtctcaactccaccactgtagtcagagaatcaaaagcggtctgagttgcgaggtcattggggaggcccccacccccacattaccagtgaggaaactgagacttaaaaaagtgacctgacctggacacgggattgcctgacatcagagctggattcttaagttcctgttagtgttaaggcgctgctcagacttttagtaaaggtgagcgccatctactgccaagtctcacaaaatattcgcaaaatttgatacggttatcacatggtaaaaattagactttaaaagttgtatttaatgctgtgttttcagctgttgtacacttatgtaattttaattatgcaaagttatcctaataatataggaatattaattgctttcgtgaggtctgtcttgatgtgccacgatgacttttttgatgtgccaaaaaagatgactacatagtgcttttacctttttgctcaaatagaaagattttatttccccttgggatcttttcagtgtcgtccttctgtaccctcaggactatgaacatttgttccaatgactacgctagttggagtagtgttgcttggatgtaaacaaaaagctgatagttttgactgatccagcccagaagcatgagaatgctgtcagggaagtgagctcccaccataagcccttcagagaagtgtctgc

SEQ ID NO: 11340 - DNA, 6000 bp, Homo sapiens
tgacctgatcatccagaggcaaggaggaaaagtgtgggatcctcttcgcccactcaacaagcgtgaatagctgtttgtcagctgcctgacagatgttagtcacagggtcatttggctgcaggggacgggggtaagagttatggaagattttgagatatgctgggagcccccttgtaagaggcttttgacaccccctccttacatatagtcttcctgtgagccccatccaaaccaatccctgtaagtgagtcttctcttctggcattagtgcaaacaattatttatttgggacatgcctatggttctgccagtgggttgtttggggagtggagacagaaggagctatcacatccacctcagatgtttgaaagaccttgtttggcagcacctccagtcccaagtagtgttaggaaggttatgaggggaaaggagggggaggggatgtagaacagacctagactgcctcccccaacccccatcacgaaggagagtggattgaccccaacactcacgctgctgccgctacccccggttcccccaggaccctcaacgccctggtcactcttctgttccacagcaagctctgcctccaggatcctgtccacaggcatctcctcgggggctcccccagccccctccccatccccatccttgtcctttccccgctgacgctcctcctgtaccgctgcagggggaagggggagagaaaaaatggaaagtcagcagccagccatgaaggggttccacaaatatccttacggcctcatcaggatctcatggcccttgggagatatttataggaattggggaagtcactagaaagggtggactgggggcagccctgaaggaagggttataaaagggcaggtaagtcagtcgggaagggtgaggtaggtaaaagaattagggaggaatttaaatggagagcctactacatggttaaaaaaaacatgccaagattcaacctgagaaagctgattgaaaaaaaaaatttttttaaataaaatatgccaagaaacatgctaagcacattttaccattcactcaattatcataatgatgctggaagcatttattctcatttttaagatgaagaactcggggttcaaagagattagtttgcttaaattcatataatacatggcaggtcatacaactgactctaagtgtgtctgagtgcaaatcttgtgctcttctgactcaacaaataggcagtgaaaggagcactggcctaggtctttgaagatgtgggttctgatcccaaacctgcctgccactcctttgttgcatgaccttgggaaagccaagcctcaggctcatcttctctaaagtgggtgttttgaccaagatatgctctaaagtgtctctcagaatcctaggaatctgacttaagaagataagatggagacacagaagaaggaagggaagccctgaggtcttcagtaaagtctgtaagcttaagagtgcccagtcccaggagttagaggaaagatcacagataacaggagacagagaccagagaaggtccatggaatcagaggaggaaccactcaggttagaaatggggagacagcccatcatggctaaggaaaagttatcctatcctaggatcagtctagggaggggtcatatgtgcaggccacagaggcctaaccattaagaaggaaactcaagggccagaacagggtaacagggaggagagctgcgaagggagagagaaatcaaatatcgccctctagaggagagagagcagtccacccttccagagaggtacacagtctgagtgggataagggagaagggcatgtggtctaagacgcctgggcagggcgggtccttaccctccctcttcatgccagtggccaggcacttctgatagcggcagtactgacagcggttccgctggcgcttgtccactgtgcagtctttgttgtcccggcaagagtatgtaaggtctttgcggatggtgcgtttgaagaagcccttgcaaccctcacagctgtaaaccccgtagtgtttgcctacagggaaaggggaggagcaataagaaggttgcatggagacaccttcaccatttagtctgtttccaatctccccctagcaaaacttaaagtcctccctgtttgccaaatacagagatagggaaccaggagctgagtgatgatccagtcccagtctcctcactgttcagaaaccctacacgctgcttccttttccctctgaccttccccccaatcgcgtcctacatctcagcttcagcttctttactcccatcaggcctcccccaggtcacttgctctgaccaaactccataagccctgggaatcccacaggtgatgatacatggcccagactctccctctctgttcatcctctgagccacatacctgagcttctgtccccgcagattgcacatagccgtttgccagccccagggccacctggagggggtggacagtgcaggccccggacccctaagactggtggcttcacatcttcaggggggccagacccacccccagggagtgacactgttgagttaatctgggatgggggaaatagggaagtcacaggaagacttattgggaagcagaatgtcacagaagtgatggaaatcattccctaccactaagcaaggccctgcaatgcacattccagaggctgtcatttacactgcagtctatgtgaaaggccatccctggagcacaaccccaaagtgaataaacaggccccccctgaaattgtgcaacacagtgaccctgaagggcaggtgtcttgggaaagcagatgggatcaaaagggcagaaaatcagatagatgaaaaggacatcaagaatatcagaattagccgggcgtggtggtaggcacctgtaatcccagctactcaggaggctgaggcaggagaattgcttgaacccaggaggcagaggttgcagtgagctgagattgtgccactgcactccagcctgggcaacagagcaagactccatctcaaaaaaaaaaaaaaaaaaaaacacacacacacacacaaaaacaaagaatattagagttcttttaggggaggaagcatgcactgaaagatcagtcacctcaggaaaggcaaggggtctcataaagaccacaggcctgacaaggttagaggattggaaggtcaatgggccatggggaagttcacacaaggatctggggttacaaggaaaacaagaaaatgaaagtggccaggcagtaagttggtcacaacctctcacctgggggctgctgacaggcccggagaatcctgggggagctggagggggcagaccaggggaccccatggaagaactgatgactggaaagggagagcccagtgggggtggtggcatcgggggtgggggtggggccccagagcctccaagggatggagctgttgaagggggtaggggtggcccaggaggagaagggggagggactccctggggaaggggatttggggaggagctgtctgggcttcgggagtctgagggaggggtatgtacaggcacacagacacacaagagacagaagagacaaaaaaagaaaatgagtcttcaaacatccaactagagactttaattctctaataccccaccgtgccggacccagcccactccacccatccccaagttcagagacaccctgctgtcaaacaacagtgtaactccggctggtccgatggtagtgggttatcagaacttattaacatttgtgtcactaaaattggtatacaacctcccactgctatatttgactggctaaaaaaacccaaaaacagcgtaactcctcattgtggtgagaggagggagttgacaaggagaggaggatagttcaggtgaggaaaattttccaaccaatccatttgaatgaataccaggtcatcccaaagccacacctgtctcgtgggtggggcagcacgtggggtagaccatcgagcccctctattcccagcgtaaagccaggtagccagagcgtgcaagggaaagagacaggcaggagagacccctcctaagacgcaggatctgcctgtaaacgcccaaagtcctgaggtttaagaggaatcgtgcccttcccaggcccgcgacctccggtgcccaaggcctcaagcggtcacagctaggagggcggaagctccccttccccgccccgccccgggggggagggtgctaaggccctcgggagggaggggacgcgtgtttacaaacaagggggcgggagcgcaaggaaaagagcaccgggggagggtgtgggggaggggtcgcagataaagcggtcactggctcgcctgcccttctgctggggcactcaccccgcccgctgtcgcccatcccgtcccgtccagcctcccctggctccggctccggggtttgttgttctccgcctgccaccgccgccgccgccgccgctgcgggatccagccagggccgtcgccgccgccaccgggacgcgaccccacaatgcatttcttttcgcacccccaccggcccacactgccctgcggcatgccgctgagggaggaagggcgggcgagcggcccaagacatgatccctggctgagagtagggataccgaagaggtcccagggattcccaaggattgatcggaggattagctgagcacgaggaagcccctgagagaaagactctggcctggattgggtcgaattaagcccgtcgctctgctcagtaccaaaatgacagcgccaatgtggcagccatctttgtacagacgggaagtctcggcgcgagttcccgccccctcgtctagttggaaaccgaggaggcggtctcctccggcctgttagcccgcctcgcccaccctcccctcaaatcacctccacactcgcgcatgcgtgtcagtgcaggatggattcgtcgctaccggagtgccgccatattggtaaaggcattagggcgaaggtggaacggaacttcctgttctcgcgggatctaaaggcgggactgccacgtccaagcaaaccgggaaaggagaggatcccggagccggtgagaattctctgttttttctctaccatcctttccaggccttttcctcacctaatgagtcgtagagacgagggcccagagagtctgtaaagtggctggtgaaagattagtgtcccagggccctacatccgggaggtggttcgggataaagagaactagtcttgggaacaatgtaggtgggaacttaagggaatgggagagcggcccatagaggtggacggagggcgcgattggagtaaagcggaccctgtgtaggtatagagttgagtcaagtggagtcactgcctctgtccctctggtcagcgtgatggccagaggcctgggggccccccactgggtggccgtgggactgctgacctgggcgaccttggggcttctggtggctggactcgggggtcatgacgacctgcacgacgatctgcaagaggacttccatggccacagccacaggcactcacatgaagatttccaccatggccacagccatgcccatggccatggccacactcacgagagcatctggcatggacatacccacgatcacgaccatggacattcacatgaggatttacaccatggccatagccatggctactcccatgagagcctctaccacagaggacatggacatgaccatgagcatagccatggaggctatggggagtctggggctccaggcatcaagcaggacctggatgctgtcactctctgggcttatgtgagtctccaggggatgggagagagaagggctggttctggattgttgggaaactccacagtacttgaccttgactctccctcaccaggcactgggggccacagtgctgatctcagcagctccattttttgtcctcttccttatccccgtggagtcgaactctccccggcatcgctctctacttcagatcttgctcagttttgcttccggtgggctcctgggagatgctttcctgcacctcattcctcatgctcttggtaagtaa

SEQ ID NO: 11341 - DNA, 6000 bp, Homo sapiens
atgactttgtcccagtcatcctcagacatgtgcagcagaaactcatcctgggtgatgcccgcacaggacacaacgacagatggtgggcgagaaaagcaggcctatgggagggggaggttacgcatcaaaaaccccccacaaaaagccggggcagtggaggcaatatcagagctttagagggggaaagtggcctagcgttcacctgcacttgttccagcaggcacctggcggccctggcctcagacacgtcagcctggaaggcagcatggttccctcggggcggcccctccttgctccctggcccgcccagcagccgcaccgtctcctgtgccgctgcccggtccaggtcgcaggcagctacggtggccccctctccggccaggcgtacactgaccgctcggccgatgccgctccccgcacctgaggtaggacagaacacgccggaccgggcacggggaggagagggcagggatcagaggtcacagggcagaaagtaaaatgtgggtaaggggccagaggtcacagcggccgcgcactccaagggcacgcccctgacctcactccaataccccaaaccgcccggggaaagaaccccctcaacctgtgaccaaggccagtgcggagcggagtcggttctggagctgagacgccatggcgggctgtgggtgggtgggaatcccagcactaagccaatcccagcgcagaggggcgtggcaagggcaaagccggggccaatcaaaggcccgccagccttaggccatctgcggccaccagcgcaggccgacctcccaccgagggggcgtggcccgacactgctgcttaggggccccgggtgtggagaagacaaggggccccattccccccaaaaagacaaagactgcatgtggggcggaagatcggaggtctttatttccggttaccacccctccccctcgattcaaacacagtgatataaaaggaatagaaacaaaaaaaatcaggccatgagaataccaactaaccctctcccaccccatccccccaatcactcccaaatcaggacacacgattgatgtttgatgtttatccccgactcctcctgttaccctctctgtccaggactctggtcttccctgaagcctccaccaactggtgggagaaaggaaactggaccttggagaacttcctgtgtagcaacttggttctccgagaacaggtggggtaggggacaccaggtaggctgccatcaccccctgtcccttccagccttcttcatggccccatttagccttccaaatgcaacatggtcagacagtgcccaacactatggtccctctggcctctcattctcaccgctccagcctctgtaagactgccagcccttgaaggccctaatgccaaagtaaccattctcccaggctacagttccttcctttggcagatgtccctggccagggcccccaacctctacgcacccctgacctggagttaggggtagaggtttggggcaggggtagtttatccacccctcactcaaggtgggcaatcagcaccatcatgataactccccccagcagccccagcacctccagaagtgattgcaatggtgatgcctccctcagcagctcgggcaacacagacactgttgctacgtagataaagccacctgcagtaaatggcaggacccagccaggacctgcaccacctgcaatttcactgcccactgctcctccttcagtgagaagggcacaggctgtgcctgccagtgcccctactgctgtcagtagttgcagacgcatcgcctgatgggcagaaaagagaaaaaggcactcaccaatagctaaagattatcagtggtttagaagtggctggtggggtataggtataggggacatggatttggaaactaaacatcaaaataaaaagagaagagggagcagtctagaatagacaatttctgaaaaatcttaagagatcagaggtcctttccacagactttctgattgagtaggcgtgtgtgtgtaagactccactaaaccattcagatggtttatagaccagtttaagaaatactgagctaaaggacaaagtaaccagaacttcttccccctcatttctagaggacttgtcaatgacagtatgaattgtttggaactaataagaggctgtttgggtttagggtgagtgaggagagataaagggtttgaggcagctgtgtttggcagacatcaccaacctgctttttgctgcagccagactggaccaagatggcaaagtctccgacctcgtggggcacttcatgtagcaggacagtcattgtggtcaggatccctagtccccggccccctcgaaaggaagccccaatggccagaccatcagtgaagttgtgtgccaagtcagcagccagattcaggtaccccgacacacgcaggtcttgtacaggacaagaagagaaaatgatcagaggcttccatcaccacttgttccagtcttggtcagctattctcacacctcccctcagagaccactttacacccagtcctttagtgtttctcagatacctgccattacccacagcacatattccatgtgatttgtgatgatgtcccttgcccaaatttatcaccaactctggcccttacctaagcctcttttttcttcttcagcgttctgaggtctcactggcccatctttgggtactgtgctccctcctcgcctcttctgaacccctcttgtttccttttcttcttcctctgagctctgcttctccttggtagaacgctctgagggaagaaaagagttggtcagagtggagaacagatcttccaacatgtcctctccctcctgagggccataagatgaggagattctgaggcaggcaagtcagctttcaggaaagttgttcctgggctcaccttgtcttccatgtccatgacttccacgtgtatgactgtgagcgtgtccatgtccatgactgtgaccatgtcctcctttcacatgtctcacaaatttctccacgacaagaaaggcaacaattccactgagaacccacagtcccacagacagaatggggccctggcctgggaatggaggcattgagacattaagggagatgtgcattccagactcctcctcctcaagtgcgggaggtgaggaatagggagagacggaccttccccagcaccccaactcccatccccatctgtctcttcctcaccactgtgggagtgtccatgtccgggttgctccagagtgtggtgagaatgaggttctggaagaaggggggaaaaccagatgagggaatatctgacacaatgagtgtgtatttgggggaatatcgaaaggtcagggatcataaaggagaaagaacccttttcctccaaagaacgaaataggttagatttgaggtagaagtcagaggttacttaccaagagcatgaggaatgaggtgcaggaaagcatctcccaggagcccaccggaagcaaaactgagcaagatctgaagtagagagcgatgccggggagagttcgactccacggggataaggaagaggacaaaaaatggagctgctgagatcagcactgtggcccccagtgcctggtgagggagagtcaaggtcaagtactgtggagtttcccaacaatccagaaccagcccttctctctcccatcccctggagactcacataagcccagagagtgacagcatccaggtcctgcttgatgcctggagccccagactccccatagcctccatggctatgctcatggtcatgtccatgtcctctgtggtagaggctctcatgggagtagccatggctatggccatggtgtaaatcctcatgtgaatgtccatggtcgtgatcgtgggtatgtccatgccagatgctctcgtgagtgtggccatggccatgggcatggctgtggccatggtggaaatcttcatgtgagtgcctgtggctgtggccatggaagtcctcttgcagatcgtcgtgcaggtcgtcatgacccccgagtccagccaccagaagccccaaggtcgcccaggtcagcagtcccacggccacccagtggggggcccccaggcctctggccatcacgctgaccagagggacagaggcagtgactccacttgactcaactctatacctacacagggtccgctttactccaatcgcgccctccgtccacctctatgggccgctctcccattcccttaagttcccacctacattgttcccaagactagttctctttatcccgaaccacctcccggatgtagggccctgggacactaatctttcaccagccactttacagactctctgggccctcgtctctacgactcattaggtgaggaaaaggcctggaaaggatggtagagaaaaaacagagaattctcaccggctccgggatcctctcctttcccggtttgcttggacgtggcagtcccgcctttagatcccgcgagaacaggaagttccgttccaccttcgccctaatgcctttaccaatatggcggcactccggtagcgacgaatccatcctgcactgacacgcatgcgcgagtgtggaggtgatttgaggggagggtgggcgaggcgggctaacaggccggaggagaccgcctcctcggtttccaactagacgagggggcgggaactcgcgccgagacttcccgtctgtacaaagatggctgccacattggcgctgtcattttggtactgagcagagcgacgggcttaattcgacccaatccaggccagagtctttctctcaggggcttcctcgtgctcagctaatcctccgatcaatccttgggaatccctgggacctcttcggtatccctactctcagccagggatcatgtcttgggccgctcgcccgcccttcctccctcagcggcatgccgcagggcagtgtgggccggtgggggtgcgaaaagaaatgcattgtggggtcgcgtcccggtggcggcggcgacggccctggctggatcccgcagcggcggcggcggcggcggtggcaggcggagaacaacaaaccccggagccggagccaggggaggctggacgggacgggatgggcgacagcgggcggggtgagtgccccagcagaagggcaggcgagccagtgaccgctttatctgcgacccctcccccacaccctcccccggtgctcttttccttgcgctcccgcccccttgtttgtaaacacgcgtcccctccctcccgagggccttagcaccctcccccccggggcggggcggggaaggggagcttccgccctcctagctgtgaccgcttgaggccttgggcaccggaggtcgcgggcctgggaagggcacgattcctcttaaacctcaggactttgggcgtttacaggcagatcctgcgtcttaggaggggtctctcctgcctgtctctttcccttgcacgctctggctacctggctttacgctgggaatagaggggctcgatggtctaccccacgtgctgccccacccacgagacaggtgtggctttgggatgacctggtattcattcaaatggattggttggaaaattttcctcacctgaactatcctcctctccttgtcaactccctcctctcaccacaatgaggagttacgctgtttttgggtttttttagccagtcaaatatagcagtgggaggttgtataccaattttagtgacacaaatgttaataagttctgataacccactaccatcggaccagccggagttacactgttgtttgacagcagggtgtctctgaacttggggatgggtggagtgggctgggtccggcacggtggggtattagagaattaaagtctctagttggatgtttgaagactcattttctttttttgtctcttctgtctcttgtgtgtctgtgtgcctgtacatacccctccctcagactcccgaagcccagacagctcctccccaaatccccttccccagggagtccctcccccttctcctcctgggccacccctacccccttcaacagct

SEQ ID NO: 11342 - DNA, 6000 bp, Homo sapiens
ataagttgacttctgcttacatcttcgaccacatcctcacaaaactctttgttccagtcaaactgattcacttcagttcctcagacaccatgatctttcatgcttccccaccttgaacatgctgttccctttggctggaatgcctgtctcttctcctgcctcacacagctcagtgtcaccttttggagggctgcctgaacccctccaggcctgtgctttccttacacttttatcttgatcagcgggtctcgaagtatagaaatgcaaattattagacttcaccccagatctactgaatcagaaattctgggcattaggtccagcaatctgtttttctttttctcactctgtcactcaggctggttttgaactcctggactcacgcgatcctcctgcctcagccttccaaactgttgggattacaggtgtgagccatcgtggctggctagcaatctgtatttcaacaagccctctggtgagtctgatgtgcgcctgaatttaagaaccactgatcttgacaacacactatgtgttgactggcgtttttgtttccctccttaggctgtaagcagcttaaggacagggactctgtcttatctccagtgccaggacaataggagatggagtaggtgctcaataaacacttgctgaacagattctaaggctgtatacccacccatagagccacagttaatgacagagatggcggttctgatcacaaattagatagttatcctcttgagtagaagtgactactaaaagaagtcactgagaaagtaacgaacacaccaagcctaatggtaaccgactctgaatagatacatgcaatacatagccataatgaaggcagagtaacaataatcaggaagaggtcatctcacaagagaaatgtaccgaatgggatcaagatgccacagggaaagatgctgctctcatcaaatgtgtgccaacagtgcaaagaatggaggataatgtccataaataaataccaacaatggggttcacagcaggattgaccctgtgacatgcattgagctcatggacacagactgtacacagccactggaaagataatgtttgtgtagagaggtatgggccagggaggtcaccaaggtaaggcatgcagggatggttctttgcagacctggagacccagttaccttcttctcttaacacttgatattaagtgaccctctttggagaacaaaagtccaaggatttagaaatgcaatggagggccaaatttaatgagcatacggctcacaaaatatactgatgacaaatttataacacacattctatggtcctgttacatcagtgtatcatgcaaaggcgcatacacatgtgttctgtgaactgtgactgggaaaacacagcaaacaggccaattcagtcagacatcagagtgtggggtattcagccaagccatgggatcccacacatgaagactactgcaaatggtaggaccatggacatgtcagccaaagcaaaataaggtatataaccttcacatgctgaaataaacatgccaaaacataaaatgtgcaagtaacatgaaattatagaacaggtgcaatatatgaaaactcacacacatgcggtacttaaaacatgtcaaaactggatgtgagacatggacacaagaatgaagaatgggcaattctgatagaaaataacacaccatttctacacagcctatggatagcattgggacaacctagttgcacacaagccattaaacatgtcaaaggcacacagactcaatgtagaaaacatggctcccataaggcatttgtgtgtcagtaagggtctagcagtgtggaaggccactgagaaacaagaggtcctgtgcctagatggaaacagaggcacctaagggtattcctaagaggcaaattctgctggccttctcccctcatgacccttcaagagtcatgtggggtcaaagggcaagaaaaggaattggggaaggtgtagggaattccctctccaggattccctgtgcacgctcccagtcccaaattcacaagggtttccatttctcctccctcccaggtctcttccatccttcctccctctcaggtcccctctcctatccccagcaaccctcttcccagtcggcccctctcctttccccagcaaccctctcccccagtcggccctcccagacccaatctctccccttcccctcatcctagtcgctttcagcaccctcttccctcctcctcccatccctttcccgcccacacctcagaggggtagggggcctggggggctggccccctccccagccaggctgcggcagcggtggtggcggatggctgtgtctctgtctctgtcggggtgtcggtgccaagggggcgacgggatttgggggtgtcctagccccggccgatggaggggaggtgggagtgggaggttgggcccatagcggtaggaatggtggggggctgtccccccagcaccctccctccctccctttctgctgtctctctgagggctggggctgctgccgccgctattcccccgccacccctccccaacgcctgctggtttccggggccggccaggaagtggagggcggtgatgggcagcctgttttgccaatcgtctcccagaaactctggcatctcctccccacatctaccagtgtcctcttgcgagccccgccccagggctctccctcggtctttgcccccatctctggctccagctgcatcttttttttctctaactccctttcagctctggatcccctggtgctgtattcctccttccgcacattccttcctttattctccatcagctctcttttaactgccacttttacttggtctctttttttctcaactccggttatctgctgcttattccccccaactattcttaaggaccccttttcccgtacccattcaattctaaacatttatcaagcatctacctaccatatgacaagcattaagttcacctctcttctttttctctccaggactccatctcactccatctcactctccagtcctctggtctggtttcctttgccctttgtccctcactatctcccagcagtccagctcccccctccacctgccttctctggcctttaaagagaagagatctctttggccttatccctgaccctttccttttccatgctcttttacctctgtaccttttctttcctacttccttcgtatcagtctccttacttgcccaagctgagacaaccccttctcacaacatacaatatgggtacatcttttcttccaatggaaatttggcttcaggggtgctttctagaaaaataaaaagtgaggaagaatgccgattcctctggaatgcgcgtgcctccttaatttggtagccatgtatctagttttccaccccctcttctcttcctccactcccattatccctttactaggatcattccatcacttcactctccttcatttccacctttccctctcaatatcttccttcctaaacctcaagcttcctgaatcctcatctgccccagtccttctttacgcaactgctaacttctcatctttccttactcttgagtcacatgggatcttttatcaaggtcccccctctagccacacctttaccctgcattagtttacatgccctcgggaagaggattggtagtgggaggactgttacctaattctgctcctttagtcacagtgagggtcagtgattgtaggaaaagcccaaactccccggggtccaacctgggaagaagaccctatttctgatgggcaaattataaagaggaaagggcgggtctagcctccgcgggtctccttaaaaggggcgggctttgtcccttttgcaccactcacaaaggggttgagcccagagctttcctgctctgaaggtttaaaacggagttgaagtcaatcctgttctactctgtgtacaacattaagaaaggggtgggcctttagttcagttttgctctgtaaatcacctaatatggggagggctgagtcgtccagccgaatgagttgggttaacaccagcgccgcagatcgatgttcccactatccaaacgtcgggctaatcccagttctgctcccttaactaaaagggaggggcagacccaagttctgctctctacgtcaccaaaggaggttggagccattttgaaccctgcgaccctagtgttttccctcttttcctagctcttcgccgtctttcccgatgtcggccaatcaggggaaaaggaaaaggcccaatcagcagaaagtccacagctgaaggacccggatgaagcgagcctaggactttgaagtgcaagcctcgccaattgtagagcagtcaccatggcgacaagataggggtgaagaggtggaaaaagagaaggttaaaccctcacaggattggcccacccccgtcccgccgcgtgctgcgcaggcgcgttttacctaaccaccattttccgtcaagttttagccaatgagttgatttggagccatacgctccaaagtccaatagcaatccggacattctctaaaagaggaagcgaaggaaagaaaggggcttatagtgggcgaggtctataggtagtcccgagcaaattgcttatggctttggttatgactgacaactactcagacgaataaagccctccttggccaggcgacagcgtgtagcgagttattaccaatcccttggcattgcacattgacttagaccgtatcagccaatagccattgtgcgaaggcaggactgcactaaccttttcccgcccctaccctttgggccaatcctttcttttgaattctttgtgactggcaggcattcagaccaatagtgattaggaaaccttgaagcctgcccaacgatcgtgggcaggaggtggtttctggtttgttggggcgtgtgtatgtgtatttggggggactgaagggtacgtggggcgaaacaaaaccggccatggcagcagcggaggaggaggacgggggccccgaagggccaaatcgcgagcggggcggggcgggcgcgaccttcgaatgtaatatatgtttggagactgctcgggaagctgtggtcagtgtgtgtggccacctgtactggtgagaatcgaggaggggggcgggaggtggtgggtctcgcttatatactggagaggctaggagcgaataatcatacagtcatacagataatcggagggcacgttcccataggtgaagcccgacaggagacataagactttgctggtatgtgtgggtgggagtataacggtcgagatctgtggaaagaaaggtcttaggaaccaggagctgaggcacgtgatgtgctgagaagagaaggtggggcggggagtggcaggacaatgtgagacccgagccaccttaccccagagaagtgaggggtcttagctgtgcaggtggaaacaagtgagacacaaaggttaagggaggcacgcatcagttgagtcggggagaaccaggaaatatggatcacattcagatgagatctgggagggggctggtataagggcactgtggagaggcagacttgaaaggttaaagggtcataaagatagggacattattgagcttgaaagtgagtaatgggggaatgtgctagtaaaggggtttggtttggagtgatggggttggggttgaaaagaggagacccagaaagaggtggctgaaggaaattagaaattaacttgaaaggcagaaaagagagggcacgaaaatttgtatgtgtttgttggggagaggagaaaggagagggttgagtgtgttgaggatggacagagctttaggtgttggaagatcagacaagcaggaaggctaactaagttggctggcatggtagaggttgcagaaaatctgaaaagcaacagcaggttgcttgggaagaggggttagatgggattctgcgaagtctagggtctgtgtctctcttttctgtagctagtttgacctttttttttttttctcccccatccagttggccatgtcttcatcaggtgcg

SEQ ID NO: 11343 - DNA, 6000 bp, Homo sapiens
aaaaagaccaatcatttgcccagggttatagtgctagtaataatcttagggtctgtccttccaaaatccatgcctttaaccagtaccctagacttgaacgaggagcagcacaattagtcagaaagagcactggctttgcagccagaagccttcccactaattagctgtgcaaccctaggtgactaacctcaccaagcctctgtcacttcgtctttgatgtgggaataatcatttctaccctgcctttctccaggggctaaagactgtatcaacacctgttgctgagttctagtaagttcatttctcttggacaaactttcttgtccatctgttcaaggtcaggaatgagagctgggatgagagaagaattgcagacaggggagggctaaaactaaatgactaagttattcactctttttgtcacacattttatttgcttttgtgtaactggggaaacgcaattctaatgtttgacaatgaagtttactaatattaaaagctatctagacatgatagccaggtgcggtggctcatgcctataatctcagcactttgggaggccaaagcaggagatcgcttgagcccaggatcatagtgagcaacatagtgagacccctatgtctctacaaaaaatacaaaacttggctgggtgtggtggtgcatgcctacagttccagttactaaggagactgagaagggaggattgcttgagcctcggcggtcaaggctacagtgagccatgattgtgccactgcactccagcctggacaacacagtgagactctgtctccaataaaaagctatctagacatgatggccaggtgcagtggctcacacctataatcccagcactttgggaggccaaggcgggaggatcacttgaggccagaagttcaagaccagcctggggaacataggcagactccatctctataaaaaattaaaaataaatttttaaaaaagctatctagacatgaaattaaacaatcaaaatagaggaccacataactagaggaaggcaggagaaaggcaggccaggggcaggcagtactggcatttcctctggatctcgcttagggattggcctgttggtattttcttcctctgtatggggttaacttgttctttggtctctagcaaattaatttggtcaaattggttatttaatttatgaataaagaatttgaaagcaatacagtgacaaatattctcagctaaaccataatattctgtagctcgaatagcctctgatttttccaaacagaggcatcatactaggatgggcctcttgttttcttgaaatgtcaaattgcctagttgaagcaacaaccatggagagcaaacacacacacatatacacacatacgctcccacagagctgatataaaaaagatgctgcaaatagcagctaataaaatcccggcgcacacatttattcctacagtcatcagttaacataacactgacacagagaaagatccttaacaacctgctagtgaggacttttgggaactcttgaaaaaacacacgcagagatcaagaaacgaaaatgaatttatgatggtttggttagaagctatgtttgaatgaagaaaataaaagatgttaagtaataactggggggatccctaagcatacagtggggacttgggtatatacagaaaatgaaatattcatcatcctccatggagcacacttgtggctgaagctctgcaacagaatcacaaaattaacccattttctccacagttaaaatcgctaaaaagagcaaaagtgccaatttggatctgttcaagattttttttaaaaaactgtaggaacacagttaatactctgcaactagaggaccacctgtaactaaattcaccattagagagatggcatttctgttaaaccacatggcatcacgcttccagtgccagtgttcatcctaacagataacgtaaactcatggggaacctctatgccccttcttccagtttccaaggtctgtaaggacaagaggctgctctcaatgggggcccatgggagcaacagcagcatgagtagagtgtgtctccctgccactctgaatgcctgttcacacccttcccctcccgtccacaggtctccccactgactctacctactagtgtcaaacagacacagaacctaaacatcaagggggacccgggaactgcacataccatcggaaatggggaagaggagttgtgtgtgagaaggactggggaaggggaattcgcttaaatcagagatccttctcatcgcctggtctaactcagtcctcttaaaactgctaatcagcgcacagtgtccagatacaaaacgtttctcctgagagtcagagggctttgagcgacaagtattacgttgtcaagagatcattcatttccaattgagacagcatttggaagagcaaaagccaggcacaaaattagagcctattaatcctaatcagaaacaaaagtaaataaattcaaaaggttttaattgagcctacccaacaggaggaggcggagactgaaggagtatcaagcccaataataaccaggatttgggaagcccaaagaagagctccctataaatatattgctttctttaaattctgaggggaaaaaagtaactccacctttcattgaacataggataccagaaattacataaggagttgcattccaaatgttggatgcaaaaaaagcaaccaaaattgattggaatgtggtttaactgctttatctaatcactgctaataaataagaagacctttcattagttggcaggaggacagttgctactggccaatttgattttcctgaaaacggtgaagacttgcatgcgctttttatccccccagatataatccctgaagtccagactgtttctggaatcggaagttgtcacgtagtgtcatcctcttccttaacagacctaaggtctcctttcacatgttcccaaattgtttgttttggacaccttttattgcaacctttttgaaagtgaagagtttagaaacctcatggcaaataagaaattgttaatccagagtgagcatgtaggaggctggagaatgcaatgatctatccagggcacactaggcagccgacactttgaaacctgaaatagccaagattcctcaattattcgtcgaagttacatgggagattcagtcaactgagcttaagaagatgccctatatgttgtcagcaagggggaaaaagtcagttccatgtatccctgacttaggaatctatcgcaccccaccttcccacggcaggctacatctgggctgatttgctgggtccccaaactcggtagagagcgccccaaggatcagggaccggcggccccacctgctgggtcccatccgccacctggattggcaaggcctggccccccttgcaagtggaccccttccctccctgctcccagaagcccagcccagaacggcgttctttccgggggcccaaaagcaatcagacctttaaaagaaaaaagagggagcgcagactggcattatataacaatttacagtagataagacttctagaaaacgaaagcagcccgaggaggggcgggggacaggggagaccaggggagtgcggcgtcgggggagcggtcgccaccacttactcgaaggcgaagaagagtccgctagtgaccaggatgaggacgagcgtcaggtagaagacgcccgtctgccgggccatcatgatcctcccgttacagaagaacttgtttcttcccgggaacacctcccatttcctccgggccgcgattttcttcttcttgtggggcgactccatgggggaggagctgtgggtgctgatctggctgtactcgcagtctttcatgggcccgccgccgccgggaggcatccacgagggcagccggctgggggcgcacacccccaggagccccccggccgcgcgggccccgccgagccacgaccgccgccggccgcccggccgccccccgagccgcggcgccgcggcccctacacgggctcccggctcggcgacaactttgccgaggacacccaggttaaccctccggggagcccaactgtcatagcagaatccccgctccgtgaggggacggcgctggtccgcagcccgcggcagcactcctccgtcgcttccagcccgcgtcccggggcgcggggctcagcccggccggcccccgggtcgccgagcgcccgccccctcgcgcggctgcccgctcggccccgcagcccccggctccccggccgcgcctcggctctggcccgccgacccccgagcactgcgccccgaggggacacgaggcggcggccccggcgccggcttcctcgggagccacttctgcggcgcggccaggttgggtccactccttcctccggcagcggatcctcccaggagagagcgctggcgactgggcggccgcgcgcggcaccggcaacccctcccaggggtggggacaaccacgcacgtttttctgtcaggagcctctcggcgagagccggggcgccgctcgcaccgcgacccggtgtcgctgcgcctggcagcctagtcgaatccgcggcccccgcgcggggatgcgcgggccgagggcggcggcggctcgcgggccgcgcggcgagggctcccttgctccctcctacccggaggaagcggccccggcgcgaggagggccgcggggacacagcacagacacttgtttgcaaggctcagcccggcgcgcgcgcggcgctccgagtgggtccgcctcctccgggccgggtgggcggtggcctcgcgcctcacccgcggctcctcctcctgctcctcctcctcctcgcccgcgaagccagggcaccggcgcagcgagattccagccccagccccctcgggcgggcgccctggggtgtggaaggcgcggggctccctgtggcatcgcccaagtagggatggggtcgggcgcccgcggccccgccgcgcagtgcgctcctggccgacttcagtccgtctcgcggcttcttccgggtttatcccgcgcagcagctgccgcctcgggacacgctcattcccacggccaccggcaagccactcctggcgactccccgggacctgaggagccgcggcgcggaggtgaccctccccggcctgcgcctcccttcttcctcctccccagctgggcgcgtggtcgcgtcgcccggggactctggtgatgcccgagaaatgggctgggggtgccgggtgccaggatggggtggggcggccctaggccggcctgacttcgggaccgggctgcgggcgagggtctcggggcccggctcggccggcttccgggccgagaaagaagggcagaggaagcggtcagggtcccctccggccccggcctccctcccggagtataagcccttggaggccaggttttgggttgctgccgcccagctctttcggtctccacttctccccacggacgtttacagctgctcgctttatttctccctccattcccccgtggagccccctcggcagcggaggggtcgcgtgcttctcctctcccgcctgcgcctccccccttcccacccgacagcccaggaggagctgcgggcgcggccctgggacggccggagcctggggcttctgctcgctcgcgccctcccaggcgttgccgcgggtccgagcccccgcagaggtgggcatagccccggggccgcagaaaacgaaggcagctgggcagggatgctcaatttcccgagccccactttcctttcacagcccactgggatgtgtagttcttccgcccgcaggcctgcgccgaggagaagcacgactcggggccttagaaactacaagtccctgcatcccccgcgacaagggcaggagaggcgtggtgctgggcgttctggggctaggtggtgggagatgggaaccaacaaagggggttgtggggaacggtgccttctctgtactgggcagtttgcacgttacacatgttctttgtctaatcttcgccggaacccggtgaggcattatt

SEQ ID NO: 11344 - DNA, 6000 bp, Homo sapiens
gaaaaagggctgaggaaggaatggagagaatgtggagcccagtgattcagcgagagatatacattttccaagagacaggaagtaaaaaagttaaaacaaagagtctacaaaagaggagatctgtagaaaaggcaaaaatggtggaaagggggctcaaggggtggaggaaagagattttgaaatattttcaagtaaaaatatgagaatattagacaacaaacaatataaaataaaaaagagaataagaatcagatttcagacacagtagactgaagagctggtggaattactaacagcaaaagagaacagagaagagagtctgaaagatgagtagctttctttttgtaatgctgggtttaaggtggcagtgaggttctcactagtggaaagggtgtaagagctttaagaggtaaacttggaagttgtgtacaatctagagctctttgtccaatacggtagcctctaaccacaggtggccactgagccgctgaaatacggctagcctgaactgagatgcactctaagcataaaatacacactagattttgaagattttctatgaaaaaaaacaatggaaaaatctttttctgcattgattacatgttgaaatatttgcatggattgggttaaataacattattaaaactaatttcacttgtctctgtactttttaaatatgattagtagaaaactgaaaattacatatgcgatttatgttatatttctattggacagcaatattagttgtatattaagaccacaaaagggacagagacatcattctgaagtgtctcaactaaaatagatatgggagaaaaaagaacacacatcattataatagttaatatttactaagcactccaagcactgttttagacacataaagggcaccatcatatttgttcctcccgaaaaccttatgaaatattatcatcttttacaggataaaatactgaagcccaaggtcacacagttaaatgctggtgtcaggattcaagcccacgaatgacctcagatctcaggttctaaactgtcacataaatttcagaacaagttatgctctccaattattaaatggttagatttaaaatgtcataaattaactatttattagaattgttcattgtcaaagtcagttatgtcccaattcaattaagaagaaaagctacaaatgcgtgaatctgtaactgtagaattactatgagctactgatgctggcgtattttcaccacattgggccattaaagaagtttctggtgcaacttctttccccttatcaatgtctactcccagaaatgcaaacctgtcaagttagatgatacatatccaactgtccaacccagacgatcatccacctaaccctgaatagcagggccctgttttctgaacataactagatacataatatctacttgacacattttcaacattctctttcggaacatgaaagcacctgaacctcccaaactgactaaaacgttttgaaggaaactagattaaatggaacccttgttgaagaaccaaaaattaggcttacccaactggatactttaaaaattgattttttactccttgaaaatgctatacgttcgaagaatcgaaagagaaaaaggctggatactttggaatcctaggaatcctaacagtaaaatatcctacaaatagaaacttaagtcaataaggtatctttcattcatctttggttggttcattggttttaatttcaaagacaaacttatatttctttcctttttacctttaatttctactacctacctgggaaagatggtaaccacagaactgctgaacttacatagtcatagctataattacataattttcaaaaacttatgtaaattttattaaacaatttgtttccaattaatacatttctccagactaatttttaaaaaaccaatgccataaatccacattatagaaaaacaaaaggaaatttgaaagaaaaaatatttattttggaataataagactaactagcagagatatcttacaagacagttcatattggacatgtattgaaaaggatgtctctctgaactgacccactaagttatttataaattcaaccccctaactttcctactccctgcccattttttttttaaagtaatacgatttcagccgggcatggtggctcatgccttgtaattccagcactttgggaagccgaggtgggtgttgatcacttgaggtcaggagttagagaccaaactggacaacatggtgaaactctgtctctaccaaaaatacacagattggcctggtgtggtgacgtgcgcctgtaatcccagctactcaggaggctgaggcacgagaatcacttgagcccaggaggtggaggttgcagtgagccaagattgcatcactgcatgccagcctgggtgacagagtgagaccctgccacaaaaaaagaaagaagaaaaaagtaatacaatttggatttgggtattaaaaaaaaattcctctgaagacccacagtttctgagaaatacttatctaaacaggaagcatcacacttgggcaggataaagctttcaagagcttgcccttgattttagctcttttaggttaacattcccatgactttcctattcagctaaagagatttccttggacttattcccttactcactacaattcctacctatactttaggacaaagcttcagagcccaaaaggagagccagttggtcctaaaaatgctttgtccactctgatgccaaggtgcaaagagcatgaagcgacagacaaggcataagagatagccgcctagactcgtcattgaaggctgccaaaatcgggtccctcctgtcgggagtatctccctcctcccaaacttcacttgagactctcatcattacaaatgtcaactgcataatctttgcagttactccccacctgtgcattaacataaagcagcttgctttattgggttaattcaaaagagttatcaagtacctactgtgcgccaggcactgctgtaggtactagaaatctagcaagcaatgaacgaaatgacaaaaatctgtgtcttcctgaaacctatattctggtagaggagacgttcaagaaacaagctaaagaaacaaaatatgcagtacgctaactaatacatgctcaagagaagacaaatgaagcaggcaaggggaatatacactgtggtgggcggggtaggaaaggttggaattttaagattaagtggtcacacataatcaggcagatggtacgtgcctaaaagggtagccagagcaaaatcagatggagtggggaagagaaaggaagtgcgcttattttaacaagtcctgaagtggagagaaaaccctacgggaagggggtgaggcaaacactgaatatggaccactgaagacaaacgcggatttcacattttgcctaaagaccagtcctttgaggatggcacaacagatgttctccctttgtaaccaaagaaccaggctctgctactaaaactgtcaggcagttcatcggacacgggtgaacacacacacacacacacacacacacacagcttactgtcaggcagttcatcggacacgggtgaacacacacacacacacacacagcttactgccgaggagaaagaagcgttactaatccagagtggaggactggcctgggaaatcgggcagagagaggagttgtcggaaagaacacaccagaagcccctccgagcccagacactgatagaaacccagccgcttcccaagccaatctgcaaacccaggaggcacccacgagtgcacagacacacccccggggtgcaggcgcggtgaagggaggagaggggcaagagcttgaccgttagggcccgaaccccagaactcccgaggcagggtgtgtgccgcgcgcgggaaacgccgttctccgctccaggcgtcggcgggcggtggcgagagcaggttcgggggtccggagggtcggagggtgggctgcgcgcgggaatggccgccgcgaaggaggggcggcttcctcgggcatcccgggcgcccggccccgtgcatgcaacaggggactgggcgcgagcgggcgcctcgaggtgccggggcgggaccggggagaggggaccgagacaaagttcccgagacccgcgggcctcgggccgacccgcgcgcccccggcccaaacgctcagctcccgctccccaggcccgcgcggacccggcccctccgagggtagcgggttccagcggcgaacccgcagcgcccgcgccggcgcccgctcggccctttcccgcccggtgcgtgggtccaggagagaaagaaagcgcggcggtgtcggtggcggcgcgcggccccactcaccatgatccgcagcggctgtggcgcggcgacccgggcgggcggcgatgcgctgtccagggtagccgggtccctctgcccggcgctatctcggcgcccgcgccggttacccccacccacacccacgcccggcgcgcgcacacccgcccgcgcctccccgccccctcgggctcgcgccgccgccgcgcggcgctccgagcctcggggccgtttcgtccccgccccctctcccacaggggcctcgccggccgccgcgccaggagggcgcgcgggggaggggcgcagggcaagtgaggcggcgccccccgcccctgcggcctcgcgcgccccctcctgggcgaccgacctcgccctcgcgtccgcggcgtcccctgccggccgggcggcgatttgcaggtccagccggcgccggtttcgcgcggcggctcaacgtccacggagccccaggaatacccacccgctgcccagatcggcagccgctgctgcggggagaagcagtatcgtgcagggcgggcacgctggtcttgcttacagttgggcttcggtgggtttgaagcacacattagggggaaatggctctgttcctgcaggtttgcgcagtctgggtttcttaggtttagggggttgggtgggtttctctgggggtgcggtgggaagcggatcagttcggataacggccctgagcaagagtctctgtcccgctcccggcctgacgcggggcttccagcggacacgaccaacggtgagcgcaccctcttcactgtgaacagaacggtggcctcctagagcctgcgcttctagttactttagttgtgtgtgtggcccaagtgaaagacgtcgaaaaaattggacttgcctgagtattacatgaactttcttccatttctccctcaagcatgggaagttggcgggcgtggtggttccctcctgtaatcccagcactttgggaggctgaggcaggcgaatcacttgaggtcaggagttcgggaccagcctgggcaacatggcgaaaccccgcctcttaaataaaaaatacaaaaattagctgggtgtggtggcctgcgcctgtgatcccagccactcgggaggctgaggtgaaggatggcttgagccctggaggtggaggctgcagtgagccgagatcacgccactgcactccagcctgggcgacagaatgagaccctgtctcaaaaaaaaaaaaaaaaaaaaaaaatgtttaccacatgtgaggctcatgtggtaaacatgtttattggggttgagagcagcccgtgtggctgtgcacggaggtacctgcaccatacacttagcatcccacacctggggcggtgtgggagcccttgcagagttttgtgcagtagcagagtgagtaactgtaggtaccggggctaaatcttaactgtcatacaatcacctaatatatagtttcctaatagagagtttttcttcctaatatagaatttctgtagctgaagtggtaaatattaggcatatatttgtttataaaaggcggatgattttatgaccataaacaggttaacctagtctgataaaaatctcaggagtcagctctgccacatactgggtgtgtggtattgggttggttacctaaactgtctatgctccagtttcctgatttacgaatttgggataaaatagcact

SEQ ID NO: 11345 - DNA, 6000 bp, Homo sapiens
tcggcaggctcaataggcagacaggagaatgaaccagagaccccatggagtctgactcaatgcacatcatgcaagtcacagttatcttcaccaccatcaccactatcaccttgtctggggagcattttactcttcacaaaaggctttcattcatgtgatgtcagctaatacatgaagagccttataaagaaggttatatcactccatttttgaaaaatgaggaaacaaccagtcgggcgcagtggctcatgcctgcaattccagcactttgggaggccgaagtgggcggatcacaaggtcaggagattgagaccatcctggctaacacggagaaacctcgtctctactaaaaatacaaaaaaaaaaaaaaaattagccgggcgtggtggcgggtgcctgtagtcccagctactcaggaggctgaggcgggagaacggcgtgaacccgggaggcggagcttgcagtgagcccagatcgcgccactgcactccagcctgggcgacaaagcgagactccagctcaaaaataataataataagtaaaaataaacaaacaaacaaacaaataaataaataaagaggaaacagtctcagagaaggtaaatttgttgtcatgatcacaagacaagtaaattgcatcatcaagccaggatcttcggatcactggcgtagctctctttccagtgcatcacagatgtccctcatccctggcttccactattcccatcactctcactaacaaatctacaaggtaccagcatgaagcagtcccaggtgcaagaatttatggcgccctgcacttcccctgagaggcaaaggaaggccctaggactggaagacacgcatctctccaatccacatggttgggtggattttatgtaccatactgaaaggaagccacctagcatctttaaagagagggagggggctagggacactgagtagagtcattgagcctcaggttgctaggacgaaaatactgaaccaaccatttcccagtaaaggaggagtgggagcagggtcataggaatgggaatggagtcacggcatcttaaggacaagggaatgggtattcatcttcaggtgctcacactagtggtccaggagttgactgcataggccacagcctccttctggttgagtgtctttatttcttgcagcttttccctaaacttctgggcttcgccctcctcgttggcaaagcttcgaactgtaggcatggccgacagagcctcaatggccacctggctggactttgccagagattcccgcacctgcacttccagcaactgtggatacatggacaagagatgtcacacgggttggcaaaccatcagggacactaatacctgagttacctatttggaaattaaaggtgagaagagacagaggaaaaggagaaaagagaaagagacacagctatgccccttggatgctaaagaaatacgaggaagaggaaaatgactcagaacgggttggggatcaaattcttaaagacagattgtggggagaagctagaaaagaagacccagagagtatggaggttaatgttgagcaacctgggaacatggaccacagggacagggtgttccatgaagatggagaatcagtaagggtgccaggaaagctggactgaaagcaatgtgagaggaactgagtctgccaagtctgggagatgagggtctgtgtagagcgggccaactccatgaacatacctggtaccattttcccaccttcttgggcagaaggaaaagcagaggcagggtgatcagggtgaccatggtgagggacactgatccccagagcatgatccccaagagacataggcctcgcaccaggtaccacagaaataagctcagattctcactcagagaatcactcagggtggacgtgtcctctgttacccgagacatgatgttacctgcagggttggggagaagagagtgaggtgaatcagacaggttccaagtgatgagacgaactaacaatgagccaggatgccagggtcaggggtgtcaacatggggttctaaggaggctgcaggaaacaaggttagggttctccagaggtctgcaaatctcagtgcagggaagatgagtgttaaagaggaaaggcctgaccttcattttaattataaagtcattaatgcacatgtgaatttccattttcctgaaagctttctgttccctagagaacctgtatgtcccatgctatacacacaggcaggaagagcttaaactggtcacataacagagatggaggaggagggtgctgctaggaagcatgccaaagtctgtggagcactcactgggactagggttctaaccccaggtctatctctagccatatgtaactgtacagcttctagtgctgctagaaagcatgccgaagtctgtggagcactcaagagaccagggttctaaccccaagtgtgtctctagccatatgtaactgtgcagtttcagcatttagggtcttggcctcagtttccttctctgtcagatgaggcagttggtctctatgagctcaaaatttccaggtttgaaattctatggtttctatctaaggatacataggaatagatttataagaaaatgctagatgaaaactctaggtttttcttaaggtaaggaggacaatattttgctcctgaggtatatcaagaatgagaaaaacaattgtgtgtgtgtgtgtgtgagagagagagagagagagacagagacagagagagagagacagggagagggtatatcaagaatgagaaggaacaatgtgtgtatgtgtgtgtgagagagagagagcggggaggggggagatcaaagcagatgtatgaggatatgaacagtacatggcgtataatgaaagagtttcaggagaaacctgtctggttctgttggaaaaactccgtctcctggcgcaggacagccccaaacacctctccctgcaagtggctgtgcacgtggcccatggtgttgttatagatcccgtcacccacgaactccagcactgcactataaagaacccggaaaaaaaggggatcagggtgtgttcagggaacagactgaaggtcccaggtatccccatataagtgcatttcggacagcagccccaacttccaactccctcatttgcagggtgccccattttcagcccccagacctggctatggtgagaatggacatgagagttaagtttcgagtgaaggtatcggctgagccatcttgtagaatccagtcagtgaggcggcccgtaaagaatggaatggccatctcccctggagaaagagaagagaggtcacgcacaaatattaagtctaagtaggtcagttccagtcagactggccccaccacgcctcctccccctcaccattatcctggagggcatcagcagaaaggaaacactgacgtctcaatcccgaacctaaataggctgccctggaactcactaccctgtggttgctctaccagaactttcaggattttattaggaaggctggagatcatgaagtagaaaagcctcctgttagagatgaggatgccccgcccttcggccccagagcaaaggatttccccgcttccggcgtggcccaaagaatcaagacccggtcagcaatggagcccagaacctctggcccccgccagtccagtgccgtttcttctacaccgaagtggtgttccaagacccacgctaggagtccttctcctgctccacatttcccagaacccacgctactctaccttactgacaattacctttgattcctgtcccagtccccttgtgtcctcccctcttgccctgcgttccccttaccaagagaggagaggaccaccaggaccaggaacagcgagaggcggcgcgtctccgagcccaggcagcctagaagccgacgcacagggtttccagagccgccctgaccgccgggcacccagaggctcccgagtttgtgccacagggctgctgcgggcagtgccgctgcataactgacaacgaaggcggtagggtgacttccccagtgcagtagcctggtgctatccgcggacccgggggctccccatgagatcagctctcggaacaaggcaagtcccggcagggccaagcccagtgccgcagctaatggcttcaaagcagccagccagccctgggcacctgcgttttcgctcttggagccaaccgttgccctgaggaccccgcaggcccccagccagagcacggcccagcggctcaggcccaccgcccagacccggagcagtggcagcgcggtgggcaccagcagggagaatatgcggggcagcgcggtccggagcagcacccagtcggcgagaagtagcagtactgtccccagccatgcgagagaagctccggggaggcagcggcacccgcggggagcgggacacctagagctagccattggcactcggacgccgtcccggtcccggccgggcctgggactctccgcgccccggtggggcctgaagctccgggtaccgccgagtcctcccctactggcggctgggggagggaacgagggcggggctctcggaaagtcccaggaacaggctgatcctgcgctggcgagaagctcagccatttaggggaaagcgaaatcgaaagcggccgcctgctcactagataacgcctacttccaaaagtggcctgcccagactattttggtagcaagcgtggaaatcagatctgagaatctcgggagcagccctggtgcccaattttctccatcacgcacacccttctcgcctctccctgcctcctgcctttccacttgcaccagttttcccaccccagcctcagggcggggctgcctcgtcacttgtctcggggcagatctgccctacacacgttagcgccgcgcgcaaagcagccccgcagcacccaggcgcctcctggcggcgccgcgaaggggcggggctgtcggctgcgcgttgtgcgctgtcccaggttggaaaccagtgccccaggcggcgaggagagcggtgccttgcagggatgctgcgggcgggagcaccaaccggggacttaccccgggcgggagaagtccacaccggggtaatgggtctgggcttgagggttggcagaggggtggaggagatgcagcggccaggggaccctggaagcgcgcgcggagaagtgaatgcagagaccaacgggagcgcagggaggtcgcctgtagcagccagcgcttgcaacccgcaatgagcatagagtatttcttttctgaggggggtcgtctagagtgtccgtgaagggaacaggcacgcgaggctggtggaaaaagcgggtgctttgactcttagctggaagcgtcaacgggaagctactctaaagcgctttcgctttcactctggtcccggacagtgggggctggttaaatcaagaaagggggttggggatggtgcaaagagatgaggaaatggtgccctgggtgaagtagaacagcacttgggagaaggaaatataggcacttattgagaaggaccaactcatcacacagacttttgataaacttgccactgggcaactcttagcccaagcactgataatgggcgttctgtgttaactagtgatgcccttccctagcttgacccaggaaggcctctccttggcccagatgctgccttactcccttccctgtgtcttccctgcccactcccatgtgcccactggggggactttgcttaggatgggcgcctggggcagatggcagccccaagactggctggctggcttctgctctggactactgccaccactcgtggcttgggggcggctttgttagagaggaatagcctctaacttgaagttaaccctgttctttgaccctctattcatgataagtcggtccgtcggaaagcatactcagaggagcgtcctttggggccagagtaacttacggcctggtaagaaagacacagtgaaaccacttataatttgggaaatctcccctcactgccaaatgagcagtggcaagtaggaagtagaagtggaa

SEQ ID NO: 11346 - DNA, 6000 bp, Homo sapiens
atgtgcacacaaatgttcagtgcagcagtttttacaataggaaagacatggaatcaacctaaatgcccatcagtaacagactggataaagaaaatgtggtacataaacaccatgaaatactatgcagccacaaaaaagaatgtgatcatgtcttctgtgggaacatgaatggagctagaggacattatccttagcaaactaatgcaggaaaagaaaaacaaataccacatgttcttacttataagtgggagctaaatgaggagaacacatggacacaaagaagggaacaacagacactgggggcctaccggagggtggagggtaggaggagggagagatgcagaaaaaataactattgggtactaggcttagtacctgggtgacaaaataatctgtacaacacccatgacacgagtttacctatacaacaagcttgcacatgtgcccctgagcctaaaggtaaaataaacaacaacaacaaaaccaacaaaataaatccggcttctttcatttagcacggtatttgagtcgtccacattgttggcatctatcaactctcctttcttattgctgttattccactgtagggacagatcacggtttatcagttttccagttaaagaacatctgggtggtttctagtttttggaggttatgaataaatgtgctacagacatttatgtaaaggtgtttgtgtaaacataagttttcatttcactcagtaaatatctaggagtagaactgacggataatacggcaagtttatgtttcactttataagaaactgccaaacttctttccaaagtgagtattccatcttgcattcccatcagtaatgtatgagagttccagttgctttgcatcctgtctccatttgatgatttaaggggttttgtcgttgctgttgctagtcatagccattctaataagtgtatagtgactctggttttaaacatggtaaatgtgtagtacttggtgcacatgtaggaggctttgatctgtagatggttgaaaatacggatcagaactcaggacagggatctggagtgatcatttgctatcatgtagagctacagaagaaggatgaccaaaggagaaatcttggggaccatcatattttagcagaaaaaggcaagagcaaaagaaaccaaaaagaagtaggtcagagaagtagaagaataaggaagaaattaagagtcctgcaaaggaaaggagttcaaaagataaaggaatatttaagttgtagtaccactgaaaacaggccactcggtttattcattcattgattcatccagaaaataaaagtgcctgtaataatccaagtaccatatcaggcatcagatttggtaattatgtcactggtaaagatagtgagacaaatctcactactggtggagctcaaggtagaagggaaggggctgaggacttgagaatgattgaaaagaaatgcatgattaatttaccaaaattcctcctttaaaatatttaatagattcagcaatactatgtgcacctacaaatagatatcattagaaactgctcaatatggccgggcggggtagctcacacctgtaaacctagcactttagaaggccaaggagagtcgatcgcttgaggtcaggagttcaagaccggcctggccaatatagtgaaaccctgtctctactgaaaatacaaaaatcagctgggcatgctggtagaagcctgtaatcccagctactctggaggctgaggcaggagaattgcttgaactcgggaggcagaggttgcagtgagccaagatcgctccagcctggactccagcctgggagacagagcaagactctgtcaaaaaaaaaaaaaaaaaaaaaaaaaaaaaaaaaaggccgggcacggtggctcacgcctgtaatcccagcactttgggaggccgaggcaggtggatcacaaggtcaggagatcgagaccattttggctaacacagtgaaaccccatctctattaaaaatacaaaaaattagccgggcgtggtggtgggcacctgtagtcccagctactcaggaggctgaggcaggagaccccgggagggagactcctggcatgaaccccgggaggcggaacttgcagtgagccaagatcatgccactgcactccagcctgggccacagagtgagactccatctcaaaaaaaaataataaataaaagagggaaaccgctcaacataactttactaataacaatgtttggtattattctctattttatatctataaaaagctagactcttgaaaggaaaaaattagagatcagagttcattacagtgcaaactgaccacagtattagttgttgaattacgctcaatatatataaaatatttaagtaaaataaaatgctcatggaaataaaactcttaaagtatttatcacctatatatgtagcatattctaggccactggctctaaacgttttcaatcacacatcctacattcgtaaaatacatttgtgcattcatcctcaatatatttatttctatacatgcattactattctaatatactactctagcataaaattcacaaaaaacagaaatttttaagaatgaaagttttaaaaggtaaacaaatagaagttctaatattttcttaccacatctgactggatcaccttgtgccccaccacgcacacatacaaaggcgctacttatgagaccattaatccaagcaaccacattgtaactgttcagcataaattttagccaaataaaatacagcaccaacaactcagatatcacttgttcctttttcttcaatagtactgacttccggcttcagatttaacactgcatccatcctcactgcagttgctttaaaggggacaataaaccaagggaaattatctctaaaggggccccatccaatgggattgtttcgttcactgaaaaataaatttaaaggctgcacttcaaaggctgaggtctcataaaaattaaatatttttatttagaaatgttattccagcactttaaagttacagaatagaggaatttttttcattcataagctttcaacggctcttagaaaaaccatgtttaagttgggcaaataactggaatctgaacttatgattttctttaatatcaatcgacattatttcttatgccagtaaagccttcatttccatggggctgggcgcctcattagtgaaagtaaaagactgcacaaagcgggggaagtgccaactagagagccctcacaaccaaacaagcagtacttaggtcggagggagagagttgctcctgacctaccaagaaaaccacttttgtacagaatatgagtcatcattattgggtgttgtaattgagagataaatcattagtgtttttgtcttttttaaaaaacatgtctaaaaagctcaaaagtaaatgccagtgtcatattcttttgtttgttttttgagacagagtctcgctctgtcgcccgggctggagtgcaatggcgctctcggctcactgcaagctccgccgcccgggttcacaccgttctcctgcttcagcctcccgagtcgctgggactacaggcgcccaccaccatgccaggctaatttttcctttttttgtatttttggtattttttttgtatttattattttgtattttattttgtattttttgtatttttggtagagacgaggtttcaccgtgttagccaggatggtctcgatctcctgacctcgtgatccgcccgcctccgcctcccaaagtgctgggattacaggcgtgagccaccgcgcccgccgccaatgtcatattctttagacatatcactgtcatttcacagctttcaaatacttccatctcctatgtattatcgatgaaaacctaagttttcatcttagaacggagctgcccgactattagaagcgtggaacccaggcttgccttgtcgtcgggaatgagcactagaggcacctgcacgcaggtggaggagggaggctggcggatggagagggcgaggctaggaggccctcgggatggaacctgtctcttctttggacactgtggaatttccataagctgctggacacagctgatgggtaccaggtatgagtggcaacgtttggcaattccattaactgaaaagaactaccgagaaacggtgaggcggggcggcgaagatgagaccagctgcccatcactccagaggacctgctgaaagaatctgaactcaccacgccttcgcgtccgcaagggaaaggtccggctgccacgcccccgcgaccgctgtcgccctggggaaaacacgagaaacacccggcaccgccaggttccagagaccttcgcaaagtaaggggtaaataaaaaccgtggccccaggaactagtagttcccaaagggaccaaaaccgaggctcccccaacctagcccgtgttcactccaacttacccattaatgtggcactctccgatgccctgatttcccagtccccagcggcgacgtgtgtggcgggtaacagaagggccgccactccgcccctggcgtgaagcgtagcgacccagttcgcaatccaagatggcggccacctgcgccccttctccgagaccccgaggctcggctcccagaagcccttgcactcgacgcggcggcggcggcggcggcggcggcggcggcggaggaggagtggtggccgcacatcctagcagtggggcgtagagaaagtgcgcgccgccgtcccacccaccgaaggaggagcctgtgcctgcgacaagccctggattttagttgcgcttgcggtggccatgctgtaggtactctgcggcccgtagacctccgtgtgtgcaaagggacgacccctcattcattcattcttcacgcgtgcgtgcatgcatacattcttaaggatataaactgtgtcaagtaccattttagatacattattggggctacaacagtgcaaaaaagttggtaaaaatcgcagccttgttaagtgtacggagaagctcacgttttcttcagcttcattaacttttatatgctctgctcgttttatttcaagctttttgtcatttataattttatattctataacatctgcggttttttgtttttgtttttctgtttttggggggttttttttgagacggagtctggcgctgtcaccaggctggagtgcagtgatgcgatctcggctcactgcaacctccgcctcccaggttcaagcgattctcctgcctcagcctcccaagtagctgggactacaggcatgcgccaccacgcccagctaatttttgtatttttagtagagaccaggtttcaccgtgttggccaggatggtcttgatctcttgacctcctgatccgcccgcctcagcctcccaaagtgttgggattacaggcatgagccaccacacccagccacatgagtgtatttttgacagcaatgtagtcaccaataaacgagtaacttcagttaaagtactgtagattataatacacagccctgtaatctaccctggagttcaacaaacggtattgaaaacagactgtgttccagatgcaataggaagagaataaataagataaacaatacataaatcctgcccagaagacgtttgcaattttttaagaggaaaaacatgaagacaaattgttttaagatgtttgctattttcaatagttgaaaaataaacaggagagaagggattatttaactgtgggtatgtagggctgagaaaggcacgcttgacaaaggaaacctgggcagtgttaccagaaagcgttgccaatcatgagtccatatagtgaagtgaaagcaagtttattaaagaagtaaagaaacaaaagaatggctactccataggcagagcagtggcttgggctgctggactgagtatatagtttttttgtgtgttgtttgtttgttttgacacggagtcttgctctgtcgcccaggctggagtgcagtggcgccatctcggctcactgcaagctccgcctcccgggttcacgccattctcctgcctcag

SEQ ID NO: 11347 - DNA, 6000 bp, Homo sapiens
ttaaatcctttgcaagtaagcttttccagagagggagatggataggatgcacagggaggcaggattacctgtgatccacagtgcaaaaccccatcaatgccacaggaagaagaggagtagctgttgagatttttgaaacctgaaaaaccccaccacctccttctccaatgaacaggcccatttctgtagctaagattcacactaaacttcatttgcaaatggatttggctgttaacataagagtattcaatgcaaatatttctttcctggcaatgcagatcagttgaaaggaaaggctgaaaattagttagctgtatgagatgacaaagcaccattccagttaccagggaggaataattgaacacagattgcctgttgcgtctttaatttaatttggagacctttcatcctttgctttccttcatttgcagccaatacttacggagctaatttgtacgtggttcattttcctccttttatcttatccactttaacatcaaccatggaaattagaagcaccatgaataaaagatgaaacctgacttggggtattctttccttaagtactgtgaattactgaaaaactaattggtgtgcatgcacaatataaagggctgagatatatgcctcagccctatagcattcctaatcagcatctttgctttcccccaaggagctgtagattttcaatgttttatctggtcctacgttttctccagagaacaatgtctaaactataatttacacggaatcattaatctgagaacgggtgtatggtaggctgtctcacaaataaacctacggatttccaaattctggaaaatgcacaagactaagaattcataaattccactagcctaatgatggaattcaataatgtttgccatgcatggaaaatgttataataaagaaaactgaatgtatcagcatacatatatgtcaaacaaaggcctaatctgtccaaaaacaatgctggtgggggagtggtagagaaaggtactagtcataaaattactgtctgggagtgacctccaggagatagaaaacttaaattctaagtatgtcatgcctattatgcttaaaatgacaacagaaacaataaacctgttgtattttttgtatatgtggcacctcaccattaaaaaatgttgcatatgctcttattttattttattgcattacttccaattgtacaaaagtttagtgtcttgaaagttttgcgtttttcctttataatgtcctctctgacaacactatttttttctccttaccctctcctcattttatattttcccccatatggactaatgaaaaacctactggaattttctcctgatgcttaatatcccccaccaacaaaccctcctttcagtttgggaagcatcaaaggaaggctgtgtcctgaatcatttcactgcctgcgtgtgccaattcttctaacacctcacaccaagaggctagaagctcggaataaactaaatcattcctccttcacaatctagcctcctacagtgttcattaacagtaatgtgcactattttacttcaacaagaccacatattgtcacagacgaggcaacttcgaagttgtagaagaaaataaaaagaccttgcggtttaaaaattgtggtgcattgaaatgtacagtctttgcttcagatgcaagccacttttttcttttggaggggggagcactgatgcaggattaaaagcccagttaaaaacgtcagatggtatctctaatcttgggttgagtaaggaccatactatacaatgccaagcttatttattcatttggagaaacgtggaaagaaagccctctacagtgaaaggatggaaaagaaaagatgaaggacaattactgtgccttttattcatgaaagagaggatgaatagaaatgaaggcggcaattacctttaagaaaatttttttaaagccacacagaaaaattaaactggaagagtacagaatagctctgccctggggttaagaaagcaacccagagatgaggatgaaagtgtgggaagcagttagggtatctgatgaccagacacacagattattttagcagttcagtgtccaactcacacatagtattttcccaatgtccagtttacttgggagaaggggaattgagggggagtctctgaagcaggacgtcaagaaatttcaggtggaggaaggcaacagtctcacagggcgtcaaatcaatcaagaagattttctttggctgtaattgcgtagacagaagaaaactgagaaaacccatgccactcagtctcatttgcaggctacacacacacacaccgcaagataccagcctcaaggaagaacacctgttctaaccctgtgcctgccgggggcggcgggggggggcggtgcgcgcgtggccatcccagggaactcatgggccatctcaacagcagggagcccggatgcactcaggacctggctgcaccagaaagacgcaaaaggccccgccaaatgtgtcctggctaactcgccaaaaagaggccttagagaaaggttgtgaaaagggatcaggcagcccagatgtttaccttgggctgcaaaaaagacgtaaccacagggcagaacagtttattttccagaaagggttttcttgcaaaaaaaaaaaaaaagtaatcttgagggtcagaaaagacttttgtgaggtgtgggaaagagaggaaggacctccatagaagtcagtgtttcttctaacaaccatttccgtgccagtgggccgcaatagtcaaatttctctctaggctatctccacctttctccctatatggtcctagactgagaatcacacctgtaggcactgaaaagcctcgagtaacacctagcctacccgtccccaccacccccacccctccaccgccacccgctacggtgcaggtccctccctgatctcctatcgcagccagcgcctgcaggtctaagctccatcctcaggtcgtcaggagcctggcccctggaaatcattcccgcgcctcacacctgtgctattctcttgacacaatctccacacagaaaagccccagggcagactcccgccccttaagccacagtgatcctctcacacacagcccctccacccccacggccagcggaggctgcggagtgccagcaaggagcggctccactcggtgccccgaatgcgcgcacggagaactgagaactcaaaagtgcacccggagtgcaaggggcgtgtgactgcagcccggccggcccggaggcccactcccgccctcgcccacccagcggggcaggctggcctttacctcctggaagagctccagactataggtgttgtcgtcgtcagcgaagaagagcacgccgggctgcgcgcgctggtgctggtgcctctggcgcagccaggcgaggcccgcgttgcgctgctcagtggcgcgcggcagcccgggccgcttgtagcgccgcggcgtgggcacgtgcaggtgagtgctgggcagcccggcccgcgccaggaagcggctcaccagctcgctgcgcgccgccgcgtcctccaccaggatccagtgcagctgcgccacctggcggaacgtgttggccaggcgggtcagctccgctttctgcaccgggcggctgtaggtgggcgtgatggcatagatggtgggcagctgcggctccggctgtggctgcggccgagactggttgcgcttttgggtcccgtgagccgggccgcccctgcggagcgggagtcgggcgcccccgcggcccaccgcgtagggagagaagtaggggcgcggggtgagcgggggcactggcctgcgcgtgtccacgtcgagcatgatgatgacaattaggatccagggcaggaggataaagaagcgggtgaaaagcgcggacttcatggtgcacgctccctggcctctcggacaccccagagaggggcgagccgagggaccccagtgcgcagcttggacagcggcggcgccagcacttagggagtggtgatgggtgcgctgtccatggggccgagggcgctgcagagacctggagccgcggggctcactacctgggcgtggaggagcggcaggttcgcgcaagctagagcgacaaggggtgcaggcgggcgggcaggggctgcccccgactccaggtgagctggcgggaagcgggactcggtccagccgcgcgccgccggtcccggagttgtgccgagtgcgggaaaggcgctgatccccaccgcgctctttctgaagagtggaagccgagaagcggcacccggtgcgcctcgccgctccagtccggcggtgctgcgggcacaagggctccagccgcgggcccccaggacgctctctgggacgccttcgagggcgggcggcggcgctgggggctttccttcctcacattcccgccggggtggcgaggagcgggtggagacgctgggggttgtgtcccggctgtgttcgcgcgccgcagcggaagcctgctctcagtcccttgctcttgtcttctcagaacctctccggatccagcagcaagatcccaaagcaaggaaagaaagaaaaagcgagggggcgggggcgctgcagaatccagcgtcctcccaagtcctcctgtgggaagacagcagcgctgctactggtggagaggggctgcgagagggaggcgcggagggaccccttggctctccgccgggtctggcgctaacggccccgcgagcaagctcgggaggcggccgctgcaccgcgggtggaggagcgggaggagcgtccccgcggggctgcacgacctcctggagggggtgatgctcgttcacctctcttcagctttgtgaaataccgcaaggtctttggagatgagccaggaaaatccattcacgtgcggaaatttgccgggctacgcgcgttgctgctgatgcctagggttcggagtgaaaggaggggagaaagcgaagggattcctcctcctgctcccagctgctgcgttgatgtgctggggtgtatcgaacagcggcaacaaaaagcgctttcactgcaaggcagacatcaataggagcccacggagatggaggggtgctgcacataggtgtttggcatgtgagacagtccataagaaagaatcaattcggagggctgctgcctgactgcagtttgatcatggcgggtgggggcgggtggaattcctaaaactccagccgagcatgtttaacttatttttcttcagtaatttggagtcacggtccctcccagttcttcgctgtcaccggaattactccgtttggctctcccaaggctcctgtcaagaaggcctaagaagtagaatggccttcattttcaggataaggaagctgaggttcagggtttaaaatgatttctctgaggtcagtggcaagtggcatatggaaatagaacgtgggtctcctgcgtgtgtctatagctagtggcgtcctcactgcatggcctgcagaaatcccacccaacacagccgggccggtttggccttcctacatataaagatggtgcgattgaaatcaaacagagtgtaccatgacgaatagaaccatgatagggtctggaagaccccaagtaaacagttggcacttagtttagacactttttgctgtctagctggcctactagctgagtgcctgaccttctgtaacttaccaggaagaagggctgtgcttcccaggcaggtcccagggaagtgcttgcaaagcagaaggaaagctccagactgttctgccctagcctatgataaataatttctgagcccatcttgtctgggttgtctgcctttctcgggcttgttcacaaataaatctctctccgactgtgcgttctggtgcaactgagagctctggggcgaatggctctccagcttttctgacagctcctcttctcccagtcctacccctgaaccccccacctgttaaaaggcattggctcatctgtgaatttccctaacttcctcttcagattctgaaacgtgagagtgaaatttcagactaacacccagccaccc

SEQ ID NO: 11348 - DNA, 6000 bp, Homo sapiens
ctccacaaaagaaatcaactattcgttagttctcctttattttactggtttcccttcaacatgcaaattcagaaatatcattaatccacaagatcccagatgattttaatccttcctcctccctcagccacacagttttatgaggtcggaaataaaatgagctgaattcaaccgcctttagagcaggaccatgagcaccatttataccgcctggggtataagccacttgcctagatccttacttttcttttttgttgttgttgtttttgtttttttgagacagagtctcgctctgtcacccaggctggagtgcaatggcatgatctcggctcactgcaacctctgcctcccaggttcaagcacttctcatgcctcatcctcccaagtaactgggattacagacccccaccatcatgcccagctaatttttgtatttttgtagagacggggtttcaccatgttggccaggctggtcttgaactcctgacctcaggtgatccgcctgcctcggcctcccaaagtgctgggattacaggcatgagccaccgcgcccagccctaaatccttacttttcatggcaatgtccaaagtcaataaaaacatcaagagcttctcccaaaaatgcccatagtgaaatacagagaatcctggtgataaaaatgatactatatcattattatgaaccttatcacaaatattcagccaaatcccaattacccacagaaagcaggcaaagccacactgggctttctggtctccagtttctccccaaagctatctcctcctgctgcctgggaataagagcttggttaaccttagacttgaccaaggattagacaagttaaccaactggctggagaagaaacttctaagatgaacagaaattatttttggtacctaggatatgtacatgctgcactctctgttagtgcatagaattgagaattttttgtccaagacactggcagacatttattcataagtatttccttgtgtttgatggtcaagatcaccaggccactcaagagacctttctggaataccaaggatcaaatccactttctccatgagaagacaaaaacagaagttaatcagctcacccaagtccatgaagcaattggccgttggctcaggaagagactgtcaagacctctggagacctcgcttacaagacacagaatttcagagccggaagggaactcacggatcaaaccacgcacttttaagataaaaaatccaaagcccagaaatggctagaaattggtaccttccccacctttctttccagtgatgtttcccctagccttgagcatcaaactactttaagttctttgtcactttaccaatactgtaaacttaagccaactattgaacacaagacaattttaacacttcctggctaatcagcttcacagagaatccttacatttgtcaaaaaaataacgctttcggttattataaccaacccacccattaaagaaggagaaaaagaaaatcataaacaagctttattttttgtgaccacacattttattatacaagcagcaaagaacactgcagtctgtctcctcttttacactttaagttcctaactcaacaaaaaccacaggcccaagccggttataggaggcaaaactgagtactttccacacagttcatagaacaactgttttcacagcaagctcacataaatgctatgtgataataacacatgcctgctatgtggaagcctgcttaccaagctgtgaaaagacccatgtttactatggaacctgcaaaattaatcttctcatacagcagaagggaaatgctctttttgggatgtcaagctggcttctaaacaatcctttggcgaaaatggacatgcctaaaagggcggagcccagagaggtgtgtcactccgggtatcaattcctataaatcagatcctgacaatcaccacaatattttaaaaagaacgaattatgattcatgggccttcaagcctttattaccgcaagaacattctcggtagaagaggaaaaaaaaaaaaaactactgtgacttgattaatggccaaagcaagacaataaaataaatctcataaatataaggaaaaaaacctgaatgactgctcttggctctgaggctaggcatgtaaataattccaccctggaatgaacatacataaagattttgtttaccctcccagcaaatacaacaaccagactcagattttcatcaggtaaaaataatagctaatttgcttaactaatgcctagttaggaacatttgataagcagcaataatatttaattcccaactaactcaactctcaaactgccaaatatcaaccctcaatctggaaatctgacgacagttaggaaagaaaaaaagcactctccatcagcaatgtgtagcgagttttttaaaacccatttttctcgaccctgctagaacagagcctgtctacagaattgcagaaagcttaaccaacctcagttaaccccactgcctagtggctactccctaaccctactaaacgtctccgggttggacccgagatgctaaaattatcctagcaaagttaaaactcccagcatcatcaaggtagctgacagctaagacctacaactcttctgcagaaaccagtaggctgaggaccaagaaaacagaggcaaggagaggcaaaggctgctggttaactagttaagcactgaggactcctgctgttatcctctccagtcagtgagcatcaacaccacacttcctatcgccaaactcctttcttaaaagggtcagtgatgcagaaggtgggtgctaactgggacaacttaaaactccccttcttaaaactctcctcaatgacctgctgaaaagtgcacctggaccggttttcaggagatattttttaatgaactctttagccactacaggggcggtcattcctaagcacgacttccacgcactcacaagacagcccaggccatgctgaattgaagccatccccttcagtactggcacttgccaaagctgcgtctagtctggggaagagtttccacaaagctggctctaacaggccggtagaagacacacggaggaaccagaaagcgttttcttgtaacctaaggatggcaggcgcacatgctccagtccagtgctggccagaggctgcctgccaggtgctctcggcctccgctggtgaaggagtggtttggttggtttttaatatctgtttcttaagaccaccggcagtaacttcccagtctcccaaactgaagttggggagtgaaggaacaggtttacccccttacacatttctcccatctgggtggccacactaacttctggggagtacccagcccccacagagcccgcaggcgcgtatacatacacatatgtatcatgtcaaaaaccccaaaaggcagagtcctgcggtttcttagctggagaatgaagcctttataacatcacaacctcaaatgcaagcccaccatcactacctttaagccagggttgccaattatagcgcccacctcatccctccccctttgctgggatgctgtgcagcccggagagggaagaagggaagaagggagaaggcctgcttgcatagtgaaagtaaaggggggggagacttctccttctgtctccccactcttccctccccacttcgccccacccccgtcttctcgaggagcatccccaaactaattttttaaaaatgaaacttaataagcttcttgcctaccttggctgtttctgcaacaagtgcatgggcaatccgacgagaagaccagtatccgcttggggggtgagatggggggcgagcagagctgatggagtaatttcaatattaatttatgtcagccgccttctctcagcgctactcacttactgtactgccctcagcctgtaaacaaatatcgctccgccaggaaacatactccccagatgcaagcccctctccccagcagggaacctggcccctcgtccccccgacaagagtgtgctcccccacccagggtaggaagctttgggtttccaaagcaccaacccaccacctcctccaccaccccagcaagaaacttactcggtccgtctacgcctccaccctcccttcaggaaatctactctccatatgcattcagcctccccgcaggaaatctgctcccccctccccccttctatatacatgcacccctccctctcctcctccccatgcgccctccccggccagaaacttactagtgagcaagcgtgcaggctctcctgatgctggaaacttactcccagatatagcgcccgccagccccctttcccagccctgctccccttcctgccctccgccgcaagcaactccaaactctccgcatccagccgttctccctccccagtggaaatttgcagcgccgggctgcgcgcgtgcatccaccctccccttcaggaaacttactccccatctgcatgcaccgcctctcagccatcgcttagagggaagggggtgtgctggggagacagaaatacatatgtatctctcgcccctcccccggtcgcagcccactcggggccgagccgcggtaacctggccttacctttgcattgctccccatcctcgccccctcccttaaccctccttatccgctccccggtaccccccttttttcacccattacccacccctagcaaccgttcccaagctcctctcggccttttttttttttttaaatccaggatgcaaattcctcccttgtcagcaaatcgactgtcaaattattttcttgcaaaaggagaaaggcggggtggggggggggagcaggagcaaaaagagggggagggcgggggaagggagggggaagggagggagagggaccgaggaggggagatatccctccgcagagctgggtctggccgcgggcggggaagcaggaagtaaggtgtccagcgccgcgaccggctggtcgtccgcctcggcccccgcccgcgtcccctttcccccggggcgcagcgctacggcgggcgcgggccgcccggcgcattgttcgcagccttcgcggcggtgcgctgctgactttatttgtgcgctttgcgtgtgcgtgaggttgcaccttttgtaggctggcgagtctctggacgaggatgggacgggggacacgggcccagttgcggccctgcgcgagcgggacctgtcagccctgaggtgcagcggaccctccggcatggccggaaaatcgaggccggggagaaggcagcgtggccgggaagctgccgccttaaacccggaccagtgcaggattgcttcctgcgtagccgtcccggttattgtaacacgctttgcaagctaacgactggggtttgtgagggggtttgtttatttttctaagtgtttgcaaagatgccgaggtcgaggcgggctgcgaggagacggtccgcgcctacccccaccgcaccctggcctcggtggggctgggagagggctggggctccggagaaggggctggaggttcgcgaagcgcgcgtctccatccctccgccccgatgggggcggggaaggggtgcagtagaccgcgctggaagagcagctctctggggaggggtctcccttgccgcggcaggcgcagcaggccggggaggggggttgcctaggagaggggccgggcggcggaggggaggggaggagagggggcgcgggtgcagccgccgcgcgcgctcgcccctcctcgcgcgccatgactgtggaacgtggtgccggggaggagggacggccaccgggggccgcccggggctgctcggcattggtgcggaaacccgagcccggagtcgctccctcgcgctgtctcctcctcctcctctgcgggggaaaccgctgcacccaaaccgggagcagctgcgagcagggggcagggcgcgggctgaaaggcgagccgaaggttcaaacctccgcggcgcgggcgggggcggagggcaacagcaggacggcccccaggtcccgagaaggcgtggcagtggtcggcccaggtg

SEQ ID NO: 11349 - DNA, 6000 bp, Homo sapiens
tgaacctgggaggcagaggttgcagtgagccaagatcatgccactgcactccagcctgggcgacagagtgagactccataacaacaacaacaacaacaacaacaacaacaacaacaaagaatctacccaaacctgagccccatgctatgatgaataaatgcaaaagaagctgcaactatgctcccatcccatgagatgatgctggaatgctgggatgatgagactgacacatataaatcaactagtccctaagaggagaagcacaattaagtgctaaactgcatggtgcagctcataaaagagttgcaggaattcaggtgaggaagattaaggagccataggctacttaggaaagatgcactcaggagaagggagaaagaatttaccagttactttatgtatgactttggtaaagttagttagcctctcagtgttactgtttcctcttttatgaaatttgacactttaatgcatgtaaaatgcctagcacattttaaagcaagacaggtttttggtaagtcttagagaatgtgtaacatctacccagaaagagaattcccagatagcaggataacctgtgtcatgtaaaagaaacaggtatcctttttaagcctttttagatacaaaaaggtgaacaaaaaatccacaagtaatagtcctactataataagtacaatattctgtgttgaatagcaaccacagctttgcctgtatggcaaaataactccctgagcacgtgagccttggtgcatgttgacattcctagagagttcctccttccaagcaaagattctttctttaaaaaaaaataggacataaagtatgcatatttgcttttccctctaaaatccttgccctttactgacccttctcctgagcacttgtccgaaagcaatcataacctgagctttccatcacctacaaggaatagttataatcacaatcacttctctaatgtaattttcttctaatacacagagaacatgagatacattacttctaattttaaatcacgttctctatatattcaaatattccttatcacagctttatacatgttcgacaagaagagaaggaagagttcctttaaagagtctcaacgttatttgggggaaattacattcagcagagtcctgattatacttacatgatcctaattagagttttcctagcattactggtaagagtgttaattacattaattacataatggcttctttgacaaataaagccatatattctaagattggtccaagcctgacactcctttctgcttaaaaaaaaataggagacatattggaataatagaagtttccactttaggccgaatgaaattataccagttcaaaatagaagatgatttcatggcaattagaaacagtctttgtggaaagttccaatattcctttttatttacaccaaaagtaattccagccatgcatcacaggctccatcacttgtagagagaaatgcattatatatttctgtagacagaaacgaagtaaagcctgaaatgattaccttgactttttcagaaaggagagaattggaaatacagtgctggtagtccgaggctttgatatgtaaactcacctaaatatgctggtcttttcagagttcgtttgtcatacagtgtgaccacacaaacttaaattatttgtaaaataaaattgttttctctgtgtttttcctatccttttagagcctttgaaacatatatagaaattcattctcctgagtaggaaactgttactatatagaatagagcagccctctggtttgccagtggcagataggaaggagagcagagtgacaacccatatgccccttacttctcttccgcaaggagcaagttgcaagcaagagaaactgttttctgctcatttgctcctttatttaacattttaataatctatgggatactgtgtaaggtagtgtgctaggcactcgataaacagagggaaacgaaaccatgatcatgtcctcttgcagtttacagtctcctcagatatcgtttgtggtatgtttaggctttaattttgtctttctgtgcatttgcctaagtatatttctggtcttgatattgaaagacagattcaagctgtaatacatcacagctgttgggcaggaactcacgggaagccatgagcaaggtagaaggggctgctattagaaacaacttgaggcacccatagatgcaaccaaaccttaatccaaggtgtattcatttcatattgcttctgtaacaaattaccacaaatttaatagcttaaaatgcacaaatttattttcttatagtgctggagtttagaggtaataacctcaaggtgttgtcattcctttggaggctctaggattgaatctatttccttacctttcaagcttctagaggctgcctttattcctacgatcctggctccttcctccatcttcaaagccagcaacatagcgatttccctttcctccctcccacacctattctccaccattccttccctctctctgtgctttcgtcctcttatcttctctgactgaccctcctgcctccttcttataagaaatttgtaattccatagggcccacctgtataatccagaatcatcttctcatctccaaatctttaacttaatcatatctgcgaagtccctttggccgcataactaagacaggtacatctttgagggccatcaggctactaccacacaaagcaaattaagtagaaaataacgtttgcctcttttataccttgagtccaccagctgcatgttgccctttgcaagtttgttttctacttcaaggccatcttagttgtccattttaactagcctttcctcacaaaatggtggtatgtggctccccccactgatatttctctgaggccttgtagctctctaagacagcaccagtttaactcacaagtcaacaaactggaacacttcaaccagagacattgacatccccctctaatgaactcagctgattgctaaagacagatgcttcgttagagccaaacattcctatcttacataactaaatatgataataaattaagttcttggggctggaaatagttataatttcctctttcttgcagtgaaaaggcatggaacatttagcaaactgatcctggcttaatttctaccgatactatgcagcacaaactcttatttgatgcagattataaatcgaaaattagcaatgaatactatgcatcgctttagtggtaagaggctgctgagtagctttttttccccagtaaccgtagaggcaagaattgatatttttatgtcacttttactaagaaggggggaaacattttgctattaatcttaaagagaagtcttttgctgctagttacgtggagtaacagggaatagatttaccttcctgcctcaaaaaagtgaagaccagaaaaacatttgttttcagacactggagagcaggcactgttacggctgtgattttacaactgctcctacatgctgggagcagtcgctagatgcatctcaaggtgggtcgtccgcgcttccagactcagcacaatcgacatttatttacgtaggtaaaattactgttgctatgggtaaattcacagaaataaagcccagagaatccggttggctggcagggagcggcggaaccaatcccgggctcagcaagttctcgcgataccgtgagatctccagtcctgacgacaccgccgctgaaatgttagtgagactgtagggtgggcggtgcgagcggcggttagctcccagttcggcctctgaggaaaacgggcgttcgcctgcggttggtccgactgttagcaacatgagcggcctggatggggtcaagaggaccactcccctccaaacccacagcatcattatttctgaccaagtcccgagcgaccaggacgcacaccagtacctgaggctccgcgaccaaagcgaggcgacacaggtgatggcggagccgggtgagggaggctcggagaccgtcgcgctcccgcctccaccgccttcagaggaggggggcgtaccccaggatgccgcgggccgtggcggtactccccagatccgagttgttgggggtcgcggtcatgtggcgatcaaagccgggcaggaagagggccagcctcccgccgaaggcctggcagccgcttctgtggtgatggcagccgaccgcagcctgaaaaagggcgttcagggtggagagaaggccctagaaatctgtggcgcccagagatccgcgtctgagctgacggcgggggcggaggctgaggcggaggaggtgaagacaggaaagtgcgccaccgtctcagcagccgtggctgagagggagagcgctgaggtggtgaaggaaggcctggcggagaaggaggtaatggaggagcagatggaggtagaggagcagccgccagaaggtgaagaaatagaagtggcggaggaggatagattggaggaggaggcgagggaggaagaagggccctggcctttgcatgaggctctccgcatggaccctctggaggccatccagctggaactggacactgtgaatgctcaggccgacagggccttccaacagctggagcacaagtttgggcggatgcgtcgacactacctggagcggaggaactacatcattcagaatatcccgggcttctggatgactgcttttcgaaaccacccccagttgtccgccatgattaggggccaagatgcagagatgttaaggtacataaccaatttagaggtgaaggaactcagacaccctagaaccggttgcaagttcaagttcttctttagaagaaacccctacttcagaaacaagctgattgtcaaggaatatgaggtaagatcctccggccgagtggtgtctctttctactccaattatatggcgcagggggcatgaaccccagtccttcattcgcagaaaccaagacctcatctgcagcttcttcacttggttttcagaccacagccttccagagtccgacaaaattgctgagattattaaagaggatctgtggccaaatccactgcaatactacctgttgcgtgaaggagtccgtagagcccgacgtcgcccgctaagggagcctgtagagatccccaggccctttgggttccagtctggttaacatttgcccttgggaatactcctgcacaaggtctcctaccaccttctgctggacctgtgcttgggcatcagcaatgagtatgccttctattgtgctttgtttttgctgacttttctgcaccctgtttcctttggatattcagttctctcaacctcaagattgagacggtggtgggtatgcttctccacttccatatgaccttcatgctgttctggaatatcacatgctacgaggtcatccttcacactacttgtaagccaagcaaatgatactgtagattgtactgcctttatctgcactgcttggaccctgtttattcccagggcctctgaactggttgctgtcacttggatttctagctttgggagcctgttccacctactcagctctgcattgagcagtatgggcacatgccctgtggacagttactggacgttaatgaactcagaggagaaaagcagtgagccacttgttctgtgtgatttatggtacttcattgctcttccttcacctctagtcactttctattgctacctgccctacattggctcctgccaaggtccctctctctccctgttttccttttttttttttttttttttttttttgagacggaggacggagtcttgctctgtcgcccaggttggagtgcagtggcgcgatctcggctcactgcaacctccacctcccgggttcaagcgattctcctgcctcagcctcccgagtagctgggactacaggcgcgcgccgccacgcccggctaatttttatatttttagtagagacggggtttcaccatgctggccaggctggtctcgaaccccgatctcgtgatccgccctccttagcctcccaatcctctcttaaaaaagt

SEQ ID NO: 11350 - DNA, 6000 bp, Homo sapiens
tggctaatataacagattcaattgttttaatgttctgatgtgaatcaatttaacttgcttcatcagggttactgggaccaaaaaaaatttgttttatttgaactactgtatctggtaattgtttttgttcccaatgtttctttactgcccacagcaaatatcttttcaagtaataatagttaaaactatacagtacttactatgggcaggcaatattccaagttaaatatatatatgacacacatttaattcacaacaactttgggaggtggtattatttttacccttatctgatacatgaggaaactgaggcagtagaaagattaaatcacttgcccaagttacagttgacaagaaatagaaccaggatttgaatcacacaatttggctttaaagttcatactcttacacatgaatgaatgttctggtatctggaaaacctaaacaacatatgaaagcacatataaacaaagtaagtaagggagagatatggcatgtgaaggcctatgctctaagctaattgatatactgctaattcattaacaaagacttacattttttggcttgctatgggcctgacaaagaatactctgaagctctcaatgtaaagcccatcttatgtcagttacagaaaagttacataaagtatcagttaggtatcttacctagagttaacattcccctaagaaatatcatatgaaggtgaagagtagttggaataaccaacccaactgcaaaacaaatatttgctacatgaaaaaccagatgatgtatctctctccagttttcacaagtggtcttattggaaggcacaggtatgatactttctaactcaggtgtaaaacctatggcagttgattctctcaatgggctggactctgtataattcattttgaaaattcctgtaaaaacaagtaaacaaaagtaaaatcgtaaaaatggcaattgtatctttttaccttcataggtattataccaaaattatttctgtgaattaaatagacttctctagtgcttatgaattagacagacccagattcaaatccaactctgtcacatattaaatgtattcagttccttacctgttaaaagatggtaataatacctcatttgccttatgatcaaatgaaatgaaatacataaaatacttagcatagtgcaaaactattccctcataggcacatatatacgtataaacacttgtagggaagggaggagtgagggaattagtctttaagataatcaccaatgttcataaaccatggtaattacaaagttatttagtctagtcttccatcaaattcccactggtgactgaatccaaacacaggaaaaataactagaaaactaattatttgaatacttaaaaaatatgaataccctcacatctatttgaaggcttaggatatttagaaggctctatttttataccaccattaaatcactgtatcatacatacataatacattatcatatatgcaaataatatatagccatataaacatttatatatacacagagagatacaacatgaaacttttattgtcttatttaaatctctactttatttcccataataattctacctggtagcatatcacaaatttaaaagtagtaaacttccagtttacttatacatatgaaaatccatagcaagtacatttaaagaatatacattttacacatgcttatataaaaccatttcctatgttacctgtcttcggtctccggtccttaaaaaacactctattattaattgcacaaatttggtccttgccaaacactatgtaggtttacagattatatgaattattctgtttcagcaaaattccaaatggggaccctaaatacatttaaatttagaaatatgtatttctttcaaaataaggtcatgcaattaatcttactcttctactgcttgttcttaacatactaaaggttttaggtagtagaataattaattggtacaaaatgggtattttgaaaggatgttaacagacaaatgtgaaagaattccacagcttaaagatgataaaaaacaagcacaccaatttacaaattgtgaatgaaatgatcaagtcaactgaagatctttttacataattctgaaatagctcataaatattaatagtaatagttgacttagatattgatttgctacaaaaaggaaagaaacaaaaattcacctattttccaaatgtctgaaatcagcaaatatataagcctatcaggatggcgggggggaagatcattattttaataactccatttatacaaaatttgcttttcaaggccaaacgagaatgaatctcgtaacttctgcaggacagagaatgatatgaggtatcctctatcactcataacccaacatcacctaccctagcattacataggttaataataactatcatttcgacagcactgtagaatgtacctacactcccattgtcctgtttgtcctctaggaggcagggacaatgtttattcatctatgtacttccaaggcctagcctctgtagagaaggccactgagacagggatgaaagccactctgaaggaacgtcaacctgataaacactttcagaaatcactgttccgtctccccagatctcagtaataaagccagaggagtgcctagccttcctgaggttgagtgaggttctacaccacaagccaccagggtgctacataagccagggaaagccacttctgctcctcgggtctgtttcttccttggaatagggaaaactttaatagcctatggttctataatacacatttacataatcaatcaatcaatacatgttgcccctcgagttcacccaatttcacctgtattgcctattaatccactataattcaatatcaggcttttacaagttcttaaagtgacactaaaagtaccaatttctggtccaagaaaaatgacaggaaaactactattatgacccaagaaccagaaaatattattagcagtttttagaaggtacggtcatcctaaacatgttttgacgcacgacaccttattaaagagagagagagatatatatagatatatgtatctatatatctatataattgtctattgtgaaatgccagttacctattgtcgaaaatattgatcagatcagtttactttgattaccacttaatcgttaagtggcttacacttaacaattcttatacagagaataggtggaaagagaaaggttagactgctaaattggtaaacttttcagattaattttgactaaatcaagagaaattatttttccctcatcagatcatcaaagttgaagtccttaaattacctatactagtaaagttttgtttatcgtttttcaaataggtgattgtagggctaaatagctaaatgctgaaactaacattaaacctctaccaaactaaaaaaatgaaaaagataactgcaaacgagcgtcttgctagtcgagttaattcattctgtaattctaactgaatcttcgcacatctcccgaatggcaaatggcattacattgctaagagtcttttcgcacttattcatgcttcaaagcaggcagtttctgggacttgtctggccaacaacccgttcccaaaggctcggggaaggaggttgcgggtgggtggcgcggacctcgggtccccagccatcggcgctctcccggggccctctgacctcgctccttaaaggaggagggtccgtggcaacggtcctcctcggccaggcgctctcgggacgcgggggtgaggagtgagcgccgtggcccaccctactctccgagcggggacggagtgggcgacaccgcgcgcccggctgcacgcaggctctgcgcggctcgaggcggccctacagggggcgaggaggaaccccggagactcggcggagagagcagagacggagctcaccaaggggcttgccgccgcagagcgcgggagccggcactcggtggggccgagggcccggggacgctggggctgcctgacctgagcggcggccgctgaccgttgagggtctctgtggccgcagcgcccagacccggggagaagggcggcctccaagggccgggagcccctcgagggcgcggccagcgaggagggacagagggcggcgcccccggctgcccgggcgcgtagaacaagcagctgccgccagggccgacaaagttgctccccgaggggctgagatccaactttcgcttcccgatttagccaggggagcgcgaggccgcacacaacccggcgcggggggaaagccggctgcagctgcgcctcccatccttacccggctggtccctggcggggagcctgggcagcgccgaccaaagttcggagcggcagcttcggggcgcgggacgcggggcacacgggctcagctgctcgacgggagcccgacgcgcgctcctcggcgggtcggcgggtccggaagctccgctgcccgggccgggtccccaagcccgcagccgctttgactaaaataggcatcgcgacggcggcggcaggcggcggcagccagggctggggccgcaccgcgcacgcgcatgcgcccgccgccccgcgccccccggcgggcggagcccggcgccgcggccaggatttcccacctcgctcccgcgactccgctgcgggtctgcacacccgaggactcggtttgaaacgcccgcttatttattttcttgtcgcctcgctacaagattctatccttgtttgggcatgagtggggggcggcagtctcgtgggaccggcggcattcgtcgttcctccttacggggataattcgagaagtgcggtccgggtagggagagaaatcaggagagaaaatgagaaagagaatcctcgtttcccctcaaagttggacgacccactcgtatatctcctttttgggagattcgcccataactcagcacaaacagggaatagcccggaaagcgcgcgagttcccgtccgattgtggcgggggaggctgaacgtttggtccacacgggtgcaggacgcgggggtcaggcctcctgctgcggaggaagagggggaagaggccgcgcgggagggacttctgacacgcgccactgtttttgttttcaaacaggggtacttaaccgaaactagcaatcccaggcggtacaaggccctccatcgtaggcaaagcactacctgaatgtagatttgggccatacgttggaaaataagacatgagagtatgctccgatcaacttttactgttcactggacaactattttgggtaagaaaagcaaggaaacttaataaagaattggcgttgttgggagttgtcttgtaggacaatagaggaaggttagatgggtacccagtttccaccaaaagtgtcccattattggttaaaattggcatcagttattagattatgagatcgttcatgcatgtgaaatgtgatctcaatataaaaaataccaccaccgattgtgtgaaggtacattataaagagtacctggaggtgcacactggacaagtctctggttgaagagatggtgcagcctagtaagaaagagcatgggccttgatgtcacacaagccgggtttgaatactccctctcctaccagtttactgtgtgaccttggagaagttacctagcccttctgtgcctcagtttcctttttggaacatggggataatgatgatgatgatgatgatgatgatgataattatgataattgtacctgcacttcatagtatagttttgaggactaaatggtgtaattatatataagggtcttaaaatggtgtttgggacataagttctatgtatatatattgtatttataaaactccttttctaatacgtctgaactttcctataaccataaaagattactttttgagattacttctttagagtctgtttctttctagatgctctgccagccttttttttttgaggcagagtttcactcttgttgcccaagctggagtgcaatggcgcgatctgggcgcactgcaacctccgccccccgggttcaagcgattc

SEQ ID NO: 11351 - DNA, 6000 bp, Homo sapiens
taggagagaggaagtaaagtggacgttttgctgggctggaacagaagggagatgtctataaatccacttcacatgtggggcgtgtgtgtgtcaccatgaggggctgcagcctgaataaagaaacccctctccctcctcaccaatctctagtgcatgctggctctaggtttctgcatctttctcctgaaaattccaccctcacttccagcgcatgctgctgagctatccagtcctcaccgccctctctaaaaccttgaaacctaaaactagctcaagagacctttatcagtgaatagcacaaatcaaatgaatcaaaaagtgacaataaaggataaataattaggcctgtgtgttgaaacagcacgttttaactccatcccccaaaagtgctcccccgctcaccttcccctctctttggcacttaccttctttgggtggtcgcttggcctccctggtaagattgcagacttgggtggtttgcagctcctgggtcaggcagccctctgtctgctcattcaggggtaacaccacgttatttaacaaaatcagcgactggtcgtcgatcccccactctcccaaatgctgagggcaggtgcattttgtatacatgatcccacatgattctgttctcccattttctgattttaagcagctctccaaccaagtacataatacatggcaaccaaactggcttgggctgaccttgttcaataccaaaaactcaaaaaaagatttctgatcttcttccccttttttctgtaatcctgggaaattagttggaaatactcgacgtatttgaataaaatttttatcatactgtagaaaaacgaaagcattcttggaattgcagagttgcattatagaatgattctttcttaaaagatcctttattttttcatgggaaaaatgatcaaactgataagccaggagtgaaaagttagagcagctaaggtcctttttggaaaatttcaggtaaatgctatatttggttggatctggattttccagcgtccaagtgcagtttgtaaagtttttaggaaacatttcacttacagaatacgatccataaatgactcccttcaccaaagttgaacaccagaagtcttgggcagcattaaatccaaacataaccaggagataggtggaaaatatataaatcagcaggttacgaacagccttcatcctatgtcatttggcctgtaaaaatggcaatgaaagtaaaatgcaagtaggagtctacgtgcattgagaaaataaactcctttcaatattacagccagctgttttcaagatttcagtaaaaagccctttttaaaagaagggcaggtaatttttattttataacacaggaaaattatctgttgctgtgtgaacagcgccctcatgtggccattcacaatggtcaaattcgcaacattcaatttaaaaataacatttaatagattattaataggaatgccctaacttatctactaggatatcctccacgtccattatcattctatcgaatgaaaagggaaaacatggagttttaaaacgtcataatgtaaatgttaattgtcgaaatagtattaatcagtctatagtctatacaaccttttctctctctgtcctctgcggtaaacactatcatacaaaatctaatctgataatctgggaacagctgtcatcacattatttctctcctcttaaacgtgaaaagtaatgatgataaattatggccacaattttaaaagcacaaataataatttattacagatggaacatcatctcccaaatgccccacttgcctttgcaggggccaccatgtgaactgctcagaaattcctttgcaaaaacatgggcattcatgtggattagttaattttaaaaccatcatttgagaaagggcatagatggataaatacatagggaagacttgttgttcaacatcaccattgagaaccaggatttagggcagtcatttcaatgtgacatgcccttttgggatacataaagtggatcactgtattagtatctgtatccaaaggtgatatcagttaaaaaaaaaaaaaatccagaaccatagtaattgagctggtttcagtcttttaatttttgaaaaattatcttatcaactgtaatttaaggcttacacatggtaataaaatacattaacatttttgttcctagcagatttcaattattaaattgctccctttccaacaacaactccaaagctcctcttttcttttcttttcttttttaattttaaccctggctttggataataaagtagtccttggttatatttacctctgtaagttgttatccaaaaataacttgaatatttttcagctttaacctttaagaagttatttcttagaataaatgacactgcttttgtttgtttgtttagcctttgagctgataaaagtgatgccaagttaattttaaaagtctttaggctgcagtctcttccactgttctgtaaacagagacagacatacagacatatagatagttaagagttttcatgcctttgcctgggtcttctctgaatcaaaggataaaaccctcttccttcccattgcataacacacaccaacgcatgcacaccaaatccagtgaccgaagtccctgaagatagatctgcattttccagattataattcaaattctatgtcttgatataggcaaacacagccccaactctaaatctctatatagcagcagtttaaaataacatcagaactgctgggaccatcaaaacagtgttctctgtttcaagcaaatagctcaatgaataatgcattttcttcatgagaaaataaagccaatgagcatttaaaggttaaaaaaaaacagagaaagttgtaagaaattctggaaataatttcctttttttttttttttttttggtgttgcactttgcaggcaatgcaggtctgcgcagtgttcttcaggatagagtgtaggcgttgagagccaatgtgacaataagtgtctaaattaggaattccatccatgaaaggggacttcattttataatcaggaactcaaaaagaggtcgtatgtcttttcctaatgaaattggtacttttgctttcatttatttgacagtgcatgtctgcaatgccgtgctcatcaatgatcagagagtgaggaaatagctctgaattcactttaatgcctgctcaagagagcgcactcaatataatgctctttatttttaatcagtctggagtacacagtcttattttgttctaaataataaaaaataaatcattaccctcacccccctttggactgcagggcccgttcaaaaagccgtgtttccctcttaaagaaggggtgggggcgggggcaaaggctggccacggaggtgtcaaggatgttttatttatttatttatttatttatttatttatttatctcttgctgagaagcaaaccagcattgagtttagctattctcaaaactgattttctgggtgacactttagtttagtcgaacatagacggcgccatcactccacagatttttccccccaatagaagacccactgccttctcttaacttccttttaacctaaaattttcccctcataaaattaccccaatcacacaaaactgccagattttctaggtctctccgcttattccttctgacccagcacatctcttgaaaaccagacttctctaacttttcaactgcggcgtttaagtaaatgcagacagtcggatctgctcacagcctccccatccgccagcaacagcctttcctttcattttcctcccttctcaaacattaagcccaaagctccacggtggcgacccccggcagagaaaaggtgacccctggacccccttccttaccttccactccgaaagctcagggaggctcttgctctaagacaccagcacaggcacgcgtcccagcaacagtgacggagagactccccttcggtcccaatcaccgttgcccattttccccggctcagcttccaaaatcaggatttatttttaaaaatgcatacatacgaaaagcaaaaggtggggggtgggaaccaaaggggggtcgatgagagagaggaaaaaaaagccagcaggagcccagaaccttgcgccgtatccaactgaatccaacctccaaaccgaggggggctaaagggagggagaagcccccccaagggagactctaaggaaccccccaaaatgtaagtggcttaatagcaaagatttgtttcataaaagctacccccaacaaaccaagaagcaaagaaagcgctgagacgagaagtgaccggcggcggcggcggctgctatggcagatttgttggggcggtgggtttattacaggagtattcgtggtcggatcggaaggctcaagcttatgctttttcctctttccgctttcctccctcctcctcctcccccctgcaggtactgatggacggacggcgactaaggagagcggggaaaaaaatccttggctggtgatgtcggaaagctgtttgaatgcccagcgaggagggaggcgcgagagggagcgagatagtaaagctctgtctcgggtgtgcgcgccggcgcgcagtgctcgctctcccttgggcgcgcgcgcggggggtgcgcgtgtcccgggagcgcgtccgcgcggcggcctcccgcgtgctcgtgtgcgcgcgcgtcccgggtgccgcgcgcccttcttatgcacagctgcggtgcgccccgccgcccgccagaggctcggctcgcgcggcgcggccgctgcgacttcctggagttctgcctgccgggggcgcgggcgggtgtgtgagagagaaggcgaagggagccgcggggtgggagaggagggagtcccggcgggagggcgggggagaggctggcgggaggggggctccacggagctccagccagggccgcggttcgcctgcacgtcacggctactcaaacccaagcacgtcccgaaagcggtattttctgcgtctgggaggtttttgcatcctcagttcccaccgctggggctggcggcgaccaactgtaagagaaactcactgggaggcgaggcaggggggtgcggaggatgggaaggcgactctgaagggtgggaagtgaatgctggacttgatcgtctttctctttctttcagcgcagacctgtcgcagccagagagctgtcatttcagtaccgggattcagaattgatccagtccgcagcggagggggcacatcccagctaccgagctgctgagtgtctctggctggaacaatagtatttttttctctgcgaggctgcaattaacatcttatttgttctggctccatacaggctttgtcaggatcgcggtgcggcgaccgacgttgggctcttgcattgctttgtgcttggcaatggaatcatggtttcggggtctaaacttttgtttcgttttgtagtcttaatgtatctgattctttttcaagtttccctagtaacaggtttggggacggggtgggaagaagcgagaaaaggggtgaagagaaaaaaccagattatatagaaaggaaaaagggaaaagggatgtttccccaccttttaatctaactatctatctgtctgtctatctatcatcatagatagtcattttgcctcctggacagttggctgacgaagtgtctgataaaccagcttcagatacatgctacaaaaggtcattcgcctcctgattatgtttctacttgtaaacgcagttggtggtttgcaaaacaagtgctaaaatagtgcagtgatgtggtgggaggaaaccataatgggtaattcatataaagtgctggaatcttcgtaagggtgagtttctcgagcggcaggtgaagttgaataaagcaattttccatcatttgttcccctcactcttgcatttttttcctccgcttgtttctctcccctggggcgattatggatagccaagaacaccattttaaaagagattgatagtgaaaacaggaagtttatggtctgttatccactggagttgttt

SEQ ID NO: 11352 - DNA, 6000 bp, Homo sapiens
ctcctctatggacctgctcagagctaaagcctcgtggttcccaacttctcagctcaagaacattctacaataaggtaactcaagcacagataatcaaataactttcccacagtcactcagcagggagatgccctgattctgggagaagcagacctcaagaaagggccatgccctgtcctcccctctctgggggatcttgggcctttcctttgacccttaatgactctccctgctccctacctgggcacaaactggttggcaggtctcttgggccggtactcgggatgcaccatgaagagcatgtgagggaaaccagtgccgaagtaggcgccatccgtgtgatggtgtcttgatgacttgggtgtgtacacatccatgcacttggggcagtagagcttcaccatggcttcacctgggatgtctgaaaggcctgggagacagccagactcagcaggccaggtatccccctattcctacctaacctcccctcaggactcaggctccaatgtgttgagccccaactccttcccataagactgccacacggtgctttcctttcccttcttcaacactcaccaatgggaagcattggctggttctcacagtacacacgaggacagtaaccaaagtctccttgctggtacttttccaactgaggtgaatacaatggaaggggttggcaggtagatgtaaagaagaggcaactcccttcgcagcccaacccataccactctgtcccccactcctcccacctctgtccagaggccccttctctggactagatgggctctcaaacttctgtgttgcctttcttccaattaggcaggctacaaaccatcagagccatttgttgtttgttccttgaggaagaggcagtctatcacaactctctgattcaaggtctgtctccctccctgaaaacaatcccttcaggatgacccccaatcagaattcaattcccaggcccaagttctggggttcttcccctcttctcagctagcttccttaaacagggcttaaacatgacttcttgctgcaggaacctgtgtctcttactgctcagaaggaggcaggtaggagcagagaggcctcaccatctgggcgatgccacggttggtaaggatgtagcgggcgtggatcaatccataaagcatctcggctgcctgctcaatcaggtcactctggttggggttgtcttccagttcttcatctgaaacacagcccggccaaatgcaactacttgtttttcagctttcctaggtgccctgcccatatccaggggctgcgggctattcagtttgcctagcacctacttttgggccttaccccatccaacatctgggcatgggacccagaaacctgggcttctgacccttgcatcaaacgaagacagctctgccttcccttcacaccttttcagcctctgctccttgctctccctcccaactccctcctcaatacataactgcaacaatgtcaatgcagaagatgaaattctagactggaaggtgcaaagcaggagaaacagacaacaaaccagacccatgaggaaacgcattttggaataggtctgaattgcggatttagaaaacatgagaacaagtgatatacgtcacaaaactagacaagagtcaggtggaggatcaaaataaagcatgaatttggggttaaagaaatcagagaaccaaaggaaatttcaaaattcaggcaagtgaatagagatttgaagagaaaaatagtgcacgcacacacacaaaacaaccctgagggtgcctcaccaggctccaggtccaagatcatgtctagagcttgtcgatagtgagggacctgctcattgagtccagtaagattaaatttgtcctggatgtagtcttcatccacctgtcaggacatggaagccaagagggaacccatatcaaaatcctcatctttgacctgggcaaaatgctctaagtgatgccttatcatcaacacaactgcatctgttgtgcttgtttctcactcccaactcagcagaagtacttgtgtctctccctagttcacctacactctctcccataaaagctttggcttttcttttctaaggataagtagatacagcaatctttttcttagacattcttttcaagatctttgtccctactccactcctgtatcccgtctctaggaaccagttttgtcctctcagctggctaaggaaggtggaagctgaacagcatggtttctgaacaaaacatttcaatgtgtagcatttcagttttcctaaaggccacctgagacaagtactagcagtgccactttagtaacaaaagatacaggccgggcgcaatggctcacgcctgtaatcccagcactttgggaggccgaggcaggcagatcacctgaggtctggagttcgagaccagcctggccaacatagtgaaaccctgtctctactaaaaatacaaaaattagccaggcatggtggcaggcacttgtaatcccagctacttgggaggctggagcaggagaatcgcttgaacctgggaggcagaggtggcagtaagccgagatcgcaccactaccctccagcctcggtgacagagtgagacccagtctcaaaaaaaagaaaaagacacaaattgactagcccaacgttatattgctggacggtggcagactcaggacttgggccccagttttgccactttagcacaggttcgtcggggtttataggggggactctttgctgataggaagttttcaaatagcatgtaagagaacagtgcagaagtggaatatgtgaaggaacgtctggtgggaagatatgtgaagctggcaagtagggaggttgaagagaactcacttcacagaagaattcattgccacggagcccacagaaccaggaaatccaggacacctcctctgagctgctcatcttcacgtcagctagaaaaagaacagtgtcagtaaagctcaagttctccttccctgcctctggtatcctccctcctcccacattcggccctccaaccacgggagaattcggaaccaccctttcttaaagcaacccaaactctgaagcactcctctccagctcctctaatttacatctcagccccttttctttgaagttaaacattctttggggtcccaccacttgaaagaagccaacagatactttgacccaccagcccgacccacatccctggagctcccgaaggccagggccctctctcctctgtgtcaactccggcagggacctcgactcaggctccctaccaatacaagtctctgcatgacccccacgcctttcccaagggtttccaagtttatcattctcaagcaagaactgggctcctccttttctcacgggttgggggcgattgtcaggtccctttcaccggaatccacacatcccccctccgctcctcaggccacctctccctccttcgtgccggacctggtcgcttcctcccccgcccccacatcaaagtccggagaccccatgtgccgctcccagcgacaagggactcggagcagcgacgacttcagactcaccggctggacggggaccaggactggggtggggtagggaagttgctacttccagggaacggcggcgaccgctacagcgcaggccgcggacccgaccgcggcaggcgaagtggggtggggggagtggaaattagggagggtggggaagagggcaacacgcaagcgccaagggtcaggtgccgcggtggatgccgggacacggagtccccggtagagaaagaaactggctaaatgagagaaagcgaactaccaatcccaggatgacccgcgcacgacctggctgtcacgaaggcccggaggagggcgcttgcgggcggggcacaacgagaagccaccggaagcggaagccaggtatggcgttcggggcccgggagtctgggcaatacagttttgtgctcactgggtgaagaggctgacttagggcggggaaaggagggagccaggctggatctctttccgcagctctcctcacgttcccctctagtcccggcgcggcgctgctgcccaggggactggcctatcctcggccaatccgctgggtccttattgcctgttgggcccctagtgcgaatcagtcccgccagagacccttgacgggcatactgtttcctccgggctcctgcctcatgaggggagaggtgcggcttggctccgtgcgtagggacttgggtggggtggggtgggcggtgtgagaactggaacgtcccagtgcgctaacctgaggtggtgccagccattctgctcgtccctttgcacttctccatttccccttaggctctaagtgtgaccttcgaaccctggtcagagtaatggtgaggggcaggcgtgacgttatttcattacacggcttctcggcattccacaggtttccctccgcctcctgagggcctttcctaacccacagagtggattcctggctccagaaaatgggcttggagcgggggccacgttgaggaaggcgaagggcattgtgggggcgttatgtaaaagtaggaccccaaccgacagatcctagtgctcgcgccacctgggcgcgcggagctttgctcgtttactattgaaaaagttccagcgcgggaaactgaacccggagctttgcgcacgcccgagccctcaagtaatgtgggttgtggtttttgttgttgttgtcgccacgcatgcgtcttcgtgccgtgtggctatttgattgtgtcaactcttctgattagaatggcgccattttgcggtacggaagctacacagcaacacgtataggagactctccccgagatcttctagggagtgacccatctatttttgtttgggaagaggaaactccgaaatgggatcgcggaagacttaaagggccaggctgatttttttttcctactggtatgtcttacggggtgggaaagtggtttcagaaagaggctggtgtttattgttggtgaggatgggggtgggggccggacgcaggacctctggacaacagtctcatggagttttattaatctttactaaggagcaaagtcggtattgtagggttccatgtttttacgcaaagtctctctcccttaggccctgcagagtcctaagttgtggggttactttagtggcaggaaagtgtttttgactactttttctcatcccagcaggtctctgaggctgtggttgctacagggtcaccacgagcttggcttacttgtctcatccttcccttgcctggtatcattttctcagttctcccaaaagccatgtcccggcccttgctcatcaccttcaccccagccactgaccccagcgacctctggaaggatgggcagcagcagccacagcccgagaagccagagtccaccctggatggggctgcagcccgagctttctatgaggccctgattggggatgagagcagcgctcctgactcccagagatctcagactgaacctgccagagaaagaaagagaaagaaaagaagaataatgaaggcaccagcagcagaagcagtggcagaaggagcatcaggaagacatggacaagggagatcccttgaggctgaggataagatgactcaccggatactgagggcagcccaggagggggacctgccagaacttaggagactgctggaaccgcatgaggcaggaggagctggggggaatatcaacgcccgggatgccttctggtggaccccactgatgtgtgctgctcgagcgggccagggggcagctgtgagctatctcctgggccgtggggctgcctgggtgggggtctgtgagctgagtggcagggatgcggctcagctcgctgaagaagctggcttccctgaggtagcccgcatggtcagggagagccatggagagacaaggagcccggaaaaccggtaaggggaaactttagctcagacccatgtctcattgtgttctgcctctcccagccacaccacaccagacgccccagcacagtgctgaagagttctttccttat

SEQ ID NO: 11353 - DNA, 6000 bp, Homo sapiens
tcccatgaagcctttctgaccactgcacatgctccttccccttgctgggctgtgtgctgcatgtgtgtacagggggacatcacatttgggtgcagcctgtcgtgtgggcgttccttttgacgcccgtgtcttgagagggctgtgtggtgttagcaggttagaggcagatgctaaagagacaggcctgaccattcactgacctagctttcctttccctgagcttcagtttcctcacctcttaaagggaaataaaaatagtatgagttgtgtgcagcttaactgagaggatgcctgtggagtgttcagggtgatggcagtggttattactattaatctttttctccccagccagacttgatgcctggacttggccacagcttgcttggtaaacccatttactgacatattaattgatccctcttctctcaccaggtacatggccacctctggcctagaccaccagctgaagatctttgacttgcgagggacgtaccagcctctgagcactcggaccctgccccatggagcagggcacctggccttctcccagaggggactgctggtggcgggaatgggtgacgttgtcaacatctgggcagggcagggcaaggccagcccaccctcccttgaacagccctacctcacccaccggctctcaggccctgtgcatggccttcagttctgcccctttgaagatgtgctgggggtggggcacactgggggcatcaccagcatgctggtccctggtgagtgggccaggggatggggcttgaagtgaatgaactctgggtggaagtttgggccagagacatccaggaactgggggcttagttgggctggagctgttggactgaggttcttccttatggctccatgcttctccctccctcccttcaggggccggtgagcccaacttcgatggcctggagagtaatccatacagaagccggaagcagcgccaggagtgggaggtgaaggccctgctagagaaggtgaggctcccctgctggagagggtgagatcccccccattgctggagagggtcaggttcccccgtcctggagagggtgaggttcctccttcctggagaaggtcaggttcccccctgctggagaaggtcaggttccccactgctggagaaggtcaggttcccccctgctggagaaggtaaggtttcctcttcctggagagggtgagattcccctctcctggacggggtcaggtttccctctgctggagagggtgagattccccctgctggagagggtcaggtttccctctgctggagagggtgaaattccctctcctggagagggtcaggttcccccctgctggagagggtgagattgcccctgttggaggtgaggttcccctgctgcagagagtgaggcccctgctgctggggaaggtgtggtttggggttggaggtagagaaagctctcctgatgtctcatgctgggggtcttgggtagaggggttcagcagcctccctggcttctctttttggtgctaccctcctgtggctccttgctgagtcctgtccctctgtgacacccccaggtacctgcagagcttatttgtctggacccacgagccctggccgaggtggatgtcatctccctggagcagggaaagaaggagcagatagagaggctggtatggagcaggcccctgaatgcccaggcccgtcttctcccccacatcctctccccaccatggcttgtccccagaagtgcggccagcaggtgggtgctgccagttccctgactccgaggctgtaacagatatcactcctgtcccctccctcagggctatgacccgcaggctaaggctcccttccagccaaagccaaagcagaagggccgcagctccacggcaagcctggtgaagaggaagaggaaggtcatggatgaggaacacagggtaaatgagcattggcatgggccgggccttccacaggctgcaccctcctgcttgtgcctctgcccttgtcagcctgccacttctcactctgtgcctgtgtcctccccgtctccggtccccaggacaaggtccggcagagccttcagcagcagcatcataaggaggcgaaggccaagcccacgggggcccggccatctgccctggacagatttgtgcgctgagccagactccagggttgcctgggaacagtctctccccaagatcacctgtagggaaatgagtgttccctggaacaaggaggtgggggcagtgtggccccttccccaactgggggtggacagctgtctcctggggtgggttggtattaaagaggaaagcgattttttggataatgtgtctggatcatcttgtggacctgttcccctcccccttgccaagcatgaggccattctaggatcggaggggtcagtgtcctgcctctacccccaccccataccttgtggctgctgtggccttagctttgccttttaggggccttcctcctcagagaggctgtcctctctcccatgtccctggagatgtccttcccatgcagcagggtctggcagcctctgggctctccaggtttgtggtgttctgggggtcctggtgaagaccacactgcactcgaagaagtggagacaagtttattgaggagcttgacacccctcttctgccctagcttgagagaacaactgcagcatttttttctttttctcttcccgatgaccatcttttgggctggcgggccaggcccctgggtgtctcccatatcgctgtctttagtgagactgaggatctggtataaggaaacagatcagctgcagccagtgagggcccctgcgttgggcctgggagagagaaggtcctgttcctgcctttcctgtggccccaggcactctcagctctgaagccaggctattgctcgacaccgcaggatgcccaggactccctggaaccaggagcaaaagggcgcagtcctttccccgtcagagccacccaccagcttccaggcttcctgcatcttccaggggtccagcctgtgggacgtcagcaggaatttcccatagcagcaccggtctagcgggtagtgggtggcaccagccagcttgacacactgtgttggggcgaggcctcctcgtcgggcacttacccccacaaagacatcctctaatgggagaaggggtgcccggctggccaccttgagaatgagctgcacagcagacgctgacagcacataccccgtgcctgaggcatagggtggaaaggggccccaggtgtgaggccactgctcctctgatacgcggtgcctgccccccggtgtccgagaggggttcacgcgccagtgcacccggcccaagtacagaagaggcacttcctcgctgtgcaaaacctggcctccttcctgctcagcctctctctggggttccgtgcttctctcccattgcccccaacggccccctcgcaagaccagctctgataccagttcagggacgttgacatacacatcatcgtccgtcttgaggacgtatcgggccatggggcagtgtttctcagcccagttcagcccgctgagggtctttagggtgaggttgcggtaggagtcctggaaggcggcctgcaagatatccccctgggctgctgactccgaggccaggtcactcccctgggaaccccacacggggtgctgtgcgttcggctctcccagcaagaatagcgtctgtaccctgagcccccgggcctcgcgcagcccgccccacgaagcccgaatggcgtttctctggttcaggttctccggagccgtgcacaccaggatgagcaggaagggaggggccccgggaccactgcaagcttcctggttggggatcaagaggcggggcagggccaggggcggccccggtgaggcgggggctgggagcagggaggctagtgagaggctcagcagctcctcccccaaccccgaaggcccgaagagggtccagacgatcaccagcagcaaagcggcgagaaggaggcgccggaagagcctgagctgcatggtgcggcgtactccgaggggatccgtaagagcgaagggcggagactagctccccgggcctgggtcacggccggggacttaaccgaccacgcccgggatgcggaggtctgagcgcgcgaccgggaccagcgcaccctggggggcggggagaggcggtgcagctgcggaccgcggtcgaggcatgctgcgggggtggctaccttgtcgccgcggcctcgccgccagcaagctccgctccatggctggccgactgcggcactcacggcccctcccccgcctcgccccggcggccggtctgccgcccgcttccgcgttgcgcgctcccatccccgccggaagcggcgtcggagcagcgcggcagggcgcggaaacccgggcgggtggagtggcaccaaacggagtgagaccggtctgtccagccgctccccatcccaacccaccgacgtactccaccagggagaccacacccttcataaccaacgtccgcgtttttgcctttgttgcttcggtcacagcccgaaggattttcccttatgactagatgaccccttaaaagaaaacaaaaacaaaaacaaaaaaacccagagtgaccaagacctgcaaactcaccttaactgcaactggctaggctcagctaacccactccacaatgatgctgcacaccaaccccagggtgttggtctctaaactggtctgggtcagcccctcaaggctgaactgttttaccctcacatttctctttacagagagggacatcactagctacatatagggagactggggggtctgcagcatcaccactgctaaaactaatagcactgtgtgggcaactgagtagggcagctctaaatggaaaaaggacccagcactttaacattccctattagaatggacagaaaggacaggaagccataggtatataaactatttattaacagacaaggcctacagacttatttcttcttggacacacccacggtgcggccacggcggccagtggtcttggtgtgctggcctcggacacgaaggctgcaggtaaaaagagaagagtcacaggtcatgcacagcagaaacaaaaggttggggaaaaagaagagcgagtaggaggaatgctgagtcgaggtaggcagggagatgagaccccccactcacccccagaagtgacgcagccctctatgggcccgaatcttcttcagtcgctccaggtcttcacggagcttgttgtccagaccattggctaggacctggattcagaggagggggcaagggatgttttatcccctgacctcctatgcccaattctgttaggaccctccacccttcctctaatcctgccctcatttcagtacacacctggctgtattttccatcctttacatccttctgtctgttcaagaaccagtctgggatcttgtactggcgtggattctgcataatggtgatcacacgttccacctggcaggcagaccaaggtcagatctagatggacccctttctgaggctgaccccacccccagcccccttccttgtcctcacctcatcctcagtgagttctcccgccctcttggtgaggtcaatgtctgctttcctcaacaccacatgagcatatcttcggcccacaccctgaatgaagtgaggggtttcggaattagtgttgaatctgatttttaaattcctttatagcctcattcaaaaagctcacaaaggtaggatctgcaataatctattttgcaatcccctaggtcaccctttcctcacccacctttccagatataaaccgttcgacagaaggttaactttgggccggtcgcagtggctcacgcctgtaatcccagcactttgggaggcccaagtgggcagatgacattgagggcaggagttcaaaaccagcctggccaacatggtgaaaccctgtctctactaaaaatacaagaaaagttgctgagcatggtggcaggtgcctgtaatcccagctacttgggaggctgcagcagaatagc

SEQ ID NO: 11354 - DNA, 6000 bp, Homo sapiens
taaacctgtctgcccttcagggcagccctaccaaaaaaagcaaaaaaattacaactaagttattataatgactttaaaaaatgtgcatgttgatatacaatatgaatttcaagaaaggaaaagggagttataaagcacgttataaaaagaaatatctggccaggtccggtggctcacacctgtaatcccagctctttgagaggccaaggcgggcagatcacctgaggttgggagtttgaggccagcctggccaatatggtgaaaccctgtatctactaaaaaaaaaaaaattagccgggcatggtggcaggtgcctgtaatcccagctacttgggagactgaggtagaactgcttgaacccaggaggtggaggttgcagtgagccaagatcttgccactgcactccagcctggctgtgacagagcgagactccatctaaaaataaaataaaagtaaaaaataaatgttatatctgatgagctgagaactgttaaggcattgaaacacagaatcatgaattcttgtttctctttagtaattgggcacttcctcaacaattgtcactaattttatggatgggggcaggctatagactgagtgtttttgtcccctctaatatattgaaacctaatccccaatgtgagagtatttggagctggggtcctctggggggcaatcggtgccctataaaagagacctctggttagagccctaatgagattagtgccactataaaagaaaccccagagagatccctcactcctttttgcatgtgaggacacagcaaaacaaaacaaaacaaaacacaaaaaaacaacaaactacagtctaagaatcaggatgtaggccctcaccagacaccaaatctgttggtgccttgatcttggaattcccagccttcagaactgtgagaagtaagttactgtttacaagccacccactctatggtattttgttacaacagcctgaatggactaagacaggtaaaggaaaagaagataaagaagaaagttcaacattaaattgggatggtcatgtagtcttatttctaagaaggtggcttttcattttatgggttgtgtaaggttgcagaatactatggtgaatgagtgcacaggctctccagtcagattacctcgttcagattgtggctctaccacttgctgtgtgatcttggataaaccactttatttctcattgcctcaatttcttctgaggcatagggaaggggaggtcataatatcacctcacagggtccttgtaaaaattaaatgagatacacatttaagcacataaaagtatatggtatatagaaaacactaaataatgaaccagaaactatatcattctgaaaaagaaactgctggtcaaagatgtaacaataggggatatttcacaaattttccaatctttatactttagtaaagtcattcctgtttgactgtattaatttatgtttgaacttccattaaatatcttttctccttgcaaataaaaattacctcatagattttcatggcattttctatcgatattttcccatagaatcataagtcactgatgtagttttttctgcttagtaaggtttattgccaatttccagtagaatagactttactgtgtacaaaatatatattattctaatgtgcaaaaaatgtaaaatataactcatagctactattatatatccacccacctcaaaatgaaacacaagggtagtcatactattcattttggtaaaattttttaaaatttttatttaaatttaaattttcacttaaataatcaagattcattaaaacattctatgagatagtaactggactatactgtcgtagatgctacagaagctgctatgcagtcattatctagctgggataaaactgaccttaatgaaacaaccaataaagttaaaaagtagaggataaataagtacggtcatttgctgcataacattttggtcaaagatgaactgcatatacaagtgtgggaccatacaattgtaatactctatttttactgtatcattcttatgtttagatacaaaaatgcttaccattatgttacaagtgcctacagtattcagtacagcaacatgctgttcaggtttgtagcctaggagcaatatgatatactatttagcttaggtgtatagtaggctattgcagctaggtttgatagatgtactgtatgatgtttccataatgacaaaatccctgtcattcagtgaaacgtaactgtactaagttggatagtaaaagtcataagggctatacagaaatcagaagactgtcaaaatggcaagtaattaaggaaggaggtaaagtaataaggtgggaggaggcaatctgccaattaatacatatgtgaccatgggcatgttaactgctctgtgctcactgggtctttgtttataaaatctaatgtatttaaactgcctagtacaatctacatgaactgagtgttaaagaatggccaggtggttatgagtgaaaaatgattcaggtgacagaactaatacaggctagagatgggaatgctttgagtagtagagatataaatctttaaaaaactttggcacacacaaaaagaaaaagaagttcacatgtaattttatacttttctataaatttgtatagtagcaaacttgttttttcctgctgcatggaaaagtaactttcattcagtattccctgcttctcttcatcttgactcaggttataatggaaaagttactctttcaacagtgcaaaggttctttggaaaagaaacagagcagtgtcaataattcaaagtcacaaagtcaattatagcacgctgtttatgtgtttacaaagacgatacctcaatagattgatttcaccccacaaataaaaaaagagcgtttattaagacaaagaggaaagagggagagaaaaataattgctctctgctgtgtgaatcttgtttgcatatttcttatgggataactgattagctggcaggcagtaaagaggtcattctggacacattgtccttgggtaggctgactaggcatacaaaaaatcctgcaaggcaggctgtttctccgtattgtctgccagtgacctttcatcagtactttatcttagttgaaccagaactacactccttccctcgctagaagtctcagtatatatgatgtattcctctaagaggaatcctttttctctaaatctgtacttctgagcctgtatttgaaagtgatcataatctggggggcttaaaatggagtttcttttacaaagagttataatcataaccgtttatttgaatataaatttgacattaaacataaatatgcaaaatttaaatttccctttggtcttgcatttttctaaggattaacaccattattctcacactccaacaaactaatatattgtactgataatcactatcaaatgaattgtaagagctaactgactcgaatagacaataactaaccttacttttaaagtattttaagagacagtagcatagatgcctgcacatagctgattattgctcctgtgctgcagtgaattaccacatgaacacattttgaaaagatttgttagcttcatgtccacaggcattatgaagcaggaaccacttttagattaagattgtaacctgaggaaaagaacatatgcatcagtttagaaattaaaatcccctgagatatttctttcagtaatgcttaaaagcctaaatttgtgctcgtgtgccagtcacctctacgtaaggaaaaacattttgctactctttgttaaaagtgaagaggaaatattgtccacttgttttgtagatgttggccaaattatataaactttaaaatctgtaagacaaattgaaatattcctttattatgtcttgttaggatgagagaagtttgcctttcagctgctccttaattttaaaaataacaacacagcaacacttctctttaaaatcaaactctgctcatttaaattctttggtaatagccatgaatccacaccttaaaagaaggaaggcctgtgagttcgtgaatccactttcctactcaggagaagccctatgaactgacttgaatagacagtaactcaccttaaagtaaatattttcagaaacaataggttaggtgccttagaaattcattcagaggcttagaaatccacattaacacagttcttacatgcttgagtctggtctacatccatttacgtaagtaaaactccccttccagactgacgaaattctttttgtgacaagaagacaaaggaatacgatggattgataagcgtagtcaaccgcgcagagagttctcgcgcgatgttacgacgctaccgccctgacatcaccagttgccatggtagcaccgccgagagtaaaggaggggtggtgctagacgtttcgggcagagctcggccgctgcggaggacaaggaactctccctctcccactagtctgacttcttccaaaatgagcggcctggatgggggcaacaagctccctctcgcccaaaccggcggcctggctgctcccgaccatgcctcaggagatccggaccgagaccagtgccaagggctccgtgaagaaaccgaggcgacacaggtgatggcgaacacaggtgggggcagcctggagaccgttgcggaggggggtgcatcccaggatcctgtcgactgtggccccgcgctccgcgtcccagttgccgggagtcgcggcggtgcagcgaccaaagccgggcaggaggatgctccaccttctacgaaaggtctggaagcagcctctgccgccgaggctgctgacagcagccagaaaaatggctgtcagcttggagagccccgtggccctgctgggcagaaggctctagaagcctgtggcgcagggggcttggggtctcagatgataccggggaagaaggccaaggaagtgacgactaaaaaacgcgccatctcggcagcagtggaaaaggagggagaagcaggggcggcgatggaggaaaagaaggtagtgcagaaggaaaaaaaggtggcaggaggggtgaaagaggagacacggcccagggccccgaagatcaataactgcatggactcactggaggccatcgatcaagagttgtcaaacgtaaatgcccaggctgacagggccttccttcagcttgagcgcaagtttggccgcatgcgaaggctccacatgcagcgcagaagtttcattatccagaatatcccaggtttctgggttactgcctttcgaaaccacccccagctgtcacctatgatcagtggccaagatgaagacatgctgaggtacatgatcaatttggaggtggaggagcttaaacaccccagagcaggctgcaaattcaagttcatctttcagggcaacccctacttccgaaatgaggggcttgtcaaggaatatgaacgcagatcctctggccgggtggtgtctctttccactccaatccgctggcaccgaggccaagacccccaggctcatatccacagaaaccgggaagggaacactatccctagtttcttcaactggttttcagaccacagccttctagaattcgacagaattgcagagattatcaaaggagaactgtggcccaatcccctacaatactacctgatgggtgaagggccccgtagaggaattcgaggcccaccaaggcagccagtggagagcgccagatccttcaggttccagtctggctaatctctgtcctgtgagaagcttctgcacaagtttccttaccacctcctcttggacctatgcttggccaacagcatgcagtcttccatctgctttctcttcatactgtggattatcttttcctttggttctaaatcttcagtaatcggttgcaagattgttggcttacctgcctgtgccattcttcctctgggccttcatgcttttctgcattgtgttaacatgtttcaagtgcatggccttctacggcttctatgccaagcgtatgatactatagatatagtgtaccatact

SEQ ID NO: 11355 - DNA, 6000 bp, Homo sapiens
tcctcatggctgaatatcaaggtctttcttgaagggagatcagagagacacactccaaggtcacctcacagatcaattcctccactgtctcatctctgcagtctcaaacttcagcatcctcctctcccaccctaacatcgtatctttccaacttttactcccttactctcattatatttgcttttcaattgtaaaagttccactcctttattcccatgaccttctctccacatttcagctttgccttgatttaactgctttttccagataggctacacccagtttcccatcacttcatctattcttctgccaatatccttacattctttgcccctttttcctgtttgagtgcccacactgcaaaaccctgtttatctatctgccttctttcttcctacactcaaactgctggctacagctaaagaaaaccatataccaccgcagattaatgtcacatggtttccagtcttagctgaaccctaacactatacagaaatcctatagttaggtatttccttctcatatggcatctgaaaagaaatcttctaatttttatttcacagcatgttgaagagcatggcggaaaaggcatgggctttggagtcacatggatcagatttgaattctagctctttacttcctgtgtgaccttccctaacttctctttggtcttttttccccatctgtaaaatggaggtattactaactactcaacataaaataggtaactggtttagtgagaagtctcaaatcattggaagtatatactcaaagttttttctcccccaataacactgccagctgtacactgttgaaaatccccttttccactgagtacatctcaatccaattccccaacattttgaacattttcagctttcaacagtcctcttccccaccagggcaggtcaggtaggaggctgtgtgtgggtttgtgtgtgaaggcatgatctgctttcttgaatccacacttccaaccttctatttactgttccagtgtctgaaaaagcaggcagggagggaagaatttgtcttcttatgcactgtccaggttgctgtcccaaacaagtaaatgatcttgtctcttttcatacgctcaggatgaccaggtggttaccataataagttccattgacaaagatgtcagtcctaagcagttcctgaaaacattgatggtcctttggaagacttcatctgttggcagaattctatccctcccacacccacttcctatcccaaggactgcttcagtggtccatatcataccttctttcttattggttattgcaacccaactctggagtcaaaggtacaggtgagattcattttctgtacctcccaggaatcagggacttgagataaggtgtccttgtcttggcctcgccataccacctagctacctctccctaattttccttcctttattttggtagcactgggtaggaaatcacagcctagaatgaaggtttctatgaacttggctcccaaaaatttggtatatatttgttaagagtgtactatttcaccataattcctggactaattagtaaccccaaagggtcaggaaaagatcccagtcactactttattctgatacatgtatataaattatcatctacaactgacctggcctataccaatgaatgttattttttcttggtgagctataacagttacatttctaaattgtatgtttgtctgtattaccaatataggatgtacacatacactgttctaactattttacaaagattaacatgtttaaaccccacagcaatcctgtgaggcagttatcattataatccccaatttacaggtaagggaattgaggcacaggttaagtaacctatttgttttccattcacctatttgaattctacctgccagggatccaattaagatagtcaaatccatcttcaaaagaaagagtgtttttttaaattataaatgatttttgggattacaacaatccacaaataattggataacttgtcacctttgtgatctggaagaggttgtatagcatggtccttgatacacacttgatatacaagaattgtctagtccttggaatcttttagaattcattcataaatctctttctatgtagtagcaatagttctttaggaactatttcaattgttattggttggtttacttttcctacatattgttgggttcttttgctatttatatattttatatttttgtaaatataaagctctcttgagctttcctcatattatgcatggggtttccttctcattttatttattttttagaggcagggttttgctctgttgcccaggcttgagtgcggtggcacaatcattacagctcactacagcctccaactcctgggcttaagtgattctcctgccttggtctctcaaagcactggattacaggcatgagtgactgcacctggctcttctaatttaaaaatatcacttttattcattgtcatatccctcttcagttctgtagatgatgtttgcacaatctgataaatttgaatcagaaaaacacatgtaagatagctcaacttaatcagttcaaagatttatatacaaatttaagaattataaatgcaacacttatttttcagttttaaataatgtctttttttgaaatgagacattttaaacaaatagtttaatatagtttggtattaaatgtggcatttttagtactattttcttcttttgtgatctagtttatattcttaaaaagtcccctcccaaaacattaaatatcctaatttcatctgagcaatgatacttatacacacacacacacacacacacacacatacacagagtcactattttcattacttatatctgcacagaacaactgccaagattgaggtttattgaggttcaacgataactgtctttgcttttaaaattctccttgtagtcctaacacactgtcacaacaaaacaaaaatatggcagtttaccacatggggtttagtaatggttagatagtccttaggttctccaacttgtgttatgataaattttaatcattctgaaaaccatggctgtatcataccatgtacatatcatccatgtatcatggatttggggggaagcattagttcagtatatactcagaattcatatgattaaaagaaatggatactttagcaacataatattctcacttagtatttcaattagttctaattgcattagccctctatcctcccaagtttaattactagggacacaaaaatttcatatttggtgccaagtgccaaaagagcaacatgtttttactgtttgcttttactctgtaatagatattgaaatattttagatactttcaccttcgcatgtactttttttgtgtgtagtagcatgccctttatattgataaaaagatgtagaaaacccgagtaaacgattttctttaaacactgtttagaattaggaaattggcagttttgaaataataagtgtattttaaactcgcaaaggccaagatatttctgtaatattttatacacttcttagaactgcatcacaaatgaatttcaaaaattctgttcctgagactgtggtaactacaaagcatgaaaaaaaaatctatacatagtgctatagcttctgctaattttctttttgggacttaaaaaaatctatcctcttcaagtgttagataaaacgagctagtgcacattaaaataataaaaaggaaccaatcacattcgtctttcatgtttctgtatctttttatcatcagaaacagctgacccttggctaacattacatgatttggagaaataattggaagtctaccacagggagactaaatgtaaaactccaatcagataaattacaacacggatgtggtaagtgatagaacacacacctaaatctaatttaacttccaagaattttaagtagtatttcccaattaaaatgtctttaagggaaaaatgcaaatatgaggcctttgttagcaagattccagaacaggaaaagcggaactcaaagcctctctagttaagcgacctgcgttccgacttacctctgagtgatgggcctactgcagagcccgcctcccaccacagtgctggcccagaattttttatacgaactagttcgtaactaaacgttggaagcatcaccatattgccagtgagaagtaagatttaaaaataaaacgatgctgtcccttttcgcccttccttaggacgtctcctcctgcactaagggttcaggtgaagggtggaaactggccaagaagaggaagaacgtgaaggagtagggggcaaggaggaaagggctccctttacagactttggtgccatttttactttctgcttgctaatctgaaacgttgtgcgattacaatgacggcccctctccccctcgggtactaattacccccgggccttttccggtgcacatcccggtgctatattctggtgcctgtgttgcccccacgcccccattaaattagtaaaggaaaaccaccccttttctgcccctaaagtaatctataaacgaaggaatacagatgaggatttaaatcccaatcctaattccaagggaggctggaagccccctcagccgcgccctggcttggctttttcatctcgagcggttgtgacgccaggggcaggtcttccacgtgtcttcacagaggtgcccggagggagggcgtgagggattacccaagggaggggcgagtatcgcaaaataggccaagtcgctgccctctactcaactcgcagggcgggaggatggagacagagggatgcggcgggagggcgggacagcccagtcgccgccaaggaggcgaagcggggtcggggtagctcacccgccccccgcagtccccgccccccgcagtccccgccccgcgcggcgccgcgcacgcctgaagtcattgcccgaggccccgccccctcgcggccccagccccggctctggctctgccggcggagggggcggagagaacccgcagctgcaacttcgcctggagcctttgagcctgggctcagccggggatctagcagccgtcaccgccgagtcgccgcttccccggcgcgggcctcagcccagccggcttggccatggcaggcgccggcagtgcggcgaatctggcccctgcgctccccgcccgtagctgagcagccgttaaccagccatcccgcctttcctcctgcccgtgtcgccgaggcccacgctccgcgcaagtttccgccgccgaagaagcaggaggacggacgtgaggagtcgggcgtccctggcccacccggccctctcgcccgcgatgtgggggcgcttcctggctccggaggccagcggccgggatagccccggcggagcccgcagcttccctgccggtaaggaacgggacagcgccccggctggggtgggggtcacggccgaccgcggcgcctcgggacctcgccgccgctcccctcccgcctcaggcctgtcttaccccggccgcctccccgacgccgccgcgtgcccagtgtcctccccgctgtcagcacccgggctgacatatggcttgccgcgtcccaggcgcatcagccccgcatcccgtcgtccccgccgctcctccttgggctgcagccccagcgcccccaacttccagctcgcttgggcccccgcgggttgggctttattgtctgcccggttttttccttttactcgtggggtgtgtgacctgcgtgataacggggcttgcccgtttgctcgcggggacccgggcgggaaggtcgctgcgacagtgctgcggcggcggcccgggcgcgtctcggaggggccgcagttccgcgccctcccgacttctggtaggcgcaggctggggttggctgtgcccacgcccgcagccgctacttttagggcgcgttttcgggagggaggatgctgccagagatgcggccgctctcagccacccccaagggaacttcagcccctcggaggaacctggtcgccgccccgcagcccctgcggcgtaagaggaggg

SEQ ID NO: 11356 - DNA, 6000 bp, Homo sapiens
ggccagatgttaatggggaaggggttcaattgtaaattcaaaatcttgagactgggacaccctgacctaggaaagtcaagcccaaggcagaaccaatgcacatctcctctaccacctccccaactgtgtgcccttactgagggctccctcttctggtgggcaggagaaacatgtgcttcaacatgccccagaatgaggaaggaggaggctccctctacagagaggtgggcaggggagagcacaggtcgacttgggtctgccctcagcttcccacagcaaacagcaaacactgatgttgtgcttactgtgtgctaagcactatttaatttatttatttatttattttttgagatggcatctcgctctgtcacccaggctgaagtgcagcggtgcaatctcagcccactgcaacctccacctcccgggttcaagtgattctcctgcctcagcctcccaagtagctgggattacaggcgtgtgccaccatacctggctaatttttgtatttttagtagagacggggtttcgccatgttggccaggctggtctcgagctcctgacctcaggtgatccgcctgccttggcctccaaaagtgctggtattacaggtgtgagccaccgtgcctggccactaagcactattttaaatactttacgtatattaactcacaaatacagaattttgttttctctaaaaaaaaaagggggggggatatataaagttataaaaatacactgacaacagttccaaaagcaccattatggcatttcttcattcttggtagtatcaagagccatgaaaacagcagtggtctgggcctcttttcctcaggctacttgagagggtgtgagctcaagaagtctccataagcccacaacctcagcctggcatttgatttgctgttagagaagctgaggcaactccattaaattgtgtctgagcccaagaggccatgttgggaacacaggagaggagagggctctgggtaccttgaacttggtggggtggttgtctggaacgctgtctctgttcaggcagctgcagcagctccccatggtgtcagagcagccagcctgccctaggaaaaacatacaggatatgcaggtcaccaacttcagcttcaaaaaaccctgctctggggaacttgggcagaagcacgtcattgtgatcacctactctgtccaagagactgtgtgatacagaccccccctcaaagacttcacattctcaatccagggccagacacacattggataaacgttaattcaagttacaatgtgttaaggatgaatgccgatggggggctggagagagcttctcagaggtaacatttgatctggaccttgagaagtatgtaggattctgacccatgtaatgacaaggaaggcagggacacaggcaggaagaaaagtaggggtccaggagaagtgatctgcagcagatggaggtgggtgccagcccgagccccttatttggattcagcaaagaaattgtcacttgggggtctcagacactttggcctgtgcctgtctcttttttcctccctttttacctcatccattccacttcatccaagttctctcttctcccttactaccatcccaacatccagtgcaaatttatctttctgatgtcctcttcaaatgagttgttacattgtgatcataaagatatattcagaagactgaacatttaaaacagtgcagttttaataacctcaagtggatatttcttcatttaaaaaaaatgctgggtttccttccctttttctgaaggggagaccagaggccttactatttggctcttcccctccaggattccagtacttggattatatgtcacaatagtcaggactgtgcctagaatgaagaggacaccacccaagcttgaatgacctaagggaacaagaaatgcatggaccaataccaagcagaagttttaaggggttgcaacttgtcacaagaaataagtctgtaggattggctatccttctagaactcctgctgaatggtaaagctttgaacaaccaggtgacctgtaccctctgttcctcccaacttgggaaacgccataaaactgacccctatacacagctcttacctcacccaggccatcggggagctgaccgtgggaggggcatggggaagggttcccactttattccccccgtccttggtgggctgtcatggcaaacagtctgcagagaagtcacccggatccctctgggatacacctggggctcacctagcataggaaacagagacactgattaacaaaaccttctatcttcacccccaactgttaatgaaaactgacctaacagtccatcccacctgggtatctgttccagccctaatgggacaaaaacaccaatgaagaaagtaaaatcaagggcaaagggagcacaaatcccaagccccacgggccctgagagggacagacaccaagaacatcaataagtttgaagtctaagacgaccaaagaccttttaagtcactttagatctccctctgagtcctgttacaacaaacaccaaaaccatcaccttacctttgcagagaactttaactctacaaagagctttctcaaaaggacactgtgatatagtagagacagcactggtttaagactcaggaaaccaatatatcggtcagttttgttgctactaagtatctgggagacttaagtcaacgccccccccaactcccacctaaggccttagtttttgggggaaccatctataaactggggagcttctagcttaaataacttgcagaggtaaaaacgtaagacaaacttcactaaaattgacatgttcatcttccaagacaggctgcttcaatttcgcatttggaagcttgatagattttctgctccccaagctctgaaaggcctaattttaacataaatgttaacagtaagccaaaatttcaggatatctgagcccaaggtagacaagtcaacaagccaggactctgcagaccctggacatcccacattcctgctctggagaaacacttcccagggccccttgcaccctgcatccttggacaacttccaggtaaaaggaccccatccccttggtctggcttattttctggaaggaagaagcaggctcagggaggtgtgcacagactaaagataggttgctgggaaaatactggggcttgagccaccgacgggggcacggcgcgggcactgaaacgaagaactctagggtgcaagatgggggaggggctgaatttccctatcaccatctcttctccttaagatatcaggatgtatcagatagcccactgaggagggactgcattgagtggaaatggggagaggcctctggtctgggataggtatggatcaggggcaggagtgagaggggggtgtgggggctgaaaacgtatgaggacgtttggggaaacatgagcaagaattttggatgtgggcattttggatagtgcaaggagaatggggatatgagggatcctaggaatttccgggcagtggaagcatttgggggcatccaagagaaatggtgggtccgtgggcatagcaggagatttgttgagtgaatgagggggttctgagggctccaggagatgcgatgatgtgtccagggcggagagggtagaggtgggttgggggagccagaggctgcaggacaggctacaggactgtcaaggggaatttctacatgcccgtaaggaatgaggaggtctgggtgcgcgctgtccccggatccccgcccccagccccggtgctccgccgcctgcccgcccgcccggggcttcctagggagggagtggagactgcggcgcggcgcggcgcggcgcggcgcggcctcggtgaagccgcctcgtccccgccccgccgcgccccgactcacatcgccccgcggcccgggcggcgccgggccccgctcccgggtcccgctgcagcagccgccgcccgcccggagctaaggcctccccgccccgccccgccccgcggccgcggggtcggaggtcaccggcagcaccaacgagacgctgcgggctggcggacccgagcgggggcgaccggcacgcagcctagaaggtccctttggaggactttgcagtcgggagcagtgagcatgcgcagacgccagagggcgctcctggccaggggctgagcaagcccggaggggacagggcggagcctgcggcggaggcggggcgcggaggcggggctgaggacaccaaagttgggggtggtccggggagcggaaaggggacggagggttgggcgagaaacgaagggaaggggagagggtctgaagggacctgaaaggagaagggcaagacgatggaacctggaagagggttgaggggaggggaaggggccagggggaccactggggacaagggggagagaactgaagggaaacacgcggaggagcggggctgggagaccacagggagagtttggggagacctgggaactgcggagagacagggctgcgggcccggcgaggcgtttccattcagcgaatggttgaaaacccagcgtaaacgcggctcccggcgtctgctggatgcctgccgggcgcagtccgagccagagagcccttgcacctgcatggcagaggccatggagcccgcacatttccaccctgagatcccataaatgtggttttgttttccttttttttttcctccccccaatctgcagctccaggcccctccctgagccgcccctctccaccagccggggaggggcgggcgggggccgctggggcgtgggagaggaagggccgcgctattagggcgggcgggggcggacgggggcgggcgctgaagccttggggtggggaccgggtgaggggcctgacggcagagtcggtccagaactgcccggacagcgacgcacagcgagggtgagaccccagcggagtcctggtcccctcccctaaaatcccagcagccagaccgggaaccccagcggactcgggaaacaccgcgtcccagccccggaggcgggcccgccaagttccagaaaaactctggggatctatcgagagggcagttggcgggactgggcactccccttccttctccctcccactgtccccagaaatcttcccatccctccacctccccaagccctaagtcctctcgggctctgcccttcagggcagcgggtgttggggatgtccagctcctgagccctcttgcacggaggctctgcacggaggcaagacaaggggttcagctctgtcccttatctgaggtgggagggggaagggaattatggaaggaatccagctggcctgttagtaagggtgttccagtgctaggtggaggtggagtttggctgcctttggggagattggaagggtgaggaatagaggcctgatttctgagtgttgtttctgtgttggacaattctatgcaaactagagccaaaatggaagagggtgcaagtcccctcctggggccccagacgccccctcctttcttgctgcctggagcaggggcagtgctgttagtggctactcctggtgtgaacagcccatcctggccaccttccacaggaaacctgacctgaaggacagaagaggaaggaagcaggtgggtgtgaagccaggaaggagggaagggtggcacaggacatttgaagtgggagtggaggggcggtgctgaggagggttcagtgctgggaagcaatattaactgttacagtccaaaccctcacctcaaccccagtacgaatccctggcccagtcttagaggccagggatttgatgatgaccctcctgtgcccagctactttcagaatctatcccagctctcagaagccaggtccccctaaggcttcccttagcctctggtatgatcttgggcaagttaattaacttgtttcaactgtcaagtggaatgaaagagattacctcataagattattgtgaggatggactatattatgtaatattctagaagagtccttggcacagagtaaatattattaaaaagtttgctctg

SEQ ID NO: 11357 - DNA, 6000 bp, Homo sapiens
aacatagcaagaccctctctctaccaaataaaataaaataaaataaaataaaaaaattagctggacatggtggtgcatgcctgtagtcctagctacttgggaggctgaggcaggatgatcacttgagtccaggagtttgaggctgcagtaatctatgattgcacccctgcactccagcctgggcgacagagccagaccctgtctctagaaaataaatgaaaaaaacaaaacaaagaaaccccaaacctaaggtccttaaaaagctagatttatcagagactacagaaagcacaatatgcttcagcagtagcatctcttaggttaaaaaatgttttcttcctctggaacaaatcattttaatttacattcttctgggatgtaaaaggctggagaaaacatgtcattttttgtcagtctaaaaaaaattatgaagccatcaatttctctttggatttatataaactgaaaaaatgaactccatgtaaagactgaggaaagactgaagaattatgacaaagtatagaataaacctatgtaaaagaaaaagttattttcttagaaacgactcatctgtttttaattccagtgggaacaaaaatttaaactctgcggcacgaagagaaataagaataattttgacagtgagttttcctttggtaatgtttttttaaactgttacaagatggcttaaaatggccaaaattagagtcgcctcttcatgatcacttctagtttgctaatttacagaggttaaccaggtcatccttaggaattaaaggaggggtcaaggatctgaataccacttgtaactaaaaatatgcagccaccacaacattttatagggcacctgccttatttctaaatagaaaagttgtttcatgaagtttactgtgttcctcttgtttattcttcactttcctttgttcttgcttcccacattatgtttcaatcactgtcatttgtaagactttttatgtaatcttgcagggtatctttgagatgtgactttcttttaaaaccatgctttaaattatctctcctaaatatttggtcaaacctgtgcttgaatgtagaagagacgaaaaccttaacaatttactcttttctatgtgtgagcatggatatagtgcaccattcaaataaacccggccttacataggtttctaagtttgctctccctccactctcaataaagccctaaaccacccatgtttcattcctgaaatacaccagggactttaaaacaccgctgccttctgttcatgatgtcctttcagcctgaggtcttctttctcaaggtcaggtttggaagttcagctttaatatcccctcctttgtgacaccatcactaatccccccagttattagaaaagagaacttgaaaggcaagattcaaatcttatttgtctctgtgtccttggtacctggcatatactctgacctgatattcagatgaaccaaataaactgatccttcctcttgataccctcaaacttcagcttgcaatcactcaccttctgcttggatacgatttttgaaatggatggtggtactggcaaactttatgagcaaaactgaaaatcttatagaaaaagagtggggaaaatttacaaataatgcttacatatttacacatacatacagaataaataaaacttctagaaaatatctttctttcctgcttttattggcatcaaaacatttctccagaaggtcacgctttcccaaagtcaccttcttctgagatgtttgtaatttagtaaactgccaagcatattgtaatgactcaatacaattataggtaatagtataagaaagcagtatagcataatgctttccccatgctttggaattttgacagatatgagttcaagatctggctttactacttattagctgaggagccttgggcaaatcgtttaacttttctgagctttaggttctgcaccttcaaaagtgggaggagttaaaaatgtgcctatcacaggattttggttaggactatatgaaataaatgtaaaattgcctggcatatgacagtccataagtgtgttagctgtcatccttcaactttttagaaatattgctagggtgatatggtgtgctcaagctgactcacccctttgatgtgcagctggaaatacagacctgaatttccaacgctgccttctctcctgagatccagagctctacgtctaaatgcttctttgatacctctactcataagctctgctggcacttcatatttaaaatggccaaagctgattattttcccctcaaaacaaatctactgtttgttcctatattcccaatctcacttaacagtacctagtatgaaacacaagctaaaaatctgggagtcatcttaagaatctttccttttcctcacattctatattttgccaagattcctgttaactctacctctataactatatctaatatctgtttcggaccctactccatcaggcagccattttctcttgcctagattacgagactgtttataatcaattcttccctttctgacccatctgtcacatggctcaacgtgaagtctgatcatgctgcatccatgaataaggcctcgaagttaaaaacgagttgatgtcctggactcaatcatattatacatatttttcaaattcctaaatgataatggtatagctttttcgtttttatacttgtttctcctaaaagcctatgaaatccttaaggcaagagatatcttcctatgatgttctggcacataacaaaaatgtaagattaaatgaaggactctaccacagtttagcaagcaccatttatttaatcaacgttattcagctcctttccaacactttaccacttctaatacacttcttggcaactttatgtgctgcagatctaggccatatgtgcagaatgaaatctctctagcactgtcttttctacatgtatgccaaaataccgacattgctactgaaactccccacaaaacatttgaaatgaacatgaaaataaatttgtttcctctgcctgaggcatcagtctcataaaacttgcccaccaaagccttgcatttagaatgctgttttattaataagaacatcactggtgagaaagtgtgactgataaagacctctgatacctaataactgtgatcattggggaatgtctgccatatcccttccacttcaaacattaatgactgatactaaccatcatctaaaaaaaaaaatgggccaaactccttgtgatgcaaggagcaaaaatgaagcatggaattaaaattagttttcagactaaatgatcaacattgtgctttgcttttgaagctcacagtaatcagtgaaactaaaatatatatatatatattttaaaaatcacaggtgtgtataattgcctgaggcctcttcctaaattcaacacagatattcaacttcaactgctaaaatggaataaaaaggtagcatttccggcatacaatgtatatttaaaaattaaaattagtgataatgttgagttacaatgacctattgaagtcacaattatttcagtttatttttgagttttccgacctgaaggacaaaagtcccacaccaaaaaaaggtagaatatgaaaaaaaagtcattacggtgtcattaacctgaaaaaacgtgattttaactatactttgccacactcaacgttacaaataaaagaatcttaccatgccattatgccttgattaactgcgctccggaatcaatcatggcctatggtgtacgattataaaacagaaaaaacaaagttccatctcatttctttgtacacacatcattacacaaaggtggagaaaccctgtgctaatgtttgaagactattcttttttttttccaagagaaaaagttaacactaggactttatatattaagtaattaagtaaaaataacgctgtctaaattattttgaaatgctgcctctcttccaagttccaaactatctcaattcacttagaaaaacgtttaatcaaaaaacaattctaggcttctgatatcctaatgtagaaaaaatgcagatactcaacacttaagattttgttagcgcaccaaatcattccatcttttactttcaatattccttaaataataaaaagacgggagagataattcagttgcaaagactggaggaaacttgcagaacttctagtggaagtttatgccataaacttaatagcccagccagaacaatcacattctactgcaagccaaatggagaaaagagtaccttggagtgcccctatttaataaacacggaacgaggaaacagttaactgtaaatacagtctagaggtatccaggtgactgacagttctccagagaccccgagaacagcgtaaaagaccccttgaggtcacctcacccctgcgagtccacggattgggacctgagggagttctcgccagcccgagggcgaaaaacgggcgaggaggaacagatgctcctccctggaaaccgcccggccggtttccgctctttcaaaaaagggaatcacccgtttcttccatcccgacctcatccattcctcgaacgctccttctggatgaggaagatgggcagtgtcaaggttttctggaggagaggagatctgggtcccaaacacaggaaaggccccgaaggcacgcgtaccccaaggccggtatgtcacccggaagggtgacggcagcctgcgtggcgtctgagctagacggagcatctccccctcccctggtccgtcgccatcacctcctcttcctcctcctcctcgcccactcctgcactttccaccgcggcggtcgcctccccggaaagcactctcaactccggcgcccgcaggccacttccgcctatgtgtccctgcgcgcgtgcgcagacgcgtggccccgcctcccgacaggcctgtgtggccggtggcgggcgggccgttacctcccgcgcatgctctatggggtagagacgctaggccggcactgcctaggtgggccgggcggtgcgagggtcgcctttcagcctttacctctacccactgaaatggagtaggtcggtgagcgccgatctgctggagaatctcattatcccatcggcgctctgcctgctcctggcctccaagcctctgaagcccctcgggtttcagctgccggctaccctcgagcccgtggtgcccacgagagaggcgactttacgtcagcggccctgggctgagatttgagaacgcgaccaagtggagaatgttggagccagattttaaaatccttgtcttccttctgcgtgctacttgatctaaatgagatacggcaaagtcacagaacctgtttttatgtttttgcctgattcatacgggcttctccggtgaagatgggcctgaagtaacgcttgggttgcttctgacgttataactcatcctgtagctgcagcaaccgtggtccttgcaacctcataaaaatgttgccagcattgtttcgatagtgctgcttaattcttggaaggtaaatctcaaagcttgaggaccagccatcaaaacttttgtaaaaggttttccccgcgtttagggcctcatccatcaccactgagatgtaataacgtaaaaaccaagacggtttggggatgagctgttttcagagaataattaaggaaaatattactgtaacgaagatggacaatttttgaaagcatgccttgaataccagaaagggatgaattggattaatatgtatgttagaatccagtcagttatggacaacttttaaaattttacaggcactcttcagaaagggtagcatttgtgtcttgtattgggatcgagggtttgtaagaaagcaaggcacctactttggtggtgagaaaaaaaggtctgggtagacattttcgtttaatacttgccaacgttgttaggctggtgttagcaacacttaggaatgttggaattaaggcttagagaacttaaatttcctaaagagatagtaaatgacaaaacctttcagtgatgccatatcgtcactg

SEQ ID NO: 11358 - DNA, 6000 bp, Homo sapiens
ttttgttttgagacagagtctcgccctgtcgcccaggcgggagtgcaatgtcctgatctcggctcactgcaaccgctgcttcccgggttcaagcgattctcctgcctcagcctcccgagtagctaggattacaggcgcccgccaccacgcccagcaaatttttgtttttttagtagagacggggcttcacccatgtatgacctcaggtgatccacccacttcggcctcccagagtgctgggattacaggcgtgagccaccgcgcccggcccattaatactgttaattcgagcagaatgttcttggccccgccccaacagccccattgttcaacctggatttttttcctgaatgaaacatttgctatccccgtctttgagatggggagctacaaaagtaagacctgatgtcctgctgtgtaataaaacaacaaacgtttggccctctccctgttaacatacttaatcatttaatactaaggagtaggtaccgttattctcatcttattgacagaagcgaagcaaagcaacatatctcaagcagtacggctggtgaggttacagccaggatgcaaacatctctcattctctattgtattctgcctccctgctcaaagaatctggttagtaaatacactgcaggttaccttattggttcaaattcttggtgaagtaagcttgtcttcagtgacaaatgaagtaactaattcaagaatggtgtcatagaaggtattttcccaagtatcatttaatttattcaaaagtatttatcaactgcctcccttgtgccacatgttgtcctaggatctggggacacaacggtgaacagccctgttctcacagtgtttacattacaggaaagaaaacacataaacacaaatataatgtcaagtatcgataagtggtcagggtgcagtggctcaggcctgtaacccaacccttgaggaagccgagcccgaaggattgcttgagcccaggagtttcagaccagcctgggcaagtgagaccccatctctacaaaaaattttaaaattagcaaggcatagtggcactcgcccgtaatcccagctactcaggaggctgaagtgggaggatcatttgagtccagggggtcaaggctgccgtgagctggaactccagcctgggcaacacagcaggaccttgtctcaaaaaaccagtagcagtaagtgctatgaagaaaatgcaaggtaaaggggcaaagagcacttgctcctacactccagcttttctctacagttgcgatctatagtcctcagattcccaaatgaggaaccatgtttctcactttagagaaataataaagtactacttgttcttgtttctccaagaagtttcaaaggatagccatttgggctgtttagggaatatgtaaacaaaaaacaagaaagtgactgaaggccaggcacagtggctcacacctctaatctcagcactttgggaggccaaggcaggtggatcacttgaggtcaggagtttgagaccagcctgaccaacatggcgaaaccccatctctactaaaaatacaaaaaatagccaggcgtggtggcacacacccataattccagcaacttgggaggctgaggcaggagaatcgcttgaacctgggaggcagaggttgcaatgagctgagatcacgccattgtattccagcctgggcaacaagagcaaaactccatctcaaaaaaaaaaaaaacaaagtgactgaaaatgagaaatgatgaggcaaaaggaggctgcttcaactcaccaatttatttgccaataattattttattgatactttttttattgttacaatgggaaagtaaggtgtcaaggatatagaaaggaagggcatgcatatgagggaacacagtatcattttagatcttagaaagcaatgagcatctgataagtctttggggaaataggaaaggaggaaaatctaataaagacaaagatcagcaaaagaaaaacaaagagaggctacaaaatgcagttatctacctggaattataagagaggggctaaatgtagtcatctcctctttttggagatcagaaggtctctgggaaaagagaagaaccaatttttcagaaaataactagggtcacagaatgaacaagtggaattagagagccagtgatggacgtgaggaaacagctgtgtaggttttgaccagtgagcaggtggtggtaatagtatcacagggttgctacttactgaatcactgctacaacatgcaaggaactgtgctagactttacagaatgattcctaatcattgaagcaaccctcacaaggtaggcattattatcatcccagtttcacagaggaggacatcgaggctaccaagttaagtagcttgtcctggtttcacagccagcaagtgacagggtcaagagagggacccacatcggccagacactgaagtcaggatgttttccacattcctacttccccatattacaaatttcacagagggtttaggtgagaatgacttggaagtttacaaagtcccagtgagggttaaagaacaacaaggagattcagatgtgagcaggatatttataagtgtcacaggaaaattattggatcctgcctcccaggatttctaggggatggaaagaagacagggattatggtgggaggtgattttgattggaggatttctttgagggagggaactggcagaaggagtcaggccctacggtggccctaggcagaaatccggtagttggggtggacctggggcctgacgtcgcagaccatgccaagaagctgggccaggacacgctctcggtttctctgctgggagctctgcatgccctgcacctggcgccttgtagcctgctccacctcagcagacaggttcccctgggagcccatggcctggggggtagggagaggggtggaagagagaaagggaaaagcagaaacagacaagggtccaggcatatgaggggaaagatcctgaaacaaagcctagaagaaaggccctctcagaaaccacccccatcccacagaaatatcccaacaccaaagagatcaacacagtcccctttccccttagacctaacatgcaacttcatcctaaaacagaccgtaatatccccaccacctcaccatccatgaccataaaactctaccctccaccacaaatgttaatcatactccacatagatgttatactttacacagactgtggcattccgcccacaagctctatgtggccttcaaaactcccagactctcctacatatcatcacaaagtttcaccaatgttgtggtccctgccagggtcccctcagcctcagccctctgccaccatattttcttgttgagtcacccttacacacctcactagatgcacccaccaacttgcagtggggtctcaacccgactctgcctcaactcaccgcctgctgcttgctctggaattcgtgctctcgctctctgcggtattgctccacctccatctgtgcctcctcctttgcctgcttcagtcgccgggccttccctggaggcagaagaaaggacagtgagtggggatggacccacacacacacaatgtaatagcaggagtcagtcccttccagaaagttatacagccttctctcagccaaccaggtgccagattctaatatccatccatttcttccctcctaaccagcctccagaccctagctgtctgtcttcccgccagccttgggttttcccaaaatgtttgctgtcccccacccccaattttctttccaaactcctaagggaggaaagaggagactcactctttctggcatctgccaccttctcagctgcccgcttctcagcttgcagaagctgctggataccttgggactgactggccatttctgttgttatggccgatgctgttttgaatgctgtcaaagtaccagatggctcccaccccccaccgcttacttctcctcctccagctcgttgctgcagtcctccactacccctgggtcttagtgctcccctgctcactcagcctcctgcaccgagtgtctctcccaatctcatcctcctattgatgactggtcctcctctccagcacttcttgctcaggcagtacccaaaggggccgcctgggagcagcagagaccaggcccaaagctgcgggcttacaacaggttagccatcccagtcggaaaggtctagggatgaggcaggggcggagacgggggagtactgaggtgagagaaggagaacttgattggtggtaacagaggaagcataaagggttgtgaatgcggtgaaaaggtaaggatgtcatcatgcaacctgtgttgggaaaagagcattctgggcttaattctaaactaactctctacctttctctctctctccaccatcccgccccctcccctgcctcccgttgttaacatctccatctttttctacatatttctcaagtccaaatttttgcatctcacttgccccatcctacgatagtcttcttccgtcttttgtctgtattttttctttttttttgatctgtccctgttgttgtcccactgtggtttttgtttttgttttccatgtttaatgtgatttttatcctgtctttatctcctctattttctctgtcttctcatcttttcgtccatcactgaaccatctcctctctctgccaagttagaggaggcgggaaaaaacctccaaataactctcttttctccctcccctcccctcgcctccttttcctcgcctccagtccagtcttctggtttcagacggcccctttaatttaagttccctagtttcccctgggagatctggccaagaactacccggtcggggcggaacgacatccggtaacgcccctcacagttcacttccgtcctccacctgcgtctctgcttgcgccatttcctccagcctggagtgtctccgcccttcccgcctcccgtctccgagcttcttaaacacaggccttgggcctacggctctgggggtacttgggggggcgggggcaggtctgatgagtaacccctccccccaggttccagaggaagaagcctccacatctgtctgccgggtacatgatattcaatttctagatcattattggagattatctgtgactttttaaaactcagatttctgctgataaaaattttccccatccggccctgttgggtttttttaaagttctttgttaaaaattaaaaatttacctgggctcctgagccttaaaccaattatttacccttttctcgaattttacattaaaaaaattaaacctctgatcctatcacccccctcaaaaaaaattttttttcaaatctatcatctgataaaggatcagggttaggttaggcctcatctcttgctgaagatattaaaaaaagacggaaccaaagggagaaacaacaggggatgtcagagatggagggagaaggaccagccaaggctgaagtcctgactgctgccttttttccttccccagcccaagagttccatggcctccacttcccgccgccaacgccgagaacgtcgctttcgtcgttacttgtctgcaggacggctggtccgggcccaggccctcctccagcgacacccaggcctcgatgtagatgctgggcagcccccaccactgcaccgggcctgtgcccgccacgatgcccctgccctgtgcctgctgcttcggctcggggctgaccctgcccaccaggaccgccatggggacacggcactgcatgctgctgcccgccagggcccagatggtgagtctgctcagtggggaacaaggtcataagcagctgaccagacctgaaatgaaagccaaccaatagttgagaaataagctggttatttggtcatcaggacctagggaaggagttaaccaagttggcatgtggctgtcatttgtccctttacattactgagctaccattgtctgaagaacccaacattccccaaagatcaactggtcttcaaatttcacatctgtttagattagtagctactttgtttctt

SEQ ID NO: 11359 - DNA, 6000 bp, Homo sapiens
cagcgtcttgggccctataccaggcctctgagttcctgatcccctcactgctggcccactggagagtgagagtccctgtggctgcttcctttcctagagatttcaggtgagcttaccgtgtcacatgaaggtttcaggccctgctgtcggactcccccttcctggcttctccttagctccagaggtggaactgaatacaagttgggaggaacattcagtctattcctcctactctctaccaattttttttaacagctggtagaccaagaaagcatgtctgtgggccatctatttacacattttagtcttgcatattctttttaggaataatatgttattttgtttgttttttgagacagtctcgctctgttgcccaggctggagtgcagtggtgcgatatcagttcactgtaacccctgcctcctggattcaagcgattctcctgcctcagtctcccaagtagcacgtgcctccacacccagctaatttttgtatttttagtagagagaaggtttcaccatgttgacctggctggtctcaaactccagatctcagatgatctgcccacctcggcctcccaaagtgctaggattacaggcgtgagccaccatgcctggccaggaataatatgttattgtacttatatggatgtaccttaatttatttgaccagaccacctcccaggttttaatttttaatatcataccatacaaggtattgtctttatagattcttccccagcctgccactattattctaaatttgcaatacccgattcccaaagctccacgatgataataataacaatatgaccatttactgagggcctgttatgtgctaaggtccagttctaggaccttatctgtattaacttatttaaggtgtagtacagctttattttcatcctgattttacagacaaggaaactacgtctcagagatactgtatgacttgttgaaggtcacacagctggtaggtgatggagccaaacttcaaagttctcatgtttttctccatcctattatacacagagaatgctgtgtgtcagacttccagttcggggtttgcagtgtactaaccatacttcccttgccaggagagcttagccacctggattcagatactggtaaggcagtcacctttccccagcagtgtagagagggcaaatgagataatgcacctgtaagtacttcaaaacttttagcatgccgtacaaacagaagggataattaagagattattgtggactatgcagataaccttgtttatttaaagcaccttagcccattgacacgtgtggagatgtccagagacctggtcaaatcctcaaatcgaatattgccgacagcagaagaatttctcccataaaatgccataatgtgtcatttaaaaatgtaagtaactcttggccaggcccggtggctcacacctgtaatcccagcactttgggagggcgaggcaggtggatcacttgaggtcaggagtttgagaccagcctggccaatgtgataaaaccccacctcttttaaaatacaaaaattggccaagcatggtggtgtgtgcgtgtaatcccagctactcaggaagctgaggcaggagaatagcttggacctgggaggcagaagttgtagtgagccgagattgcaccactgcactccaacctgggcaacagagctgcatcacaaaaaaaaaaaaaaaaaaaaaaaaaaagaaaagtaaataactctttaaaatgtttaatgattacataaacacaaggcataaagctataaagatttaaaaaaaatagagacagagtcttgttctgttgttcaggctggtgtgcagtggtacaatcatagctcactgcagcctcaaactcctggactcaagcaaccctcccacctcagcctcccaccatacctggcttatttataaggatttaaagttagttgtgagtgctgtctggagcacttgctgaaactgttttgtgaatcagtttttcttaatttcttaaaactgaatgaggaataaaccctgtgtgaactggatgagccaaaaacctgttctgaattctagtccactctttagtgattcaaaattccctatttctgtctcagaaacattgctttctttggattctccaatttctcctcccttctatttcaatactagtgtttggccttttttttttttttcttttttttttttctttttgagacagagtcctgctctgttgcccaggctggagtgcagtggtgtgatcgcagctcactgccacttcagcctcctgggatcaagcaattctcatgcctcagcctcctaagtaactggaattacaggcgttcaccaccatgcctggctcattttggtatttctaatagagatggaggtttcaccatgttggccaggctggtctcaaactcctggcctcaagtgatctgcccacctcagcctcacaaagtgctgggattacagcctcacaaagtgctgggattacatggtgtgagctaccatgccagacctagtatttggccttcccgtttttgtttttttttttttgtttttttgaggcagagttttgctcttgttgcccaggctggagtgcaatggtgcgatctcggctcactgcaacctccgcctcccgggttcaatcaattctcctatctcagcctccccagtagctgggattacaggcgcccgccaccacacccaaccaagttttgtattttttagtagcgacagggtttcgccatgttggccaggctggtcctgaactcctgaccttagataatctgcctgccttggcctcccaaagtgctgggattacaggcatgagccaccgtgcccagccatatttggcctcctatgggaggtcatttccacaaacaagcaagactttctaatcattttccaaggattacaaaatcttgactcataagtgatacaaattcatggcatgatttgtagtatttgtagcaagtgacaaataatacatattatgtgcattcaaggttgtcagggagttggtttttgttttgttttgtttctgaaacagggtcttgctccgttgtccaggctggagtacagtggcacgatcataggtcactgcacccttgacctcctgggctcaagtgatcctcccacctcagcatctcaaactgctgggactgtagttgtgagtcaccgtgcccagccttctggggagtttagatctgtgactaagcaaaaagaacaaatctggaggcatcactttacctgacttcaaactatactataaggctatcgtcacaaaaacagcatggtactaatataaaaataggcacagagaccaatggaacataatagagaacccagaaatgaagccaaatacttacagccaactgatcttcaacaaagcaaatgaaaacaaagtggggaaaggacagcctattcagcaaatggtgctgagataattggcaagccacatgtagaagaataaaactggatcctcgtctctcacgttatacaaaaatcaactcaggatagatcaaagacttaaatctacaacctgaaaccataaacattctagaagataacatcggaaacatccttctagacgttggcttaggcaaagactttgtgaccaagaacccaaaagcaaatgcaacaaaaacaaagataaatagatgggacttaattaaactaaaaagcttcggcactgcaaaagaaataatcagcagagttaacagacaccgcacagagattggactttggggactcagggtaaaaggtggggggtggcgagagataaaagactacacactgggccaggcgcggcggctcacgcctttaatcttaagggatacctgagctccttctaggaggttctgattcagtagatctgggagagtcaagaatctgtaatcagctgatctctatcaagagctgattttgggctagctcacgtgctaagtgtttggtaagttcatgttctcagtttatatcttcatgacgatttgagcaatgtcaagccataaccaatgtcgtcaatgacacccccgttttacagatgaggaaacggaagctaagaacatccaaaagggtttgttggggggggtggggaaagctgctaaaaaaagttatgcaactagtacacctagtaactggtcgactggagattccaactcaggcccagcaactccagaccccactctctcaatcactgtgagacataagacttttgggggagcttctggtgattttagtgattagtcagcttttcgcaaagcctcctagaagcccatgccactctcaaagggtgcatgtgtttgaaatttatggcccatccccctccagtgtttctggaaggaaaatagtgtagaaacaagatcatcggagggaatacgacgagcagctgaacctcttatcagcatttcccagcctttgggctactccgcgaggtcctggtctcacaggcggacccaatctgggaaccaagggagaatctttctgtacacctggcacttctcgtcacgccccgtcccccgaacacccaatccaaagcccgttgggcacgtctgatgtccactcagagcaattataattggccatggcggacgatcgctccgcctcccgggcgaccccgcctccctttcattctgaaagaaagaacctcagcctgggcgtccaatgagaagcgccttcacctcaaagatcccgcctctttcggcgtcgaccccgccccgaggccggaagggatgcccgcctcccttggcgagatgagccaatcgaagggctctcacggccagatggacggcagccggcccaatccgccgggcctcacgcggcgccgcccgcccctccgccgggcccgagtggcggccgggcgacgagtgcgggcctcggagcgactgcagcggcggcggcggacgcggcctgaggcgagcggcggggcgtggggcggtgcctcggcccgggctcgccctcgccggcgggagcgtccatggcccccgggcgccggcggggcgcggccgcggcctgaggggccatgtccggggtggtgcggaccctcagccgctgcctgctgccggccgaggccggcggggcccgcgagcgcagggcgggcagcggcgcgcgcgacgcggagcgcgaggcccggaggcgtagccgcgacatcgacgcgctgctggcccgcgagcggcgcgcggtccggcgcctggtgaagatcctgctgctgggcgcgggcgagagcggcaagtccacgttcctcaagcagatgcgcatcatccacggccgcgagttcgaccagaaggcgctgctggagttccgcgacaccatcttcgacaacatcctcaaggtgacgcgcgccccccgcccagcacctgcacccaggtgggccggggcgctaacccccgccccgggcccctccgtggtccgccgccgcgggcggggacccctggggcgaggatgctggatccagccccgcctgcaccccactcccccccgacccattccccgaggcctgctggcgtcgtctctgccccaccccgtctcgccctttttgagatggggtctcgctgtgtttcccaggcttgagtgcagtggcgccctcacagctcactgcagcctcgacctcccaggctcaagccctactccctccttagcctcccgaagtagtgggattacaggcgcgcaccaccagcccagctaatttttaagtttttttttgtagagatggggtcttgctgtgttgcccaggctggtctcagtctcctggcctcaagtgatcctcctgccttggtctccctcaagtgctgggattataggcatgagtcatggcgcccggtctgcctctgccctctctagggtgcctggggaccgtgggagtgggaactcgggccagcttctggggatggggagtgggggcttggcacttagccccctcctggatgtgccctagcagaatggtatctgtccatttcccactggaagatttgtgggataggagcccaaccggccgtgccctccggctgagcttag

SEQ ID NO: 11360 - DNA, 6000 bp, Homo sapiens
tcaaaaacccaaactcaagtcagctccttttctgactggtgaaattgaactcccattctacctgcctgcccgaagttaggatgtggctagtgggcatagagagataataagcaagcagagaacccttttctgttctgaagtcggcctagtgggagaccctgaagcctcaccaggaagcactccttggggctgcgcagtccctgttcctacccatcctggtgtttgggcacaactgatggccatcaacacagtaagatccatcagaacatattgaacttatcaaactgcatattaaactagaaacagaataaaccaaaactcacattcaacctacttatacttaattgtatagagctcagtctgggaaagtcttcaatgtgaaatcccaaaaagataatgttaagacattgtgatttcacgacaagccacaaacctaggccaacgctggggaaaaataactaaacaacttcagttttaactcctatttcccataataataaaaaaattactaattcacttagaaataaaatttcctgggcatctgtgcaatagacaatgaaaatactcctacattctacacaagcaagctccttccctcacaaagtttgcggagccatggatggttcaggacaagttagagtgataagagcaacgattagcaaagaaaaaacagctatgtcttagagacggaagtcaagagagacttttcacaacatatcatacctcagctgaggcccaaacaatgaataggtgtgagaaggagagaggccagtggatgaacattagatgcaccggaaaatcatgggcagaggcctggaggcgagagaaagctcatctatttggaggaacagaaagaagttcatcgtcaagcaaggagctggtagggagtggcaagagtccatgcaggtaaataaacagagataaatagagtacagatcatgaagggtaggcgacctgagtgattctgagggaaatgggaaatgactgaaagacattaagaacgaaagtcataaatgtactttgggaggccaaggagggcagatcatcaggtcaggagatcaagcccatcctggctaacacggtgaaaccccgtctctactaaaaatacaaaaaattagccaggcgtggtgacacatgcctgtagtcccagatacttgggaggctgaggtagaagaatcccttgaacacaggaggcggaggttgcagtgagccaagatcacaccactgtactccaacttggccacagagcaagactccgtctcaattttaaaaaaaattgtctgattacaccatggagaaagaattggaaaagatcaagaaaaggatctaggcaagagaaaaatgataaattgagttatggccatgggagtggaaagaagtgagcagatttaagagccatttagaagttggaagagaacagactttatcaggcaaactagtagtcattaagtttagactgtgttcataccctggttctgacacttactgggaaagttgtttaattcctctgcacctcagtctccctttttgaagagtaggcacaataatagtagctgctcatgggattattatgaaagataagtgagttaattcacagaatgcttagaagaatttctggaacgtgataaatgcttttaaaaattggcttttattattattgagtgtaacagcccaaaactagaaacacaattatcatcaactgtagaataagatgtgggaggaaatagggatctcacaagggaatttagcctggataaatgaatggatgatagtaaccttgccagttatagacctattgcaatagctctacatctacccttcaatgcatgctttgagataagggagatggacccagtaagaatttctcctttgcagcaggcataattttaagttctgtcagtagaaggtactgaagggttactaaagcaaagaggtacttttcctgatccaatcatgcatctgcttgcttctctgtgtgcagctgccagtagtacatgtggggtcatccaatggtgctcacccccatcaggtttcagtgggagattcctaggagtctcacagatattccggaagttgcctgacctacctacattccaaaaggtttcctgcttgagactacagataagttctggccaggagcaatgcagcaaacttccctgccatcacactttctccaatatgatctaaattccaaccagcttgttctttccttggatattgtctctcaactgtagtgtattcttcacccctttatagttaatttcctgttataattaataattatttgtattaatcacttcctgttcaagttactgtgtgttttctgtctcctgattggaccctgacagatgcagtactattcatcgaaatgagaaacataggaggaaaaataggtatggaaaagataaattccatttcagacatactgaacttgaaatgtttgtgggatgtccaaacagcactgtctggtaggaagctgagtgggaggttcaaaagctcaggagaagtgaccagcctgaagagataggcttagaattgagtagtcctagagccactaaaatcttagcaaatgaagcatgtatttaaatgccacaagtccgagagagagatttttttaaatttttcatatcctcatatgtctcaccaagagaccctaaaccaattaatctgtatgtgtgtatgcagtagcacatttcaacaaaagatttatggtgatttcatactttgtatgttctatatctgttaacactttcaaagttaaatgaagatataattgaaaagagccaagacccgttttttttttgttgttgtttgtttgttggttggttgtttttattgagacagagtctcgctctgtcatccaggctggagtgcaatggtgtgatctcagctcacggcaacctccacctcctggattcaagcgattctcctgcctcagcctcctgagtagctgggattacaggcatgtgccaccattcctggctaatttttgtatttttagtagagatggagtttcagcatgttggccaggctggtcttgaactcctgacctcaggtgatctgccagcctcagcctcccaaagtgctgggattacagacatgagccacgtgcctggcccaagccccatattaataagataattctaattaccttccaaacgtggagtcctaacctggtggaggcagggagcaattaagtcatatgtgtatgctgattgtcatcaggaaaattctaatggatctgccaacacccattagtagcagcactgaaaactggtgagctgcttaatttgcattttatctgaaaatgacaactagataaaaatacattttgaaaaagactcaggctgatgccttctgctttttctggggtgtgaattcagtcaacaaaacttgccccttgattcattcatttctcaaaagtttggatctactgactacacacacatacatacacacacacacacacacacacacacacacacacacaaagaaattccatcagcagtttgcaaaagaacaatttggaagagaaatgtattaaatcctcagggaaattaaacccaaataatccaataatggcattacaaaattaacgatagactatgaattgaattaattgcctcctactgtggggttcttggctactacaaaccaaaacaaatgaagccaatgatgtcaaatgccttaagagagaccataggcaagtttgtatcacaagagttcacccactgtggtttttcaactttctggcttgttctggagatcaatatgaagaaagatcttcacttctgccatctcacgtctcaaattacatacggtaggttggtgagagaggtgagaggtggcacagttctagacacaacagagcaattttacaactctttgtgaattacctctaactgtctgtgtctagaagtagctggactgtaggaaatccatgcaagtctttttctcctgaaagggctgaagggactggtgggaacaagtaaaggtgtctctagaacccaggcagtctagtgataaggcagatatttaagaacagtcagctgctccaaaagagattcgctttggcatttcagtaaatgcgcatttatttctgtaaattctcttttaatgtcatgatgacagcacacctttggcaatacgcgattacctaaataatatgcgtcctgggaccaatagagttagcatgtgtatgacttaccaagcccctgctagtctccctaaggactttgagagggaaggtaggatgcagcatcttgatagaaagttttggtgattgacacagctttaccaaataagacccatagagcaaatacagagggcctgactgcctccagcttctcctgagacgccagtttgtcaaaatgcctatcaagtatttgctcatatacacatccttcatgttacggctaacattgacccctgaagctttttaataaccaaacagcattttacaaaaaaactaattcatggcattttgttgggatattataatttttttcacattcttaattttgcttgacattttgaaaatactacgcctaactcttttgtgcagattaaaaaaaaaaaaacatagctagcatggattgaatacttccttttccttccctcaagaattgacacaaacaccaaaaacaaaatactttttgtttaagcttagagaaatgaagcattctgtctgtttggaatcttaattactatccccccaaacttacctaattagaagctcttttataatgaggaaaattattttcaaagttaatgaatttgcaagcacaaacattgctgtcttcccagaatgaattattcacattccttacatgcatattttagttgtacactctaattaatattagtacttaaaatgtgtgagattgatttcactgtttaaaaaaaactttcctttgtttttagacgatataaaaacaccacaatttttttctcctctcataaacattgggctgcacatagagacttaattttagatttagacaaaatggaaattatttcatcaaaactattcattttattgactttagccacttcaagcttgttaacatcaaacattttttgtgcagatgaattagtgatctccaatcttcacagcaaagaaaattatgacaaatattctgaggtaagttttttaaatctctctaatgtgagtagcattaattacataatattaatcctaagtctaatgattttgtaaagactaagaagtaagttggtgtgtactctgtttttttgtgaaatttcagccttcctctgacaatgtataaatgtcacttgtttatttagcacgacagcaatcaggctggcctctgtcatgacaattgtactggtgagtatggtacttagcaagcatacagcgcattaataattttcaatcaactcacaagtgcatatttgtaataaatggttggcagaaataagatttgggtacatttcagctggacattcaaattgttttaaactacaaacaaacaaacaaaaaacacatttcttttgggcttagcaattacaaactggccaatgtgtactaaatctatatcttagtaaagtgtttacctgtagatggtaaaattgcaaattgtttttattttcttttatgtgttttccaaatctgatgaaattagcgtgtatactcattttactcaagggataatcagaaaacaatcatttaaaaatttccatatggacaagctcctatggtaaagactaaatctaattaaatattctctgtatttgagatggttcctacaaagttggcatacttgtgatgcagtaacccataaaccaatgagttctttgctaaaaatgtattttatattctaataaaaatgcaattggtttcttgagaaagctttagagtggtaccctgagtaagatagaataaaaaagaaatccactgggccttctacaactataccccaaaacctggccagcatctctgttttgatgtaccgtgtttccatgtgccactttggcctt

SEQ ID NO: 11361 - DNA, 6000 bp, Homo sapiens
cctcgagcttcaggaatcatttctcaagtccccaaattgataatgaccttcttttcagtgtccactgcttggggaaatgcatcatgtctaacgcagagttcaaaaccaagtaaaaccaaacactatatcttttagatgtacatacctgtgagaaaactgaaaaaaaatatgagccagagaatgacaaatgcaatagtcaagggaatgttccctctggggaaggagaatagaaataaatagataagtgactggtaatgatgtagtttccaattgggtggtaggcttattatattgtctactacatacaataaaaagactaaataaaataaagactaaaaaataaagttaagccatgcatgggctaatgcacagactaataatgacaaagggtcacgaatctatgatcaattcaattgtatgcccctgaaaaaggcaacgcatgcaaaatcacagagcaattatgacttcaggcagggtttaaatagattatttctattttattcatcacagaggcagctacatatatttgaaaaatattagggcatatattatgaggcatattatttatcctatccatagatgatataaaaatccaaatggactatttatttattttttattattttttgtaggctggtcttgaattcctgtgctcaagcaatctgcctaccttggcttccccaagtgctgagattatgggtgtgagccactgcacctggccaagaatccgaatggattcaaagataccttgaaataattcctcaatgcaacacacacacatatgccagggttggtcaaatgggaagagagccttggcctgaagacagggacctgggctttcctcagctcttctgccaaggtatctgtcctttcttagtgactcactgggctgaagtctagagcattccaatgggtgctggggatgggttagtgaaccaggaccagccctgcccttggggaggcatgggctggtagatgagacaatgaataaaaagcaacctggatgtgacataggccagcacccagcagatggggtcaccaaggagctgcatgtctgaaggatgagtgtggagctgtaaggccatttccagtgcagaaatacaaacaaggaacagagatagcgaatggtttctggtagtgacacattgttctggagggcctttcaaatgaagcaggagggtgaggatgggggacgatgatcatgaagaaccttctttgcaataccaaagatggttcccaggaatgacatgttgttctggagggcctttcaaatggagcagaagggtgaggatgagggatagatgattacgaaggaccttctttgcaataccaaagaggtggtctccatctcaagggcaatgggttggcggcactcctatgaggaagagtgacaggatcgtaattataaaacatcgttttatctgccatgaggagacagggagcccatttgggctgctgcagagatgaggatggcctgggagaagtaagggagggaaacctcttttgcttgtctgggaatcctattgtccatctgtaaaacaagaatgtgggattggatgtcactgagagtcctttctgtccccacagcttagtcccatggtttgacatgaagacaccaggccaattcctctgtcctgcagtggagtaggatagggtgaggagggggtgcctggcctgggacccctgtctccagtgctacagggcaaaagtgcagcaccttcaggcccctctggaacctctgtgccctcagcaaccccgtcgtaattcccaggaaacaccacgactattccagctgtgcctgaatagactccctctctatgtagtctaaccaaggacagtcccttagagaagcaaagatgcatcctgtccctttaaatcctgttttccagctgacatttgagtggtaggggatgaattagagagagaatgtgtgtgcatggtgaagatgcataactgtggctctgtgtgtgattctgttgtgcctacatgcctgtttgatgccatgtattaggctttgcaagtgtgtctgagctggcctggaactgtccactgctgctgcagctgacatcagaggtgggccatgggatgggatgcagggcaccagaggcacctgccttactctgctgctcatggtacacaggggtcttccaaagtacctgtcacacttccctgaacctatttgccaacctgtccccaacagcttggggacacacaaactgttccaaatacttatcccctaattcctggcctccagctgggatggggctggcctgcagcgctgggaacccatcactatcccaaagcctctaatctacctctgcttctttagttagcaaaaatgcccctgtctttgtttgtttgtacttggatttagtaaaattgagggaattttggggctcttcccaatttcttcctcatttgcctgtttgcagacactaaagtgagctgtaaaatcaatttgttcccaaactgctaccttttctagttttccctctgtcacatctcgaatgacaactgtgcctataataataagatccatgaagaaatggccccacatccaggggacctcgggtctgtgggtctgtgggtatgtgctcagaccccaactgctcattcaggatgcagaacagcctttgactctgccactgaaatggtcacttcccagaagaatctttggtatgtgagctctcccagttaagagcaatccagttcacccaggccaaccctctgttctgcagaaatctgcatgagatgagaagtccctggcctctggtcattgggagcacaccacctcttgacatagctgcatctataggtgctttaggcaccacctaggtggtggctgcagtaatgaacaaggataataacttaagcttggcttaggatttctcccttcctctgtgctgcaccgtgctgtgtgaagggctatcccttgtatatgagggacactattgccctgtgaatacatgggctgacctggccagccaccctctggcctgtgtgggaccctgggtaacagggctcagtctaggagcggagggtaggactctgcctaggtcctcccctgctcctggcactggataatatgaagaccaaggaacctctacctctgcagctgcccagagctgagcctgggctctcactgtccattcaggaggcagagggtagacctggctggctgctcagcatcttgttcctgccagtcagcaggccctggagagattccagggctcagccctggtcttagtgtggtctcactcgctctgcctgggcagtgacagcaccattaatatggaggctggtgagagcggagcacacaaaagcagcctgcctgctgctttgcctctctctgcccagggcatggtgctagttcatggtggtttcagcctttcctagcagcttaggtttatgtggaggatggcaggggaacaggactggtttctgagactaggttccagctctccttgccctctaaagatagaaacaaacaacacacaacacacatgtatgtcttccccagactctccgtctcataactcagaaccagagagtctcagagctgagaggggcctcggggaagatttcactgatggagaaagctccagaagagagggcaagcatcctgcctggggtaccatggcagggagagcagagtcagaggctggaccaaaatgcagcctgagtggaagcatgccttaccccaggccctgcttcccgagcccaatgccccactcagctggcagacacagcaggcccgccctgggcactctgagggtgcagccacagcagatcaccaaggaggcattctgggccagggtggggtggggggcctgggcaagttctctggggaggtttccagctcctccacacctgctgtggggcctgattctccccgcccctgccccgctactggtgtggaaaccagggtcaggtgaagccctgcccaagccttgaggaagagagacacattctcacttcttcctttattctttctggtgcccaaggcactaacaactgggtgtataaagccttccagataatttcagccaatttctcccctagacttactccatctgattaaatggccacccagtcactcaagcaggagacctgatgttatccctgcctctgggctcctacttaaaaccagccacccactccagttcctcctcaccaggtctggctgcccctccgaaatctctctccattccagcttccacggtctgatccaaggacttcaacccactcaggccacttgatctcattagactcatgggtgtctccctgcttccctccaggcctcctcgatacatttccttcccagaggctatggaggcttttggaggatgcagatctgcccatgggctctccgtctctgcctccctccagtgtcctcgctcagggaggggaagctcaggcggaaagctgccgaactttgggttgcggctgtccctcgattagcagagctgcggtgttctcctcgggcaggcgggcaggtgggcgcgctttgctgccccctgcagctcgggggcctgcgatccccgcacagagcattccgtcaccccaggcccacgctctccagcccaccgccctcctctggacgccgcgagtggaagagagctgcgaactgagaagccgtactttgggcagggtggagggcccgggggctggagactgagcccctccgagaggagccgcccggccccgccccccggcgcagccattggccgcggcggagcggctgtacccgcagctccgtgcactcggcggctcctctccgggaaggtccccacttgacagctctgggcgaccggaggtggcgcccaaaggctgcccgggagatcggggctgggctggcgggggccaggaccccgcgccctctcggccgctcactctcgcgtccactccctcgcagtcacgccgggcgcgcactcccactccctctccgcacgcggctgcgggacgcgatggacgcggcactgctccacagcctgctggaggccaactgcagcctggcgctggctgaagagctgctcttggacggctgggggccacccctggaccccgagggtaggcgggaggcgagcggtcggaggctgcgcgggctccttctctcgcgcgctgggtgcgcccctgaccccgcgctccgagagccccgcgtccctgcgggcccctctgagccctactgcgctctctcccgccgccaggtccctactcctactgcaacacgaccttggaccagatcggaacgtgctggccccgcagcgctgccggagccctcgtggagaggccgtgccccgagtacttcaacggcgtcaagtacaacacgacccgtgagtgcccccggccctcgctgcctgctctacaccggcctcctgagaaggcggtttagggagtaaagaggattccggacccagcggtacaaagctgctgacggccgcggtaccgcggaccgcgggcgttaaggaccccttacagtgttgggggcgcgccttctgcttctacccccaatacagcgtctaatctcagtaagccagtgatttgcccacaattcccgtgctccatgcggtgacagcccaaaaaggggagaaggaaatacttcctcctcttggagtgtaaacctccttccctcattgtaggttcccgttgcctgaagttccccattagggcttcattgtttagacaatgcttcccctgcccaggagggggacctatcccaggagggcggatatgctaagtcccaaatcccccagagtgagtgcagtgaccagaccctactaccagaggggaggaggagggtaggaggcaggagggctggggcgagcgcatgtttcgtggggaggacatgcaggcgtaggttctgctaagccagagggtgcggggtgttgcatcttccctaatccgaggtcccaggactgacctgctgggctgagtcaggggctgtgggcagcattattcctgcgcccccataatgagtggtgtctgaatcagcaccccaac

SEQ ID NO: 11362 - DNA, 6000 bp, Homo sapiens
ttattgtaaatagtgctgcaataaacatacgtgtgcatgtgtctttatagttgaatgatttgcattcctttgggtatatacccagtaatgggattgctgggtcaaatggtatttctggttctagatccttgaggaattgccatactatcttctacaatgattgaactaatttacattcccaccaacagtataaaagcattcctcattctccacagcctcaccagcatctatggtttcttgactttttaataatcaccattctgaccggtgtgacatggtatctcactgtggttttgatttacatttctgtaatgatcagtgatgttgagctttatttcatgtttgttggctgtgtaaatgtcttcttttgagaagtgtccatatccttttcccactttttgatggggttgtttgctttcttcttgtaaatttgtttaaattccttgtaaattttggatattagacctttgtcagttaggtagattgcaaaaattttctcccattctgtagattgctggttcactctgatgatagtttcttttgctgcgcagaagttctttagtttagttagatcccatttgtcaattttggcttttgttgcaattgcttttggcatttttgtcatgaagtctttgcccatgtctatgtcctgaatggtattgcctaggttttcttctagagtttttatggtttgtggtttttatttaagaatttaatccatcttgagttaatttttgtataaggtgtaaggaagaggtccatttttagttttctgcatatggctagctagttttcccagcaccatttattgaataggaaatcctttccccattgcttgtatttgtcaggtttgttgaagatcagatagttgtagatgtgtggtgttatttctgaggtctctgttctgttccattggtctatatgtctgttttggtaccagtgccatgctgttttggttactgtagccttatagcatagtttgaagtcaggtagtgtgatgcttccagctttgttctttttgcttaggactgtcttggctatacaggtttttttttgatcccatacgaaatttaaagtagttttttctaattctctgaaaaatgtcaatggtagtttgatgggaatagcactgaatctataaattactttgagcagtatggccattttcacgatatcgattcttcctatccatgaggatggaatgttcttccatttgtttgtgtaatctcttatttccttgagcagtgatttgtagttctccttgaagaggtccttcacatccctctttagctgtattcctgggtattttattctctttgtaatgattgtgaattggagttcatttgtgatttggctctctgcttgtctattgttggattaaaggaatgcttgtaatttttgcacattgattttttatcctgcgactttgctgaagttacttctcagcttaaggagttttggggctgagatgatggggtattctaaatataaaaccatgttgtctgcaaacacagacaatttgacttcctctattcctatttgaatacccttcatttatttctcttgcctgattattgccctggccagaatttccaataccatgttgaataggagcagtgagagagggtattcttgtctatgctggttttcaaagggaatgctttcaattatccccattcaatgtgatattggctgtggatttgtcataaatagctcttattttgagatatgttccatcaatacctagtctattgaagtttttaacataaagggatgttgccttttatcaaaggccttttctgcatctattgagataatcatgtggtttttgtcttgggttctgtttatgtgacggattacatttattgatttgcgtatgttgaaccagacttgcatctcaggatgaagccgacttgatcatggtggatacgttttttgatgtcctcctggattcagtttgccagtattttattgaggatttttgcatcaatgctcatcagggatattggcctgaagtgttcttcttttgttgtgtctctgcccggatttggtatcaggatgatgctggcttcataaaatgaattagggaggagtccctccttttcaattcttcagaatagtttcagaagaaatggtaccagctcctctttgtaactctggtagaattcagctgtggatccatttggtcctggacattttttggttggtaggccattaattactgcctcaatttcagaacttgctattggtctattcagggctccaacttcttcctggtttagtcttgggaggttaccaggaatttatcaatttcttctagattttctagtttatttgtgtagaggtgtttacagtattctctgatggtaatttgtatttctgtggggtcagtgatgataccccctttttcatattttattgtgtctatttggtgcttctctcttttcttctttattagtctagctagtggcttatctattttttaaatttttttaaaaaaccagctcctggttttattgatttttttggagggttttttgggtttctatgtccttcagttctgctctgctcttagttatttcttgttttatgctagcttttggattagtttgcttttgcctctctagctcttttaattgtgatattagggtgtcgatttgagatctttgcagctttgtgatgtgtgcatttagtgctataaatttccctcttaacactgctttaactgtgtcccagagattctggtacattgtctctttgttctcattggtttccaagaacttcttgatttctgcctgaatttcattatttacccaggagtcacttgggagcaggttgttcagtttccatgtaattgtgtggttttgaatgtgttttttagtcctgagttctaatttgattgcattgtggtctgagagactgtttgttatgattttagttcttttgcttttgctgaggaatgttttacttccaattatgtggtcgattttagaataagttccatgtggtactgagaagaatgtatattctgttgatttgggttggagagttctgtagatgtctattaggtccacttgatacagagctgagttcaagccctgaatatccttgctaattttctgtctcattgatctctctaatattggtagtagaatgttaaagtctcccactattattgtgtgggagtctgagtatctttgtaagtctctaagaacttattttatgaatctgggtgctcctgtatagggtgcatatatatttagagtagttagctcttgttgaactgttccctttaccatcatgcaaggccttctttgtctttttttttatcttgttggtttaaagtctgttttgtcagagactaggattgcaacccatgctttttttttttttttttttctttccatttgcttggtaaattttcctccatccctttgttttgaacctatgtgtgtctttgcacatgaaatggatctcctgaatatagcacatcaatgggtcctgactttttattcaatttgccagtctgtgtcttttaattggggcatttagcccatttacatttaaggttagcattcttatgtgtgaatttgatccatcatcatgatgctatctggttattttgcacaacagttgatgcagtttctacatagtgccattggttttatattttggtgtgtttttgcagtggctggtactggtttttcctttccatatttagtgcttctttcaggagctcttgcaaggcagaccaaatggtaacaaaatctctcagcatttgcttgcccagaaatgattttatttcttcttcgcttatgaagcttagtttggctgaatattaaattctgggttgaaaattcttttctttaagaatgttgaatattggcctccaatctcttctagcttgtagagtttctgttgagaggtcttctgttagtctgaagggctttgctttgtaggttactttgcctttctctctggctgcccttaatattttttcattcatttcaaccttggagaatctgatgattatgtgtcttggggttgatcttctcatgaaatatcttagtggtgttctctgtatttcctgaatttgcatgttggccagtcttgctatgttggggaagttctcctggataaaggataggtaaattctatgggtaatacagtagatatagtgcaacaggaacttaccagttaagatacagtcataaccactcacccctagttggaatgtaggtttcacacaactcccactgatgaaaagaaatatatgtatttttcaactgtttaaccctttgttaagttttcttgtgtaaaattatctgcagagccatgaaaaaccatttgatatttgtgactaagcagcctgtttggatgattatgctcttcagtatgaatggtgagctgttaaatgacatgctcaatcattgctatggaagaaatttgttcttactagcaacttgaagcttaaagaaacatttataggaaagaaaattactcaaagctttaaataaggctacttttagagttggccttagactacctagagggcatgatgattaatctttcacaaattacagattttatttgttcatgtccagtgaggtgacttcttggtggacatcttcattgcaattttcagcagctctatcaatgacacatgttaactgaagctgacatgggttgctcttgctctcttggaatgtctttatttctgtcctaatatgcaaaggtagtgccagaatttcttaataggagggcctcaggtataacaatctagttgacaggaaaagcaatggaatcttcactgcatttgcatcacaagcatactgttttttcttacgtgtgttttttagggtgtcttgggatgttgatcctctttaagtcaaatagaaaaaatgaaaatgaaatgccatagccaatattagagatatattaattttagtctttgttgcttttatatttttctaggacaaagagatcttcaaaaatcaaaaatgaggttcacatttacaagccggtgcttggcactgtttcttcttctaaatgtaagtaaaacaaaagtattcaaagccatgctaatgaagaatgctgaataaggaggaatgttttgagtgtgatttaattagtatttgcaagggtaggcattggtctccagaagccgaaactaagttcctcaaagccattattttgcttaatattttgttaacaaatctctcctctgaactgtctctaatttaaattagtgtttgtggtctacccagaaatttgagttttgtttacaaaactttagcattaattttagacatctccatattatcttagaaattaacatagttggtaaataatattctcaggtaaaatgttttcatgttgaaaaaactatgttttgaatcttagttcaaaactatgatttgaatgatagtttctgggctgttcaatccttttaaaacatctgggctgttcaattcttttaaaacttctgaactctttcagtctggctattgatttcaaatgtatttttcatcaaaaactgactatggaaacttcaagtctttatataccactattattctataactctttctccaatcttttaaattatgttcagtttgtgtaattctatattgttttattcctaaaagatttagcaagtaatcggaaatataatcatcttagagaacactatcaatgcctattatttgtgtcaacattgttaacctaccatcacatcagcttcaatagcacatgaatgggagatgagtaaattttacgtaaatcaatgtggagctgccttgcttcttatcctttctgtcacatcagagtaacatttgctaataaattacagttggcagcaaagatcactcaatatctcatactgtcatactgacccacacaaagcttgcatagggttcgaggatttccattgtttattaatgtgtagttataggcctacaagtctgtctaaactgtttgtctttatattattcaagaaaa

SEQ ID NO: 11363 - DNA, 6000 bp, Homo sapiens
cctttgggtatatacccagtaatgggatggctgggtcaaatggtatttctagttctagatccctgaggaatcaccacactgacttgcacaatggttgaactagtttacagtcccaccaacagtgtaaaagtgttcctgtttctccacatcctctccagcacctgttgtttcctgactttttaatgattgccattcgaactggtgtgagatggtatctcattgtggttttgatttgcatttctctgatggccaatgatggtgagcattttttcatgtgttttttggctacataaatgtcttcttttgagaagcgtctgttcatgcaaaaactggaagcattccctttgaaaactggcacaagacagggatgccctctctcaccactcctattcaacatagtgttggaagttctggccagggcaattaggcaggagaaggaaataaagggtattcaattaggaaaagaggaagtcaaattgtccctgtctgcagatgacatgattgtatatctaaaaaaccccactgtcacagcccaaaatctccttaagctgataagcaacttcagcaaagtctcaggatacaaaatcaatgtacaaaaatcacaagcattcttatacataaataacagacaaacagagagccaaatcatgagtgaactcccattcacaattgcttcaaagagaataaaatacctaggaatccaacttacaagggatgtgaaggacctcttcaaggagaagtacaaaccactgttcaatgaaataaaagaggatacaaagaaatggaagagcattccatgctcatgggtaggaagaatcaatatcatgaaaatgaccatactgcccaaggtaatttatagattcaatgccatccccatcaagctaccaatgactttcttcacagaattggaaaaaactactttaaagttcatatggaaccaaaaaagagcccgcatcgccaagtcaatcctaagccgaaagaacaaagttggaggcatcaagctacctgacttcaaactatactacaaggctacagtaaccaaaacagcatggtactggtaccaaaacagagatatagatcaatggaacagaacagacgcctcagaaataacgccgcatatctacaactatctgatctttgacaaacctaagaaaaacaagcaatgggaaaaggattctctatttaataaatggtgctgggaaaactgaccagccatatgtagaaagctgaaactggatcccttccttacaccttatacaaaaattaattcaagatggattaaagacttaaacgttagaccgaaaaccataaaaaccctagaagaaaacctaggcaataccattcaggacataggcatgggcaaggacttcatgtctaaaacaccaaaagcaatggcaacaaaagccaaaattgacaaatgggatctagttaaactaaagagcttctgcacagcaaaagacactaccatcagagtgaacaggcaacctacaaaatgggagaaaattttcgcaacctactcatctgacaaagggctaatatccagaatctacaatgagctcaaacaaatttacaagaaaaaaacaaacaaccccatcaaaaagatagttaaagttttaaagaaaactttaaaaaggctctttttcatatacaactttaaattttggtaacagttgagagcaccaaagacacacgttttatgctttaagcagaagacatgtcatttgaaatgaattactaaaaatcttttatttagaatgtttattctagtctattattctctgcaattaccaagtgttatttcctgacacacactttcatgtaaacaatgcacagaaaaaaacactgtttttgctgatcatgatactatgcatcagttggcaaaaatctgaaatagattaattttgaaagcaaggtcattggtttttaaaataaaatggtatgtactttttataagaaccaaattaagcaaattatatcagttttcctaatacactgatcaatatagtacatgtaatattccaacagtttgtaaatcttcagaacccttcaaacccaaggattagagcatatagttttgttgtatttgctttgttcttttactcttaacctgaaaatcaaattttctgggtttggtgatgtaggggataaaaaaaaaagaaattagttaagaccaactaagcctatgatctaaacaatttgaagcaataactttacatttgagaacttgtagatgatatgaaacttttgtcagctattaaacatattttttaaagccctgctgatgaaagatgtagcttccaatgttttctccagtagagttaatgagctagatagaaaatatctcattaatttcttgagtccccttgtgaggcaagaaaatgacattcttatccaacagctggaaaagctgaagaattagtggatgtaactgtgctcaactgcaaaggaaaaaaatagctttactataccctgagatgtggatatgaaagaatattgcatacacatataccctctcccttatttttaaggaatcaatatctgcttaaagaataagactagttaaaacccttggatcttggccctataacttttggcagagtatattactgcttcatggcctggcagtgcagtgactcttttaatttactttaaaatagcttttccctaatctgtacaacctaacatctgaccaatcatgaatcttcagcaaacttaagcctcttattccatacattttttaaaactgtaaaaattcaggaaataactctttgcaaagtacattgaagcatttattgggaagcaaaaaagcacaagttgaagtgatttgtagtttcataaaaacgaatttgacattttacttagaagttgcaaaccaccacatggttttgagttttgaattcatttgctttgcaaaaagtggaatgttttatttgaatggaaatgccctcaagttacttccagcatggctgtaggattgatttttctaggttaagggaatgccaaagtttagtgccttgtgtatattcttttcgaaaaaaacaaactattatccatgtatttaaatggacgtaggaaattcaagaacaaatcagggaaatttaacatcatttcagtattaccaacatagggctttgtgtaacgactgtgacatcaagataaggctttacctcggctcatccaatagaaatacagtatgtaaattaacccatattatctgtatgctgattggcctgagttcccctgaatgtcacaatctcaccacccagcaatgaggtattttactgctgtctcaagatcagattattactgtagagaagatttttattttttgtttcattaacagattattataaagcaaaaagcatgcagaaaaagaagcagacgttttacattgggaattaatgaaagcgtgtctgctagttttgggtaggagaactgggaagttgttgcttaaaattttatatcacctccacaaacaaaactcttcggaaatggtaaaataagaaaatgcatgattctagaggcattcctaagcacccacgtgtcaggctttgtggtgtctgtggtatcatccgaccgtttggactggtgtaagttttacgtatttgttatatttctagtatttttcatctgtaataacaaaggggaaaaaaggaaactcgtacacataactgctttgacatcacccatcattggtcagcggaacttgtaagaagggaaaaggaatactgttgcttggtggggtggaatgccaggaatagccatttaaacattttataagcctgattctttagtgacatcctttaaggtagactgaatgtaaatcatattgtagttgtcctctgaacttagctttctccctacttttacgcatatttgcgtgcattggagaatagaagatgactaacaaagagagagctgccctaacgtgccttcccttcttccccattgaaaagatttttaactgtgggaaaaagataaataaataaataaataactttttttcttttttcccattcttttcttgtctttttccagctaacctgcaaatttaaaggttagctggagacatcacttaaaaataaatatataaaagaagcctccggtggtttggaccaccctaaaagaaaagggaagaaagtgtctggggaaggttagggttccgggaagctgagggagggggcgggcgtcacgggcactgtgacttcctcgtgcgctgcctttgggaagaggatgggcctgaggtcctgaaagggcctttccagccccccactacaaatgcggggagggaaaagttcagaagcagccacgaagggacaaaagcttaatgctgccagttggattggacagggcagtcaataaacccagccagctctggagtcaggtaggggttcctgctggttccacagaggctgaagcagccccgccgccgccctcgccaccgcagccgccgccgccgcggcccctgcgttactgggggagacggtgccgctgcgacaggggaggacgcggctggagctcaaggaggctccagcgcgcaggcgccgccgagccctgcctggatgctcagtcaaggcactaaggcaaaaaaaaaaaaaaaaaaaacaaaaaacaaaaaaaaaaaaaaaaaaaagaaaaagaaaaaaagaaaaaaatcagcaatttatagaaagaagctatagtctgtcgggatatccaacaccaacaggtaggaggatatactcttggttaagtttgggggatgtgggggaatgcacagtgttgatgaaactgcaggttcaccgagaaagagccctccctcaggttgtgtgtgtgtgtgtgtgtgtgtgtgtctctgtgtgtgtgtgtgtgtgtgtgtgtgtatgtgttttgtgacaataaactgcataatggaagtacattcagacaatgcatcttcagtagggcttactgagagctccatttctggaaagccttacaagactgaggaatatcagactgcgaatcaccgggaacggttcctttgcagcacagaagcaatctctctccccatcttcgcgtatgtaatgcatgtctctctccctctccccctcctccaccctccccccattataaatccaggggtggcggatttcaggtttcgtaatgttgcatgatgcgatcggtatttacccgaggatgtaccggtggggaaattaaaatcatcgaacgcagttttgcctgggcttccaccagcatattccgggccagtgagaagtggcaaaagaaacacgcttggtgggaataacagaggaagccgatttccctggtgtggtccaggcacctgcgagacaatgtgcattttgttttaaaaagcagccacttgtgatttgcaacaaaggttatcagtgtaaatgggaaaggcttaattgcccaagaaatacaggttcatgttatattcatttgaatccaggcagccaaggtttacaaatggaagtgcattattcctctgggtgtgtttccctgtccaatatttacattaaccattttaataatcatgtgggcttaaaagatttgccagaaatggggggtagggtggagagggaaagacaaatgattaaatcacatcaaatcttgggacaagtaagttcctattaattttgaagttaattttgaaattttgctttaagatgaatcaacaaatactcttatgcagcatgaatagtggcacttaagatatattttgcacgggttctttggacccacatcaaacagagaagctgcctgtgaaacactgacagatactaatagatctcaaataaatgtaggtagtgtctctgcctcctaatagcaatcttgtagattccattgcaattctagtggttaattcctggactggcatattttacaagaatgggacattttattccttctctcctaaagttaccctatcaaatgtatattgtccaaaatagggacattttaaaattcacttagcttgaaaaactaaacaagccaattctctgaaatctcgagcaaaaa

SEQ ID NO: 11364 - DNA, 6000 bp, Homo sapiens
tggtgggtccactgaccttattgcttatggatatgaaactgtttatcactccagtttatcactaaaaatttctccaccaagtccctggactttctgaatctggggggattcagaaacaagtaataagtaatagttattacttattataaataagcaattttataattacttataaataagcaattttataattattaaaataataataagtatttgaagtaataagtatctctttctggaggtaaataataagtatttgaaataatacttatttcaaagtattattgaaataataagtatttgaaatatacaaataagtatttgaagtgatggatattttaattagttttatttgatcatcccacaaagtaaatatgtattaaaacaccccattgtacctcaagatatatacaattatttttaatcaattaaaaataaaatgggacgtgaaaaaaatcttagactaagttcatctagctttgtctgaaataccctaaaaatccaaaccagtgcctctctcatcctgcaacgttgtctcagcatgtctgctcattttgtctgactctggaatagaattctaagaaacattctggcacgattcagcttggcttccactcctttgcacgagtttgtcagaaatcagaaatacttaacgttgcactttcggtcatccagcctaggataatttaatcccggatattattggttacccttgtaaagaaaccaaaaatatagctcaatcatcacgtgagcctttgagatccaggtaaagtttgactgaaatcccaattctagacttggggcagtctgagcttttccaacaagacccacccctcactttctcagcttttcaagactgtactcctgagtccacaggcatttctcaatcacttctctcttcagaaccagattcagagtcccttccctatgcaactgaaaagtactcatatttgtgttagtcatgctctttcccataagtttctggagttgagcagaagaatcacatgacataaggtacatttctatttcttgctggcaaacctttctctggcctctctactcagtacccagtgctccctctgtgatgtcctccctccacctagtgcagctgggtaaagtgtggtcctgttccttgctctggttgcttcacttcctgggaataaccagacacatttatctgctttccgctacataagttagaatgctggtgaataaatttctctttacattattttaaatttatatttttatggaacacatgatttatgtatgaacatagaaacacacttactgccttatctgcatattataatctatgtttttattggatcttggtgatcatttttatcattccttatgttttacttgtggaactgaggtatacagaaataagtttattcaattaattatactgctgtgtgaggggaaaatattatcaaataaagcactttttctttctccctctcagtgttatcccacctgctcagtaccacatgctagttgtaagtggtttaatctatcagtgtatattctgctcacataacaggatttcagagctacttcggcccagtactaataagcattacacaaaatcaggccctgtgttagtttctttgcaatttccgctgttttcccctcagggtcacgaaatgtctacaactcctagcaccatgcacaatacagaataacaccaaacacaagatgaagaggaaagaatctctcctcatgaatctctctgttcttatcagagagaaacgtttgtcacaggaggtctcagcaggcttctcctctattcccagtgaccagaattgattcgtgtgcccaaactgaacaggcaaagaaaacactaaactaagagtctggcatttaaagcctctccagaaagagataggttctgcctataagggaaaaatgtagcaaacttgcttgcagggaggcaaacatccacatggctttaagccatcatatgattataccacatttgatctattacttaactgatggtcatgtacatagttttcagtcttttggtattacaacaattctgaaataaatagactagtaaatttctgcttgtttatatatgtgtaaggatttctctataatatacaatatatacctagaagtagaatgcctgcagaataaggtctgtacattttctattaaatatgaccaaactgttttccaatgtaactatcttaattcatattccttccagtggttcataaagactctgattttttcatatcttctcttagagttgatattcaaattttattttgtttttgcaatgagaaaaatgaaaaataactactcagtattatttgtatttttcttattgctagagaggttaagcatccttttatgaactaattggtattattgtctaccctttggcgaattgcctgctcttttattttcctgtttttaaagttttttaatgaaacacacaaacacatacacatcaaaaaagagtaccatctagaaacacccttaatttattatatatgtgtatatatgtgtgtattatacatttttatatataaaaatgtatatgtgtatataaatataaaatgtttgcttgataatagcaagcatttatatattatatataacatatgtatatatattatatatacatatattaatatatatacatatgttatatataacatatgtgtatatatataatgtttgcttgataatagcaaagtctagaattgggcaagttattcctatcaaatttgcaaataagatacaacagtctgcctccctcagggggaagtaaataaagtattagaggaaactaggagtatgctcaggaatgagaaaaagacaaaatctctaacagtgaagatagtagatgcttataaacataaattggcattctttttccctgtgggacattaggaaaaaaactggtgggccttccctcatgtctacctgagaagggggaaagagaattggagagatgacagagtagagaggcatgggcctcctgccatttatcatttttactgaaaagaatgccagagtttgccatagatcaaatgtacactgcagaaggtagctgagcttcagtcaccttgccagcacctgaccaatgaggactagttaagggacaacaatcccctgtctgataagggaaagggtgtgagctaaaggagagtggaagaaggcaaaccagaattgggatcactgcaatgaggagaccccagaggtggccctgaaggttcacatgcacacatgatgaaagagccagactctcaactcctaaccccagggaacatcaatcaccagtctatggacactctgtatgtctcaccttcaaactttcccaaaaagagtatctgggttatttaatcagccactatcacatagaaaacactccagtggagtagagtagtgccaggccatctctcatgcagcaggccagtctatgaggggctgctttggacagaaactcattcctggtcatactattgtggctggaatccagtcatgaggggtgtagtatggtggccacactttcacaacccctcagacagagattgagagcatcacagtccttccaagtttactcagaatggggcagtgtatatagctggcaacatgcttagtgtattcaggacataaattagaggttaatgctattattgcatgtttcacataccaacatttcatatctcatctttctcccttcttatgtctggatacatctcaaccaattcaccttttaataatatatattgttttgtcatctcagttttttatttcctgtttcttgcattttattgagaatgcaaagcagatgctttcttacacttaattctgttttctggtgtaatttttcaagctattgcttacctttgcttcatgagttcagtagtttcttgttttgtgttcaagaattctaagattcatgtttgcttgcttctgtgttgtcttccttgaatgactaaaaagtccatacagactccgagtttatcatacataaggtcaatgactttcactttgtctctgtcaccaactagcaattagaataacctctcatttctgaagccacttattacatatttggtgtctatttggaagagttgtcctgaactgaaggaaaacgtattccttttatagcctgcttgtatagctatgaaatgatgcctgcacatttagaagtaatacgctttactagtggtaagagggtcctctttcaattcttcctgagcaatgggagcagtgacaaaaagaacctagccatgtaagagaaaaaaaaaaacacacagtgatgttaatgggacaagaacaattcctgaaaatatataaggcatatgctcaaagcatcggaattggcagaagaacaatagctaagagaggctgtgtgcagtgttttctctgcagtttgatttctctaagtgggggaattcaatgggcagttatgagagtggcctgcattggatggaaatacttgaaggtctggggttcagcaattttgtggaatttcggaggaaagacttttcattatcatttttatttaccctcacactttggttgtagcatccaccactagctgccatgagaactgggaagatagggcttctgaggttcgctttggtactgcactcaacagagcagaaacatcatgcaggacgtgaatgaacagggaaggattcatctttcttgttgctcaaattttaggttaaaagagtgaagatgtcatttaaagaagataaggaaataagctaagtgcacctcagaaaaagaggaaataaacaacatggttatgaaatacatatgcctttttggaataatcaaatcacctcaggagcaggaatccacatttaaacatttccctacattcagatgtgatagcaaaccagcaagcaaagcataaacaaattctatagataggaaaatgacaaaatcaaaaatgagcttgggaaaatttgcttccagagagaggggttttcttgtaccagacagtggtggaatcaggaacccattctctacctggaaattggtacagagattcagagtctttgtccaggaagacactttggagtagaagaatgatacccatccaactcactgtcttcttcatgatcatctatgtgcttgagtccttgacaattattgtgcagagcagcctaattgttgcagtgctgggcagagaatggctgcaagtcagaaggctgatgcctgtggacatgattctcatcagcctgggcatctctcgcttctgtctacagtgggcatcaatgctgaacaatttttgctcctattttaatttgaattatgtactttgcaacttaacaatcacctgggaattttttaatatccttacattctggttaaacagcttgcttaccgtgttctactgcatcaaggtctcttctttcacccatcacatctttctctggctgaggtggagaattttgaggttgtttccctggatattactgggttctctgatgattacttgtgtaacaatcatcccttcagctattgggaattacattcaaattcagttactcaccatggagcatctaccaagaaacagcactgtaactgacaaacttgaaaattttcatcagtatcagttccaggctcatacagttgcattggttattcctttcatcctgttcctggcctccaccatctttctcatggcatcactgaccaagcagatacaacatcatagcactggtcactgcaatccaagcatgaaagcgcgcttcactgccctgaggtcccttgccgtcttatttattgtgtttacctcttactttctaaccatactcatcaccattataggtactctatttgataagagatgttggttatgggtctgggaagcttttgtctatgctttcatcttaatgcattccacttcactgatgctgagcagccctacgttgaaaaggattctaaagggaaagtgctaggcctagaggttgcctgaggcacaggataaaagactcccgagcaattgatataattaat

SEQ ID NO: 11365 - DNA, 6000 bp, Homo sapiens
ttcaaaaaggatgttgatcaaaaggtaggggtgcatttcacaagcatttatttctataaagaattatgaaaggttgagaatgtttggttatgcttgtgttaattcatcttcagtttcacccttttgcattcaagtttctttacaaacaacaacaacaacaacaacaaaccgaatccaacaaaacccaaaggacttggctatgcaattagtgtgctggtccaagtatggttcaaacatattttatgtagcccaatgtctacatttttgtctggaataaataaaagactattttgattattgttgttttattttaaattttaagtactttaattttgatatttgatttttaaggtagacataaccatattgatattatattccaagcagtgccatttcccacccgttaatgataatttggctcttatatatggcaaaagagagaggtgattaatgaaggtgatcaatggaggcttccaaactaacaattaataattcagtgacagaaaggctgcaaccacaaactatttggaaaacagacaaattttgaatttcagaaaataataatctattggtggtatgttacagtttctttcagaaaaaatgacccttttgaattatctgaggcaaaaaagaaagaaaattatttgataagtgaattgtgtgctgggtaaagcttctgttcaacgatgtatcttaaaacttgaaatagtaatttctctcattctgtgatgtgtgttatttcagcacaccaaacaccaaatgaagtgtaatagattttataaaaatgccaaggcaggtaataatttacatgttctttttttattaaaaaaatcaatagtatgtattataaaccttgtgaaatgctgacacaggaaaaaaaatccatgttcaaatcagttttctttgtacagataaatggcctcagatgtaaaccagacaatgattagctaattccttttctgatctatatttctaaagtagaatctacacaaatgaatgagatgtgactatttccatttaaaatttatagttacagctgagctaagctttggaaaaatatttgaagatgtgtgtttttctttttgcagggaatgcattctaaattttcttataaacctattactttacacttttatttaccaagcatattctttttcaaggattatgtgtttttgacagcatttaaatttcactaaaaacaaagttgaactaccaagagcaacagtaataaatattttatactttatgtagtcttttcatatctacctaatccacataacaacttgggtgagcagagctgagagtaggtattagtatccttattatacagatgagaaaattgtgtttccaaaaatataaataattgatatttttggaaacacaattttataaataattgatattgacctgggctccaatagagtagctggagctctttggttttattcatggtccgaataagttagagaaccagaacttggcaaccatccaagtaggtaggcatcattgttcaggttaaggaagggaccactcatgaatgagataccaccacagacaaacacaggtagctcctccttcaggcctttccccagccactctccaagcatggtacctgagttctatagcccaccactttaagaatgatgcccaactctgggccaagcatgtgtgaattacaatggagcttctaagggagcaggtaaagggatttttccctgtttagctttgattcctttctgtgtagtgatagagattagtgacacatttatgtggtctagagtaaaaaggatagaaacatatcttacatgtgtaacttaaactctaagctaatgagatgagaagggaagctatatcactgtttcattttggcaacttatttttcctgtttcattattaatccagatttccctcttctaaattttttttaaagaaacaagatactacagttagagtagaagcttccttccatcccatgaccattcttctatttcctgaggtgactaatattctgaagttgatctgtatttattccattcacatattttatatgatacaccatgtatgattatcaaattgttttatgtgcattttaagagctacacaaatggtagcattatatagttaacacatcaagttctacgtttttcccttacatttatgtttctgagattcagtcttggtgatacacataagcctagtttgtcctttttatgagtatacaagaaaatataaattcagtgagagcagaactttattttattcactgctctgacctaagtaacttgagcagaatatttctttaatgaagtagtgaatttgagagaatgagttagtgtatataaatgaatgaattaatgtacaaatgaatgtgtgctattagcttatattttttcctatttctggctttgtctgattttgacattaaggttattctgccttcacaaaatgaactgagtagctttaaaacattttgtataaatgtatatttattccgcaggatatgctaaggtctagcactttcctctgggtagatcttgatgaatgatttgatttctttaatgttatagttcgattacagtttctgaaaattttcttcttgaactatttttggtagtttatgtttttctatacaattattcctgttgtctccatttttagatttaatggtgtattagtttactattgctactgcaacaaataaccataaattttgtggcttaaaacaacacacattcattatcttacagttatggaggtcagaagtctcaaatgggctagtagatccttttttatgcccattctagcttccagagattgcccacatcacttggcttgtgtttgtttttactctgaccctcctgcctctcatttgtaagggctcttgtgattatagtgtacccacctggataatcacgatactctccccatctcaagagtcttagctgaattgcattggcaaaatcccttttgctctgtaaggtaacatactcacaggtattaggaattaggattcggacatttttttgggggggcattattctatttaccacaattggtatcatatgttccattgtgttttctcctgcctctctagatgtgttgctttaaaaaaattcaggccgggtgtgatggctcacgcctgtaatgccagcgctttgggaggccgaggcgggcggatcacgaggtcaggagctcaagaccagcctggccaacatagtgaaaccccgtctctgctaaaaatacaaaaaaaattagccgggcatggtggcgggtgcctgtagtctcagctacttgggaggctgaggcaggagaatcgcttgaacccggggaggcggaggttgcagtgagtcgagatcgcaccactgcactccagcctgggcgacacagcaagactctgtttaaaaaaaaaattcagaatgtgtttatttcttcctctatcattttctcttcattaatttgtctattttattagctatgccctgacagttttgacagggttgtgggatatagtagaaaggttggaaaggcatggacagccgtgctgggagtgctgttcgagtaattttctgcctccagtcatttcccactacttcatcaaatacaactacctcactatgctctgggtggtacgaagtaacccatggtaggatgcttcccaactcagtgttaaaggtaatggtgcatcctgagctttctcgctctgcatctcaatcctggaactggtaattctctatgactgacacctctgagctcccattctctcctatctctagggaatacctgaggaggtgaggtttcaccttcttactccccgcggcccaacccccgtccgcccctcccccgccccgcccctcgccccccagagctgagacctgggcatgcgcatcagccgcaacagattggaggggaccctgctgctcactcccctgctaccctcctctcttccctcccccgaccgctctcatattcccgttcccacccccaccccccactcccgccccgcacccgcccctagcccgggctcggggacctgtcaggctggtttcgacagctggggaattaacctgtcccgcccatccctagcctcgagccgcgcaggctccgcgcctccgcccttgttccctcccagctcctccgagtggaagccgctacaaatggcttgaatgaaacgtgtgtgggtttagtgagtggtgaaccaccaggggatcccgtctccccacaaaccagtatctctccgaggaggaggcgaaggagtgggaggaggcaacgagccgagagtcgagcttcgcgggcgcgcgcagcggctggagcgcgggggcgaggccgggccacctccccttcccggccgcgcactgcctggcccgcggcggttccaggcaccacccttcccgtccgggctgagcccgctgtggcagtgactagctcccgcggctagcggcactgtccaccgacgagcggcgccctcttctcccccttctccccacgatttccttctctgcggcggcacgccgtccagcagcctgcttcgccccgtcgtcaactttgagctggaggagaagcaactttggcagtggccgcggggttggaatcccgcttctcctcggcagcagtaggctcgcaagtcgctggggttaggtggggcaagagtttcgccggcgcatcagcgctgcttcggactgtttgcaacgtgtttccagcgagctgggagcggggttgtgactgcgagtcgtctgggggagggggacttgtttttcttttcctctagagacctcggcttgcaactggatcaaacgctgtcgaaaggatgtaaataggcagagcaactgttaccaagaaggccaccacccccacccaaaggcagtgaggagtgtggggcttcgtctgggctcccccgagtctcaacagtaatcaacagtcaggtgttgattgcaacttttcaaggtcagccaccgggagtagcctattccctctaggaaccttggagggcataccttgctgggactcaacttggctgagaaatgcacaagatgccaaaggaggaaggattatagggggcgtgtgtgtgacccccaagaccgatcttccgctatcaccctaatctccggttccccgctacccgggcgggggtgagtatgtgacatgtgcctaactctcagcagcaacttcggcagcaggtgtcgatcctaactaagcaggagctgcggctgccgggtgtgccctcaccaagccatgcgagccccgggcgcgcttctcgcccgcatgtcgcggctactgcttctgctactgctcaaggtgtctgcctcttctgccctcggggtcgcccctgcgtccagaaacgaaacttgtctgggggagagctgtgcacctacagtgatccagcgccgcggcagggacgcctggggaccgggaaattctgcaagagacgttctgcgagcccgagcacccagggaggagcagggggcagcgtttcttgcgggaccctcctgggacctgccggcggccccgggccgtgacccggctgcaggcagaggggcggaggcgtcggcagccggacccccgggacctccaaccaggccacctggcccctggaggtggaaaggtgctcggggtcaggagccttctgaaactttggggagagggaaccccacggccctccagctcttccttcagatctcagaggaggaagagaagggtcccagaggcgctggcatttccgggcgtagccaggagcagagtgtgaagacagtccccggagccagcgatcttttttactggccaaggagagccgggaaactccagggttcccaccacaagcccctgtccaagacggccaatggactggcggggcacgaagggtggacaattgcactcccgggccgggcgctggcccagaatggatccttgggtgaaggaatccatgagcctgggggtccccgccggggaaacagcacgaaccggcgtgtgagactgaagaaccccttctacccgctgacccaggag

SEQ ID NO: 11366 - DNA, 6000 bp, Homo sapiens
gaggggacagcctctttccagtaaaaactctacattattgaaaggggaacatgaaccttggctggacaggtgtctttttgccaaccacatgttataggtcaggaattgcagtatagaaatgtgaaagggtcaagataatatgacttattaatggcaaagttaggggtggagctcagcctctttttccccccagaaaatactcgatggaaccttctcagtgttaaaccccatctaaagggagagtggagtaaaagagagaaaagagagcttctgtggccatggacagatatgagcatataggcaccccttccctgggctcctcatttctcaggtctgcctccttaggcattgcaagcaagtattcatatatttaaatgtgctgcctgctggctgcctgtgaggagaatgatttcctgaatgtagtacattttaaattttagtgaacgtcatttcctggaacgtttgcaaaacaggcagcttcccaggccccatcccagcaagtctgattcaaacagctctgggatagggcccagaaatctgtgcttacaatcagcacccctgtgattttgaggcaggtggtccttgcaacacacatagagaggcactgccttgattagtacaagttttatgaggtttgcctaaacaggtgttgcagaggctaactgtgacctgcccttattgtcttgtccttgacccctgattacatatcacctgcctactaactgccagcccctgcattttttttccagaggtctttacatgatctctggaggctgctttgccatccatgtgataggctagaattgccagagaataaacatcatctggtagcagttcttaactaacatcttataagtgttggtgtatagataccccagctccctcatccctcagttggacccactctctgctgtgtgttttacactgacttccagagttccccactgggattaggtaccaggtgcctacagtgatacctagcttgataatgcaccctttattggctcacttccccacctgagtactgggattcccttcacctcttaaactacctgctcttgaatccttgtttcaggttgtgcttctaggggaacccaaatgaagccagtagagatgcccatataccatatgtcagaaattcttaaagaatctttcccatgactcctgtatgcaggtatgagttgactgtggaagtgcagaacacactcattcatgacattggtgtcatgaatctcattggctctatctgactgtcagtctaacatgtctgatcttgcttctagcagccagtgtctaataaactgagcaaaacccacatggtacactcactgccatgtgcagatggtctagcaagaaaaatattgtcttcgtttccaaaagaaacaaatcccattcccactttcccctgtcagctttgctccatgtgggagcatcatgctgtcgatatttctcttgggtgagtagcctgcaaaggttctcagccttaatgattactccaaagcaggaattgtggcataaatctccatgtgtggaatatgtatcacagcttgagttaaatggaccccaaacatatggcattgttttttgcattttctaacacatgggcagtttctcacattttaaatcaactgaaaatgagaagattataggcaaatcttcctggaggattaactactaggaaatatacttggtttgaataaacatttggggtgggatggaggatgaggtcagacactttccaaagacacagtgtgtattgcagagggtgggatcccaaggggaggcaaggtggatgactctagaataagctgcatgtctggacggcctggtcttcagacactctcccctgactcagattgcagcaatgagcaagcagcatcatggtgtttggccctgacgaatagaggttgtacagccaataactttttcctgtgaatgttactgataaggaccagtccctcctggagacaatctttcttcctgtgtcccagtgttgctatcagtctgggcgaattataacctgtacatgggcaaattataacctgtacagaaggctgtgtcacttgctcaggggctactagataaagccattggaaacactgaagaatatatagaagggctctatttcttattgaccagattccatgtaggatttgagtgatggttctattttgagtatcaagagttaaagatgatgcaaaacgaagcatcggacttgcactttccttaggagagatcaagtctagttttctcgcagaaggctgcaccaaaaagggcagcgatgtgcctgtaagacatcagttctctgcaggtaatgatcaatagggaaaggagaaaggcagctcattaggcatttcttccccaagaggctcactcggcctccttaggcttccaaagccacagccagccttattgcccttattattaaaatgggcccactagagcaccaggctgctgccctcttggctcatgccaggcaacgacccaactggccctgcagctggcctctagcctaccctgaagacgatgtgtggtcagcagttgtcgatgcccaacgtatttgcgggcctcctctgcctttcccctccgtcgtgtctcttttcccctcaaatttatcaatgcacacgtagtaaatggtctaaaacggacttattcatacctctacgttatctgtgatatcattgctcagaccgggatcatgggtctggagtttggggtggagtgggcttcctgctatagaaatcaggccactgcacttactttacacttctgggggaggagggatctcttccagtccctaagaaaagaaaatctttaaagcgtcttacacgcaggcgtgcaaccaggaagtccacccagccccatctccgcataaattaggagctcttccctcttcccaccttccttgtcccaagtggcaccggacactgatcaccctcttcagagctgcactagacattcacagggaattgaggttccctatgcagaaaggttttcagacagaggacccagcccattttctctctccaaatcctcctccctccctcttttgtggttgcagctataaaataatgattcaacaatcaaagagcctctcatgagatgggagaaggaagggaacgaaaggggaagaggtgccctgggctgaaaacctgtagattttttctaagtgacaaagggcaagggtccttttttgaaattaggagagagacagctgtttcctcaatcgaaacttcgcacattacaaccagccttgggaaaagccaacaccaccagggaggaagtgctatggggttttgaagccagacactgatttctggctgtaatactttccagccgtgtctctaagcctcggcttctgcctccatctgtagagtgggcttaataattttgaccatctcacagagttgatgtgaaaattaaaataacccgaacagaacaggcgatatatacaggaattaatgaaagattcctgacataatgcttataagttcatgatgcttaggaagataaaattcattgtagagatgccgaacgggggtctagagcttgccttttcggggtctctcccgtccttctccatcctccttatctcctgggctgccccctctccccccgcgccccgctctccctggctcgcccgggcctagggcgccgcctgcagttgcgcgcggccgcctctagatggaactttctcaccaacgcaaggcccggccggagcagctacccgggagctgggcggcgaggggctactttctctcattccggcgggtgcaggatcggggggcctgggcagtaactagtggggaggagcgctggactgtgcacgtcgagcccggcaggtttccgcatgcggcatgcgaagggaatcccgaggtttccctgcagaacccgagcacggctcccccggagtttcctgccccgcgtctgcggctccttgaatcatctcaataaaatgaccgtcccggtagccacccatgccccttcctgcgcagtgcccgcagcggaccgcgctgtgtggtacctcgagccctggggactctgttgcacgcgtccctcagaccctcgggggcggggagtggggagacaatcgccagagccgcggggcgggacaaatggcggaaccgccgcgcggcgccaggcaaactttgcaagggaaccgcgcggcttgccggctctactttaagcattcccgaaaagaaagcatgtggcgggacacttgtcatctaccatgtgttattctcggtgacgctttctggagctgtgttcaccggggacccgggctcgcgggtgctgcccgctgtgctcgggcgggcgtcgcgcctccccgcgccggtcccgggctcgccaggcagccggagccgctgggctcctccacaaccatattccttcttctaccgctcccgcttcttcccaccctctcactctgtagttgggtcctcccctttttcttgggggcggggaaggggggatgatttttaaaaatcagaactattgacatttctggtctcctcgtcgcttcaggctgaagagcggagggggatccgcgggccgagggtccccctccctgcccgcgccagggccgctgggtgacaccgaaatccagaggctcccgcccctcgggggttcctcctcccgcttcccgaggtgactggttggcgcgaagcgattggcgatcccgggcgcgatcctggccgcggctccccgcgccgcgccgggtgaatggccgcgggcggaggatcgggaggcgccgggcgcagaccaatcgcggccgccggtgggagtatttgttattcacatggaagagacttggcgcctgctaggccagctcagccccctcagcccagagatcagccacaagtgcggccgctgtgctcgcctcacgcggcggcggcggcggcggcggcggcgctgacatggagctgcgggcccccggcgggcttcctcaccgcgccctctgcggggagcagggtaagactcgccgcccggcagcagaaagcggctccgaggaaagcaagtgccgaaccacgggacaaaaagcccctggcccccaaacttccccaaaacgccctgcttgttggaaaaggagaatccccccgttttattcccctttccgttttcttctctaaaacctttcagcggacagccaggtgcaccattccttctcatatcactctagtgatttgtttttcctgagcacaagtagatggccctgcatgtccgtagtctgtgagagaaatagcgggcggaggtgacgggaatggggggagaaggagagtgggcaccagggggcgaggggctggccgggcattggagcttgattgggtgtctgttgattttacgttgcaaagaacaaggcagccacccctcttgtctgcccatgattacattacagtaaagaggttcagaaaagagggagactttacccggaactcccaaggcttggagatgtgatcccccaaaagtttagtcggcgaatgggagactgaagggtgacgggaagggggcaggcgcgctcggcgctctgactgggcgtgcggcggcaggattttaaagcgctctgcctcggatcgtctgccctgggtgacctcccggacctgccctggtggaatccggacttgccccgccgagatgacgaggtaccttcgtttcgcgaacctaacaggagggatttctgaagttagcggcttccgggatgagtcggggtaacccccgccctctgagcgtgggctggatggatgtctaaccaggatctagggaggatgggggtcgcgggggaagccgggcgcttcggggtcctcgacacccacatccccgcacggcgcacgctctgcctcgagtttgcgttctccgagttagcacggcgagcttgggatttccgtgcccctcttttgtggctttcgagaaacgccggagttccgtgtcctgctgggggttggggggatggagaaaaggtctcggggatcttgtttaaaaagcaaaggcaaacgcaccccaaca

SEQ ID NO: 11367 - DNA, 6000 bp, Homo sapiens
cactgtcacctcctatatatataaaaaacagcaagaagctaccactggttgcctctgagaaggtaactgagtagttgggaggctgggtggaaaggaaacttctttttctctgaatattcttcttcctttttttttttttttttttttttgagatagagtctcactctgtccgccaggctggagtgcagtggtgagatctcggctcactgcaacctccgtctcctgggctcaagcaattctcctgcctcagcctttcagtagcttggattacaggcatgtgtcaccatgcccagctaatttttgtatttttagtagagacggggtttcactatgttggccaggctggtcttgaactcctgacctcaggtaatccacctgcctcggcctcccaaagtgctgggattacaggcgtgagccactgcgcctggccatatatatatgcggccacacacatatatatatggaaaaacaaattttcacttgattgtattatattgggttctgagcatttgtaagtctaaatctaaatcaatggttggatctcagctggaggggaggggagtggggaagggttttgtctctcaggaggcatttgacaatgtcgggagacatttttggttatcatgactgggctggtagtgttgattttggcatctagaggagagggacactgttcaacatcctacaatgcacaggacagcccccagacaaagaattatctgcaatgtcaatagtgccaacgttgagaaatcctggtctaagtgtatttcatgtgatcttctgtaaagccttagtgtattaacatgttctaaattaataaggtgattttcagcctgggaagagcactgtataactaaatgcacttaagatgcctctagtttttattttttattttattttgttttttggttttgagacacagtcccgctctgttgcccaggctggagggcagcagcacaatctcagctcaccgcaacctctgcctcctgggttcaagcgattctcctacctcagcctcccaaatagctgggactatacaggagtgcgccaccatgcccagcaaatttttgtattttttggtagagacagggtttcaccatgttggccaggttggtgaacacctgacctcaagtgatctgcccaccttggcctccaaaagtggtgggattacaggtgtgagccaccgtgcccagtctgcctccagtttttctattttctcttcctcctttaccccatgccccttcctcagaagcttgcctcctcctactccgtggcctccatgactttggagaatttttgtccatggcttgagcaccggtaagactttgcgcttgggtgaggctctttttggtctgagcccctcagggattgggttgcctccagcttgggcccattgtctccctctgctgttgggggaacagggtgggagggcactgtctgggaaggcgtgaggacagtattaggaggggccaaagatgtggccacctagccttgtacactggatgtaaaagggcccggggtgtcttgcaccctcgccatttagcctcccatcagaaatgtttgcagaggtgggcacctcagcagagcccagcggacagtggaggctggcttgttccacgcaggccaggctcacacacagtccatgtgccctgctcagggataggcaccttaaggtgacctctggccctggtcctgaagtcctgcccagggcaacggatgagcagctctgctcatctgtacaaggctaggtggccacatctttggcccctcctaatactgtcctcacaccttcccagacagtgccctcccaccctgttccccccatgactcaggcaatctgactggacccttagctggctctccccagtaacctccaccaggactcccacctgcggccgagtgtttgtgtgggatgtgcatgtgtgcgcatgcacatgagagtggcggtctttcggaaataattaagtcagctgggcacagtggctcatgcctgtaatcccagcacttcgggaggccgaggtggtcagatcacctgaggtcaggagtttgagaacagcctggccaaaatggtgaaaccctgtctctactaaaaatgcaaaaattagctgggcatggtggcacagacctgtaatcccagctacatgggagactgaggcaagagaatcacttgaacccaggagatggaggttgcagtgacctgagattggctcagatcctactgaggagatgctggagacaggagagaactattttgttttgcttcaggtttcattgatttttctccattctttattcatttttaatttcaatgttttctgctctgctttttagtatctgcccctatttattttagatttgattcaccctttcagcttctcaaggtgaaagtttaaattttaaacatttattgtctagtataaatacttaaagctataaatttttctctaagtactgctttagctgactccttcaatttctaatacttttttgttgttattcagctgaaattctttcagtttttccttatgatttctcttttgactcacaggatatttagatgtatattgcttattcataagtgtttgggggattttccagatatctttttgttattgatctatctgtaagttcactgatcctttcttctgctgtccaatctgctgttcagccatctagtaaattcttcatttgacatgttgtagttttcagttctggaatttccatttggctattttatttttcccattcttctgctgagatccattaactcacgatgatcatttttttccttccagttcttgaatatatttatatcgctgtttgaagtttttcctgctggtgccaacttcttgggtcatctcaggttctgtttctattgcttgctttttcttttggctatgactcatattttcctgtgggttttttttttctttcacacgccttttaatttttcattgtatattagacattgtagatagtgaactttagaaactgggttatcttccattgaggggtgttgatttttgttctaataagcaattaacttactagttgatcaccttgaacccgctgaggcttggttttatcttttgctagtatgagtcagctttggctttgaccttactctcagaacaaatatttagtcctgggatatagattttagctctatggtgtggccttttgggagtttcaagtagaaagccctaagtgtttacccagaccctctgacttgggattcaaattcaaactctttctctgctacagtgggtaacagtcaaaatctgcttagctctttcagacctccagtggttgtcttttactgggctcttggaaattcctccatccacagttcagcagtcagcctatgatttgaggggagtttatatgcagatttaaagactttgccttctgtggcttctttcattccaggaaatccaccttcagctgttctggagtcccaaactgtcctctgtctcctgtcctctgtcctctgactcttcaagccaaaaaaggctggggctttctgctcaagttctagctatcctgtgccatttatactcgggagtacactcagggaaaaaaaaaaacaacaatgtagatggttcttttcattgaagagttgagttcctttcagtttctgcctgctttggatactttaggtgttttcaaaaagttgtttttcatattgtgtccagtttacaatttttttgcctaagggggcattcatctaataaactattctgccattactggaccatcctttcacttttaaacttacttatacctaaagtgtgtcacttttaactcatctatatatatagtctcgctctgtcccacaggctggagtgcagtggcgtgatctcggctcactgcaggctccgcctcccgggttcacgccattctcctgcctcagcctcccaagtagctgggactacaggcgcccaccaccacacccagctaattttttgtatttttagtagagacggggtttcaccgttagccaggatggtctcgatctcctgaccttgtgatccacccatctcagcctcccaaagtgctgggattacaggcttgagccaccacgcccggccaactcatctatatatttatgatctgctgaggtggaaaagattcattcataaagcctaaagtgtagtactgagtacaagtgcaggtggaacttaaagcagagttggtgtcactggggtgggctgcacagaagaggtgtttgtgaggtaggctgtgagggctagataagacttcaatgaacagacaggaggaagactgtggcgacttgttgagctaagggtaggggtaggcatgaacatggcgtaaggacagtgaacagacccacctccctggctggaggtctgagtaggaaaggcacactctttgagtagattcaacacaaagaaatggaggcagcctggctcagggatgccctagacctctaggcattgtcaagttgcctaagtcctgttccatcaaggctgtttactgatgtgcttccagggcactccccactcccagccctttcctgcagcccagggctggttcctagcctctcagcagacttaagatgggcaccttccacaaaggggcagatgagttgaggaaaacttaactgatacagttgtgccagaagccaaaataagaggcgtgccctttctatagccccattaaaagaacaaaaaagtggaagcatcttcagtgaatatgggtcagcacctcccagacctcagggagtccacttctgttcatcccagcacccagcattgcatatccagattatttgagcccaatctcttatcctctgaagaacacaatcggctttggggccacaaaaggtttaggtagtggtttagggatttctaatcccaaactttgtccttgggaggtttaggattagtattgatcattcacagagcccaagtgtttttagaggaggggttttgtggggtgggaggatcacctataagaggactcagaggggggtgtggggcatccatgagaaaaatgtcggaggaagagttttatctgttcaaaaatatctcttcagtggggccgtgggatgggcctcagtaccacattgcccctgtctgggccttctacctccaggcagctttcatgggcactgtcttccttatagggttcccactcaatgccatggtgctggtggccacactgcgctacaaaaagttgcggcagcccctcaactacattctggtcaacgtgtccttcggaggcttcctcctctgcatcttctctgtcttccctgtcttcgtcgccagctgtaacggatacttcgtcttcggtcgccatgtttgtgctttggagggcttcctgggcactgtagcaggtactgcaggggaaaaaggggttaggggaaggcaaaggttgctactccactggagggggttcctaaagaggagtctgggggaaatgagtctggtgctttttaaaatactggggtacaaagcaacccagactagaagtttggctaaaataggatgtttgagtcttcactccaaatgtcagtccagccctgtctctctgtgcttgctccacccgatctgtttgccactctgccagccaggctgggtggggctctgtctagcccattatcctcacatttcaccacaggtctggttacaggatggtcactggccttcctggcctttgagcgctacattgtcatctgtaagcccttcggcaacttccgcttcagctccaagcatgcactgacggtggtcctggctacctggaccattggtattggcgtctccatcccacccttctttggctggagccggtgagagtgcagggcagtggtgctgagttaactaggagctcaggttgatgtgggtggaaagagagcttgggtataactatttagtctttgacctctacttttaaagagttgcaatatgaggcgaaagggcagtgggagacaagtgctaacgtttactctgcagttggaattgctgtagcttctcccag

SEQ ID NO: 11368 - DNA, 6000 bp, Homo sapiens
ctttttttgtttctttcagtgtttactctgcctgagaacctgattcacagaagaatgtggagagttcattaatgttttgctttctcatatttaatcaaattgatatctagttagtcaataaataattattgaacacctaccatattccaggcacaatatatagtcaaatgtatttcacctttttagtcacttactagatcaataaatcaaatgaatgaatgaatgcctaaatatcattttttggttttttttttgttgttgtttgtttgtttgtttttttaccgtctttggactgaatctggaatttctggcttgcttaaatcttgcctactgtaatcggtatacttgaaagacactactatttctccacccacccccaccccatagtttctttcattctatgtgatacaaagaaaatctcatttaaatgcaaatggattaaattcatcaaaggattggaaaaagtgaaagaagatactaaaaataaaattaaatataacccagttgcaaacataacgttcaggcattgtgtatgttttaaatgatatatatgtacaagttagccatttaaaaatttggcaaattattttatgactaataaattatccaacatctccatgatttctaagtaaatatgtaagactgaaatcatttctttgcagatgaccaaacctgtctatttcaaaaagtaaaacttaagatctgatgagccaacaaactcctaatgagtcacatcatattctttaaataaaagctatttttaaatcctcaggtcaaataaagtattagatgctttactcccgagtaataagaatatttgaggccaggtgcagtggctcatgtctgtattctcagcactttgggaggctgaggcagaaggactgcttgaggccagtagtttgagaccagcctggacaacacagtgagaccctatctctaaaaaaaagtttttaaaaaaaggtagccagacatggtagagcacacgtgtaatcccagctactggggaggctaggtgggaggatcacctgagcctagggaggttgaggttgcaacgaactatgattgcgccactgcactccagcctaagtgacagaacgagatcctgcctcaaaaagagaaagaaaaaaaaaaagacaaaggagtgttatgagtgtattagttttaacaaatattctttttttccttttctttttgttgagacagggtctcactctattgcccaggctgaagtgcaatggttctatcatagctcaccacaacctcaaactgctgggctcaagcaaccctcctgcctcagcctcccaagcgggtagaactacaggcatgtgccaccacgcccagctactgtttttgtttctgttttacttgtttttttgagacagggtttcactatgttgcccaggctggtattaaactactggtgtcaagcaatcctcctgcctcagcctcccaaagtgctgggattacaggcatgagccaccgcatccagcctcaaatatttctgattcttggaaataaatcatctaatactttacttgacctgaggatttaaaaatagctttcattttaagaatgttgtgtgactcattagaaaggagtttgtcagctcatcagatcttaagttttaccttttgaagtagacaggtttcgtcatgtgtaaagaaatgatttcagtcttacatatttacttagaagccatggaaacgttggttaatttattagtcatcaaataatttgccaaatttttaaatggctaacttgtacatatatatcacttaaagcaagcttgtccaaattgcaggtggcccaggacagctttgaatgtggcccaacacaaatttgtaaattttcttaaaatattatgtgattttttttttaagttcgttagccatcgttagtgttagtggattttatgtgtggctcaagacaattcttcttctttcaacatggtccagggaagccaaaagattggacacccctgaaagtatacacaatgcctgaatgttacatttgcaactgggttatatttaatttttttttttagtctctcctttcacttttgccaaccctttggtaaatttaatccattgagttaagtaagatgttctttgtatcatgtagaatgaaagaaactatgggggagaaaaagaaaacaaaagtgtctttcaagtattcagattatagtagacattccagattcagtcaaaggatggttaaaaaaactatgcattcattcatttattcatttgtatttattgattaatttgtccacacagtaagtatttactgtcaggattacaaaagtgagagcaccttttccttgttcacaaggagtgtgttaacaacccagtcctgtaaaagaaatcagggtttcaacccatgtggcaactgtccttaaagaatctgagtgtcttcaccaagctctcctttcttcttgactctccatctagctttcaaagaaattcatacttgtgcatagtggattttttttctttgtataatcatttggggagttacaaaaggaaataatgaaggactaaataaagaaattaagttttttataagatgtagactgggtacacggttcatgcctacaatcccagcactttgggaggctgaggtgggaggagcacttgaacccaaaagtttgaaaccagcctgggtgacataataatacattgtctgtacaaaaaatatttatttaaaaaaattagctaggtatggtggcatgcacctgtaatcccagctacttgggaggctgagggggaggatcacttgaatctgatatgtcaaaactacagtgagccgtaatcacaccaccgcattccagggcaggtttcacagggaaaccgtctcaaaaaaataaataaataaataaagatgtttataaggtgtaaattcaaatgcatttcacaaccaaatatttcatatgctttgcgtgttttccaattaaatgtagaaggttggcctaggagagtatttttttaatagaatcctgaaaaaaaaaatataacccttggccatgtgttatgaagttacaatattcactagaatttatttgtgtcttgctgataataatcaacaatttattgataatgcttataagtatacaatcatttgttaccactggaaaaggatccagtgggaacgttctttagggctccaattagattagttttttaactttttcttttctaacttttaagttcaggggtacaaatgcaggtttgttacataggtaaacaaacttgtgtcttgagggttttttgtacaaattatctcatcacccagatattaagcctagtacccattagttattttttgtgatcctcttcctcctcccaccctttaccctgtgataggccccagtactgtgttgttcccctctatgtgtccatgtgttctcatcatttagctcctgcttatatgtgagaacattcggtatttggttttctgttcctgcattagtttgctaaggataatggtctccagctccatccatgtccatcaaaggataagatctcattctttttttatggctgcatagtattccatggtgtatatgtaccacattttctttatccagtctatcgttggtggacatttagggtggttccatgtctttgctccaatgacagctggaccagggtcttatcaaaagcagcatatttccttaatctggagaagttctccttaatccagagaagctttttcttcagagataagcaggttcaacggctcagccgcaggttatttttgcctagcaaaggcactaacaaaaacatgtgcactggcaaaatactggatttctacatggtatattgaggaaaatgttatctaggacttaaggacaaaaacccaaatattatttggcacatcaccaattcacaaataccaattacctgacaatttattgctataataatctgcaaaataatgaagtcactaaattagctctttgcaaaaaaagttttaattagccacctgtaaagtgtttagcaattcttatgttgctgaagcacaattaattttttatgaatggtcatttctggtgtttttgaaagatacttcatttaaattttttctccatagtttctttcattctacatgtaaaaagaacatcttacttaaacacaaatggattaaatttaccaaagggttggcaaaagtgaaaggagagactagaaaagaaatgatatataatgcagtggcaaacataacattcaggcattgtgaatgttttaaatgatacgtatgtacaaactcgcccagaaaaatctaatttctacaaattgtgtgagttgttattcaaaaccagtttttggtaaatcagtaactgtgcatcaatcagtagattaactgccaaatcaccaattatcggttcctatttatgacccattgtaaaataaagattgcaattagaacccatttgtagcacatccattagttccttctcaggaacccaaacaatcacaatgtcattaaaattgttttttgtctttctacttcttctgttattatataaactgctccagagtgcaaaggttgatttcagatgttgaaagcaaaatagttgatatttctactgagaaactgggattacatcatctttttttctaggactactctaattcccatatttggagttcttccattactgattatttctacacttcaggaattctcttagtaatttttatatgtgcagcttcaagacaatccttattagatggtcattttacttccacttttggtacgacattctttcttcccatgatgtgtcaatggctctatgtatcctatcattggtgacacaatcccttctataacactggatacttacaatcagtaattaacttaatgtgtagctcaatcactaatgttaaaagtttatcttttaaaaatgactaaattcataaaataatgtctaggtgttttttgacaatctggtcctaagtgatctttttctttttcacagggaaatgggggaaaatcagacaatggtcacagagttcctcctactgggatttctcctgggcccaaggattcagatgctcctctttgggctcttctccctgttctatatcttcaccctgctggggaacggggccatcctggggctcatctcactggactccagactccacacccccatgtacttcttcctctcacacctggctgtcgtcgacatcgcctacacccgcaacacggtgccccagatgctggcgaacctcctgcatccagccaagcccatctcctttgctggttgcatgacgcagacctttctctgtttgagttttggacacagcgaatgtctcctgctggtgctgatgtcctacgatcgttacgtggccatctgccaccctctccgatactccgtcatcatgacctggagagtctgcatcaccctggccgtcacttcctggacgtgtggctccctcctggctctggcccatgtggttctcatcctaagactgcccttctctgggcctcatgaaatcaaccacttcttctgtgaaatcctgtctgtcctcaggctggcctgtgctgacacctggctcaaccaggtggtcatctttgcagcctgcgtgttcttcctggtggggccacccagcctggtgcttgtctcctactcgcacatcctggcggccatcctgaggatccagtctggggagggccgcagaaaggccttctccacctgctcctcccacctctgcgtggtgggactcttctttggcagtgccatcatcatgtacatggcccccaagtcccgccatcctgaggagcagcaaaaggtcttttttctattttacagttttttcaacccaacacttaaccccctgatttacagcctgaggaacggagaggtcaagggtgccctgaggagagcactgggcaaggaaagtcattcctaactggtgtgacatttgactctccctcctcagtcatctcctggaatcttggtaccaaataccacctaagttcactactctctttata

SEQ ID NO: 11369 - DNA, 6000 bp, Homo sapiens
gcataacccagaaagtgaggacgccctggcgaggggaagggtctggagggcagccccactgacctgctccctgcctgtggagccgaagcgtgggctctgggctgggcttgagggcgagtgctcagggtggggccctgctgtcctggcagccgctggctgaaccctccagactggagtgagtggaaccaggagtaactcatacatctgcccacttgctcatcaacaaacagggaacacctgctgtacaaacccacaatgctgggcattcactggaggggcagacatcaaataatctctctaaatattgtatcctatcgcatcatattatattaagctaagaatagttctccaagaaagtggcaacacctccttgtaaagggaagtttaaagaactctgagcctggttggtctgagaaattggaggatggcaacagtcagggccccaggagaggagaaagagacacctcctggaagaactggtcagaagcagaagggagaggctggtggcctgtctctgtgagccccacctgcctggggtgggagggggcccgggcagggctatggcatgcgctggtgtgtgcctgcctggggtgggagggggacccgggcaggctgcggcacgcactggtgtgtgcccgtctcttggacaaaccatctgagatgttcttccagctgctctgcctccatcgctgagcctcctgctgagctgagtagggtccccggctggcctggcactaaactctgcttagatatgtccaagggtctctgcttttgccccagcgaggaaaggcaggatgcttctccagactgggagggctttcctaaggcagacacctgagccaagacaggtggaagctgggaggcatgtgcctggggtggagggtgcctggggcggagcgtgcctggggcttccagagatcagcaaggctgaggcatgagaggcagagtggaggctgcgagacgggtccaggaggagactcaggcccagatcaggtgtggcctcgcatgtagggtgaccatgtgcttcacataatatgtccaaaccaggacatttccaagaatagggggacacgagtaacggttacgctggggcaatgggcaaagccaggccaggcccagcatggcaggtggttgcctgttcaaaggtgtaaaccaaaatgtatttgaggcaggtctcaatcaacttagaggttgatttttgccaaggttaaggacatggcccagggcacagcctcaggaggtcccaagaacacacacccaaggtgacagggtatagcttggttttatacattttagggagactgaagttacaagaaaagacataaagcaatatctggaaggtatacattgatttggcccagaaaggtgggacatcttgaagcggggtgtggggccttccaggtcacaggtggattacaggatttcctgattggccgttgggtaaaacagagttaagatctgcctgaagacttgatatcagcttgagtgaaaataaagggggttgtggaagccaaggttcttgtggatgaagcctccggctagcaggcttcagagagagtgaatgtgaatgtctactatcagggccttgaaaggtgtcagactctccagaaagacctagtgacggacagggattctccacagagtgcaagattccccaacagacagctttgctgggccatttcaaaatctgtcaaagaaatatatttcttcagggcctgctggccgtcatgtgatgctctactagagtctggtgggaatttgctatcttattgctatgaacagtctgtttggtcagccttaggagctctgtttttatgttaatgttggtcatgaactccaggaaaggagggtgtagtgaggcctgcccaaccccctctccctgtcatggcctgaactcgtttttcaggtttctttgggatccctttggccaagaggggagtccattaagttggttggggggcttagaattttatcttttgtttacaaaggcatattgagaactttggtcatttttctaagagcatcaggtaaccgcagggtttggggtgttcagcaaagcccgtgattacacacacactggaccttcagagaagtgtgccatctagctacgaccacagccatttctcctggtctaccccgtccatcgggacgcactgctgcaggggaagactcacccatcatgcaacccctcactgcaccctggacagtcacttctaaaatgcaggccctcaacaaggtattgacgtgtgcattaatcaccttgattattacagagcccctctgcggtggaagggcaggtgctgtcattcctacaaatgcatagagctcaaagttcatcgctcacccaggtggaaccgggagaaaaagatgcgtttgtcgaaggcacccagcgccacgagctttcttcacaagccaagcagcccgcctaaggcccaggtctccctctcctcgtctcccactagatacacatggatgaagccagatagataacaggtagaggatagatgacaggcagatgacagataggcagatgatagatgatcgatagatgacaggcagatgatggatgacaggcagatcacagatatgatagatcacagatagatgacaaataggcagatgatagatgacaggcagatgacagataggcagatgatagatgactgatagatgacaggcagatcacagatatgatagatcacagatagatgacaaataggcagatgatagatgacaggcagatgacagataggcagatgatagatgactgatagatgacaggcagatcacagatatgatagatcacagatagatgacaaataggcagatgatagatgactgatagatgacaggcagatcacagatatgatagatcacagatagatgataaataggcagatgatagatgacaggcagatgacagataggcagatgatagactgatagatgacaggcagatgacagataggcagatgatagattgatagatgacaggcagatgacagataggcagatgataggtgattgatagatgccagccagatgacagataggcagatgataggtgattgatagatgacagccaggtagatcacagatatgccggatcacagatgatggataggcagatgatagatgacagataatagatgatagattacagatagacgatcgataggaagataatagatgataggtacatgacagatcatagataaatgacagagaggtagatgatagatgataaataggtagatggtaggtaatagataggtaatagatcgcagagagatgataggtagatgatagctgattgatacatgatacagagatgataggtacatgatagatggatagatcataaatgacagcagatgatagatgataaataggtagatgacaggttatagataggtaaattacagatgaaagataggcaaatgatagatgataggtacataatagatggatagatcatagataatagatgacaggtaggtgatagaggaaaggtggatgatagatgataggcgcatgatgatagatacctgacagatggatagatgaaaggtagatgatggacaggtagatgatagatgacagataatagatgacagattacagatagatgatcgataggaagatgatagatgataggtacatgacagatcgatagatgatacgtagatgatggataggtagatgatagataatgtggatgataaacatcagatgatagaaaaatcgatatctgtgaatacggggggtgggggatcagagagaagcaaatgataagcccaatgaggtaaatgttaatgaccgaatccacaaaaaggataaaaaggagttatttgtaatattcttattcttctaatttttgtgtaagtttgaaattatttccaaataaaaaattaaaacaacacgaacttaacttgtatctctcattccagtgctttccacttgctggggaacgccgagctctcctgggttggtcacgcgggcgccttgggaggccgcgcagtcccgcgtggggcgcggcggggcggccccagtggcaccgcgtgagtccccgcccagcgttccccacccgccgccgcgtttgcggggagagaatgacccccgttttgcaaacgcaggacacaaaacccgccacccagctgaggctgggacccacctatacccccgtctgcgtttttctccagctttctgttcgacctgatgtcctctttgaggctgcggggatccccaccaaaaagcactctgattttctccattttcagatgccccaacctagccccactggctacaaagacggcgcgcccaccccggacgggtctctggccgctttcttgggcttccgcagttgtttagaaaggcaggtacaggcggccgcaaaggcatccgccccttccgagcgcacacctggcccggtcctcctctcccggccccgcgccggccgctctcccccagttctctctactcggagccgggcgcgcactgagcaccccgcttcccagcccctccgcccacagatcggggaggcgcggccgggaggggggcgtgggccagggaagaggggaggagaacggagagagaggctgggggggtcgaggagaccagagggagcgcgcgcggcggggacagagagcccaggggcgaggagagggcgcggggcgcagcggaaggggaagtggggggcggtgaggaggggcgcggagcgggggttctcgggggaggagggagacgaggattggggcagcgcggggcggggacaggggcggggggcggagcggcggggcgcgtgggggacgggcgtgcattgagcgcgctccagctgccgggacggagggggcggcccccgcgctcgggcgctcggctacagctgcggggcccgaggtctccgcgcactcgctcccggcccatgctggaggcggcggaaccgcggggacctaggacggaggcggcgggcgctgggcggcccccggcacgctgagctcgggatgcggacgctgctgcctcccgcgctgctgacctgctggctgctcgcccccgtgagtgcgcccgcgacccccgccccacggcgcctcggacccggttctccccttccgagaagagcgctcctcccgccggtcttcgccttcctcccgggtgctggagcgcgggcggggtccgggagagggagcggggtcgcccggggtccggagcttcctcccggagagcgtgaagcgctgagctccggtcccgccgggttgcgggactcgggttgggaggctgcctgcgcccttccccgcgccccaccgtccggggtttgctggaaacgggatcgtttcttcctggacgcgtcaacgatgagctcgttcggggccgtcccgggagctgggagctgcgggcgcctgcgcgggctgcgcgtttcacggggagatcggggttggcgttggccgcagatgcctctcggtccctccctgtacttactggttagttttagtgtcggggggacgtggcgtcggttaaataaagtttccttttggaaatagttgctttttcccaagggcactggaggaactaactgctcataagtttgttgattaagtgccttcgcacatggagttctgaattattccctctgtgaaccttaaaaaaaaaggaaagaaaaaagaaagaaaaaaacccgagccttgtttcttgctttcctcttggagactgaagcgggtttgcggtgcgcgcggttttcgtgcgcgtcgcagccgaggcaggtctggatcgatccgcggcccctccgcagctgggaggctgcgctgctgacccgacagtgtcattgattaaccggcgacgcccggtctgcagcggggctcgagccacactccctggccttgcgcggaggcgcagctcggctttcctccctcgagggtgggcgctttgcggagcgggtccttggaaagtaacgggttttatcacggttaatgctgctttcattgctaaaatgtcctaaaagaagtcatt

SEQ ID NO: 11370 - DNA, 6000 bp, Homo sapiens
ttccaagccaacagggacagctgcccagacgggctgcccaagccaaccaaggatcctgtcccatcggtccctgtggcttgggagtctggcactttttggctttcgtttctcaagctgccccagcttctccaagtcctgagcctggggctcccagctccgagcggatgctctgcaagtggcgtccctgcaccctggtgcaggcggacggacgcgggagagcctgcaaggaagtaaggcccagcagccttcccgggcttggaacgccgcagcctaggaagcatcttcccaggaaatcgcagtcggagcccagcacggggtcttggaagaaaagaccccaccttctatcctcacgagtacgcattaggagtgagcaccgctcagtagatgacacagaggcacagctgaggacccagagacgggcacaccggaaacagcgacatccacaggcgctcggcagggaccaggaacccagaaggcttgacgcgcagggggtctcggagaaactctacccctgtccttcccagcctcctgcttagctgggcctcaccctagcctgctggagatggcggccatgccgtcagagagggggatggacagattggctgaggtcaccccacaggccagcagaggcctgggtgggagtgcgcagccccgcagatggctgcttatggggcccagaggccacccctgcgtcgcagagggcaccagcacacccggacttctcggaggcttcatacagctcccaggccctacaagcagcgtgtgggcagaggcccaggccccttcctgtcactcagagaagctgctgctcccagaaaacggggcgccagcctcccatgaacactgtgtcccaaccccggtcctctcaggattcctgtgtggaaatgtcacttctgtctcagctctctagggtgcacctggtgtccagctctgccccctttctgcttaagcagctgctgggagaccctgagccaggccgccgaggttctgagctcgtaaggggtgcagcagtttcccgcacagcgtggggagcacatttgctcacgtctcccaggctggctgtacactctgaggccagccctgggctctgacactctcccgattccgctgggctttctaagccctcctctcctgtccactgctggcccatggcccaggcccagccttgaagctgtaaagacctctcaccccatccaaatgagactggtcagatatctcccgcatgtcagccgccactggattgggaaggacgggcagtaggtgcaaggctggccctttttatgagagttatttaaaaaacaaaaacaggtcaggcacagtggctcacacctgtaatcccagcactttgggagactgaggcaggagggtcacttgaacccaggagtttgagactagcctgggcaacatagtgagaccctgtctcaaaaaacgttaaatgaaaacattagccagctgtagtggcacatgcctgtagtcccagcttcttgggaggctgagatgggaggatcgcttgagcccaggaggcagagggtgcagttagctatgatggtaccactgccctccagcctgggtgactgagagagatcctggctccaaacagaaaaataaaaacagaaggaggaacagatgaatcccatttgtgacattaatgaattctcttatagggaaaataaaacgattgaaactgggccatcttggacagctgaggcccaggcagggccagctccttccaccttcccagccaagatgctgcctgcagcccctcccctcctggcccgagatgctgtcattgtccctaagagaccctgaggcctgctccaggctgagtgggtgaggagcctctgagcaggcgcctgcgtcgaggcgtgccctcctgagaggcaaggctgacctgcagcgtccagctcggctggggacactcgcctgagaagagcccagtcctgggtgcctccctaggggagggccttggggctgcttgtgctggcaccgacgtgggcctggggagggacctgtgtgtgggtggcaggtcttgaggagtcgtgggggagggtttcggggggagatgctggtggtaacagtgggaggtaggcagtgaaaccagcagtgtgactttggaggtgctggaggagcagggcctggcggaagaagtgggggagccaggaaggagcagctgccagggacggcctggcctgggagggtggccaggaactgggggagaagctggtggtcaagctggtggtctctcagtgcaagggtggggctggcctggaggagaggcccacagggtccctgctggctgagggtgcagtggcgggccccggaagctgaatatcacccccgccaccgggcaggcagtgctcagagtgaaacgggtgactggagggcatgtgccagctctgttcctcaagcctggcccaagagggacctgcagcatggggttggggggcaggcggcccttctctgtggtctctcctgccttctgagggagcctccagaatctttcatcgccgccacaacaaactcaggctttcgtgtaggaaaagagcccacttctgaagaggctcatctgggctttctctcccagcctctaagtctcccatcacctggctccccgttcctctttcccttgaaggaagtcagcagagtgcatggctgacgggaaagaaggcacagcgggcctgcccagtggggggagaagccaggccattgttctccagttccaggatgccctgcttccccagacagcccggcagccaggaaaaggaagtctctgggcacagaggcaagcgggagaccacggacaggcaaggagtcgaaggctccacccgcctgggccaggccaggctcccacagaacccctctgcgtccaggcaggcacatggggcccaggccatccccctcactcggacgcaggtgtggcgacggcgggggaggggcgtccacagtagagcccagaaccttgcgcaggacaggaccccggctaatgtgcccggaacagctcagtgacagggagctgggttggctgtgagggtcgggcacgcgtcacgagtctcctgtgaccaggagaggtgggaacactggctcacatgactcgccaggccctggcacgctgtggttctgtgggtgccccctgcagctcccagccttcaaaatgtacacctcgctgggcatggtggctcacgtctgtaatcccagcactttgggaggccgaggtgggcggatcacctgaggtcgggagttcgagatcagcctggccaacatggagaaaccttgtctctactgaaaatacaaaattagctgggtgtggtggcagtcgcctgtaatcccagctattcgggaggctgaggcaggagaatcgcttgaacccgggaggcggaggttgcagtgagctgagatcgtgccactgcactccagcctgggcaacagagcgagactccatctcaaaaaaacaaaaacaaaaccaaaaaaccatacacttcatgctcacttctctgggagccatggctaacagcctgcaggcaggagactctcaaaccagctcctggagggcactcccagggaccctgttcctaccacgagccagagaggaggcgggtcaaggagacttgtccacccaggcgtggccgaggaaggggtttcctcacgctctgctgacctgccttccttccatgcctctcagcccagctcctgacaaaggcgggaacctgagctcctcggctttaggaacgtcccccagagcccacggagcagcccgccccagctgccttccctcccaagatctccaggtaatgcctggtaaaaggagggctccagggagaatgttggggccaacacgcaaagcgcgtcaccttccaaccggcggagagtgaaggaaaacaggtacggctcggcttgtaaccttcactggaaacagaaaccatcctcatcattgatacctggtgaactgcacagagagcaacctgcagctttggaagtttataaatccttcagtatttgtcagctgccagtaaacaaaaatgcacacaggagaactttccacctgaaccccacctggaggccggcgttcccaggtcccggctggggtgacagcacgcactcgagagccggttcagggcgagtgggacgcacgtgagcgcagggaggaaatgccagcagatcccactccacgtgaccgcctcccaagaatcgagccattcttagccctgcagacgctggctgcctccctctgacttggcctcacggcggggcaggcattagcagtccaggcagcttctctctgactccctgcaaggaggggtgcggcgggcaagaggctggccccacgcggttccacctgcaggagagccctcgcaggaggctccgtgtgtggggccggctcagcttttctctggccatgcccatgtcccttctgtgcacggagacaccagatgcacgtgctcccctctctgcttccgacctgaacctgccctcggcctccgctgtgcctctgaggactcctgtgtcctgtgggctgagtgagcatggccaggccttcgctcgacagtagacccttctgttgatttcctcacggaaaaaagggttcgtaaccaacatctcaagcacactgaacaccaggggcggctgcatggacctggacacgtgtctgcctgacctgcccccaggctctcggtgggatgccccgcagcgatgcagacaggggcctgcgggcagaggccacggcctccatgagccaggctatcagaaaggtgggacaagaggccagctgtgctcagtttgcagtgcggtcccgtccaagcacggcccctcgtttctggaacccggctgtaaacagcaggagggaggggcggtggcgcctgccaagggaggcagaggccctgcggggaacttaccagaggaaaacaagtgcttgcatcctggggccctcacacgcacgcgcaggcggccaggcgcgctgctgataagagcctgcgggtttgcagagaagcgcagcagcgcgcaggtcctcaccagagctctggtggccacctctgtcccgccatgctgctcaccgacagtggccagggcccacagcaccaagaggcttgggccacaaagtaaaggtgagagcctgtggtgcccgcaggtgggagaggggacgtggggggctctgtgcagtacaggcaggagaggggacgtgggggactctgtgcagcacaggtgggagagaggacgcagggggttctgtacagtgccaccggtggacatctctaagtagggaatgaaggggtgccgagacagagcacactgaggggtcccggcccttggcaagctctgtggggtgaaggtggccggccgggtgtgccctcctgtcagtgactggaggcagcacacaaggcacacagtgagacagccctcccgctccgatcttctaatcacagaccctggacagatccgggggccctgggcgccccgtgaggccaggccaggctgctgactgacacccagtcacagtggcctgtgtttcctggggactcaagtggagtctggggggtgacgtccccaaactgggctgccactctgtgacagccaaagccacgcagcctcgcaggcagaagctggggtgtggaggaccacgatcctgaagaaccccgtcctctggaccctggcgcagcaggaggggagaagcccgcagaggcccggacgcccccctcaccggcccccgccactgtgcttggagcaggtgcatcctgtctggagcttgtgctggcccggcgagtggagcccagagcccatcccccactaccaacatcccccagattgctgcctgcctggccgaggaggtgctggtcaagatgtgttagtgaggagctagacaagatgagcacgtgagaagcaggggccagggagcctggacccaggacctgggggtgctgtggcagcgctgtggcggcactgtggctgggcacacccagcagcggcctagctctgcatgcctgtcaccacctgaccctcactgcggct

SEQ ID NO: 11371 - DNA, 6000 bp, Homo sapiens
attgttcttcattccatggtactcggagtcctgggaaccactcatcactgtcgggtgcaggtggacgtcccctcacggtaaggtcagagtgctcccgcccagcgcgtggctccgcggcgccctgtgtgcctggggggtgagagagggtggcgggggcgaggtgcttgtgaggcacatcacaatggggcccgagggcgctgcgtgcacaggactctacagcacagtcttcatgggccgttggtctgagttactcagagcaggggatgatccatccccacttaaagacaaagtgaatggggttaaacaggtgctgtgagtggctgggacgggctcacaggaggaggggccagcatgggccacgcaccacactctcacccaagacccaaagccggccaggccaccgatgggcagagatgactgcagcttccagaatagtgggcttcatggggtgggcatcccaaagcatatcacagcccctggggggcagggcaggtgctgcatgatcctggtcctgtgtccagctcctgccactgccccatctcgtaaccctctggacacagagaacgcagagaacaggcagtgttccatgttcccaccaaggggaagatccagcgcccgcagagaactaaggaagcaccggggagtgtggtgctactgaagagaggatgcgtcatttgcatttatccaaagaaagggttcacgatgtcttacgttcaaacagataaaatcagactgaggtggggtgggaggagcctccccgaggctccttgaggaactgcctggcagtgaccgaggtggggctgggacaatgcccaggtgctggcctctcctcggatattccgccatgtgctcctgggggcggagggtcccccaagggcagagctcagccagcaccaccctgcccactcttctgtaaagtgcccctggcacgacgctcccagagaacccaaggatgcgcccagaatgctcccagcaaccactgagggggccctgctgggagacccgcaaaactgccaatgccttgtaggccagcagccgcacgcgccttcagtgctggagtcacgcccaggggctgacgggccagatggtctctgagtgcagcaaattccgtcttgtgagggaaagtgatagaagatgagagtgtgggccgggcgcggtggctcaagcctgtaatcccagcactttgggagggtgaggcgggtggatcacgaggtcaggagatcgagaccatcctggctaacacagtaaaaccccatctctactaaaaaaaaatacaaaaaattagccgggcctggtggcagacgcctgtagtcccagctactcgggaggctgaggcaggagaacggtgtgaacccgggaggtggagcttgcagtgagtggagttcgcaccactgcactccagcctgggcgacagagcaagactccatctcaaaaaaaaaacaaaaaaaacaaaaaaaaacacgagagtgtggaggcgcagacgacgggagcacctgagcttccgtgctcagcatgctgtggtcaactgtggtctgcacacacccaccgttaactgggccctccagctgcagacaccaaacagggacaggacggcggcaccgacgcgcccacgtccaccagtgccaggcgacacagcagaaaaccaggatgccctgcccctcaccgcactgtttccgggctcggcaggcacacaccctgaatgaaaggctccaacctggcgcggagccacggcctgcgtgcttctgaaggaacaagagagacgaagtcactgtgggccgcaccacgtcctgacagcagctaacctccccaggccggaatggaacagatggaagacatggcaagtctgtctgaggggaggtcacaggatgtccctaaagtcaggatatggcacggaatgcagaaattggagcagagttccaaccccgcctgccactggtgcggcaaaacccgcacaccccacacacagcttccttgggacctgggctctttctataaaggggctgctggtgcatgtctccttaatgctccaggcctgtgaggatcggatgcccgagggtgctcctgcatgtcacgcggaggcgggggacgccagcgatgccctcccgggggcgtgggaaggggctctcggcctcccttgactctccatcatcagagaatgtgtccgcctggcatgtgagacacggcgcacttctccgaacctcgggctgtcttccagcatgtgttagctctagaattccttctgcacacagcttgatgtctcccctgtaaggtggatccggcgcgtggtactgtgagcacctccaaccaactgctccctcccttgtgcctatgggggagaagcgaatgagccaggactgggctaatctcaggcagtgccgccccacccttgcccctggtggaccgctccccttgaaaaggagcagcagttggtgggaagggaagcctcactccgcccagcagagacaaggggtgtgtgggatctcacagaaccgtgtagacccacgcacccccactgtacagatgggcactgaggctcaggaaggttagagacgttgcccggtatcacacagcacgtggggtgaggaagtggaacccgggctggagccggcaacgctgaaaaccagggttgtttggacggcgacatgcaactccctgagggctctgctcctgcagaatcagggggacccatgctgctgcctaccatggagggcatgggagaggactggggatgggacagggagcaggaaggggttgctcagtcagtcagtgctggcagagggaggggcgctgggaaggcactgcaggccctgtgtctggggcctctcagcacaaggactgggctttgcacgcgaggactgaagggtcaaaggcgagggccaaggtttcctacgtggcattcactcgggagggctcctgaagctggagacacactgccttactttgtgcgtgtttttctctatgcattatccagtatttggctatgtgtgcatttagctcaataagcaatgatcagatgaaattccccttgaagttctttccttttattctatcctggggatgaacagaaaaatattttcacttcttaaaaattcataacgacatcagatccaacaaggaaatcagtgcctgaaaagatgactattgacccaggacgcctctggtgtacaggccgagaccatgtgctcagagtcagccggcccctcccagatctgctcctggccagctgtgaggccgcggtgacaccacctccctgcagtcagtttctgcaaccatgagacggggagaaggacagccctgcctcacaggctctgaaggagggtgacctaagatcaagcacgcagagcaccgcacagcgcccagcatgcatgtgtacaatgtcacattctacactgaaggaggctgagacaggaggatctcttgagcccaggagttcaagaccagccttggcaatacagtgagaccttatctctacaaaaaaattaaaaaaaaaaaaaaaattagcggctcgcatctgtagtcccagctactcaggggccggggtgggaggatggcttgagcctgggaggtggaggctgcagtgagctgagatcaggccactgcacactggcctgggcaacagagcaaaatcctgtctcaaaaaaaaaaaaagatttaaaaatcggcaaaaggtctctatgccttacaaatagtccacgagattcctgccatgccgtcacacatcaagtattaagtaggtcttggagacggaagttcctgcagtccgggccctgtctcttacatcagtagctgtacagtacaagttacttacccgcccagtgcccacaggagaaggctgcgctccaagacccagatgccccgatccgctgactctatgctgcaagcaggaaatctaggagtatcggccactcgcccgcccagggcaggctccccaggaaacccagggcacgtgagtggagagcttgggagctgagctcttcctcagccgctgggatgggcagagagaccagaagccatgggtttgcactagcagggtgcagctatttttaagtgacatgtctcagctatttcaaggtttgaatttttattttacttatttttttctgtactttctcatgactcacatctttcaaaattgtgtctcaggcatttttaatgctgaaatcatctcaacttcacagctggtcaaaaaatgtctaagagcaaatcagctctttatcatccaaatacaaaaaggtacatattagagttgtcaactttctactgctggaagaaaactccacgttagtatttttccattaaaaaattaacacagcattctgtttaggaaatgtgtgtatatttcctaaaatacacatctgaaagactttaaattgctattgcacagatgccttgagccccagcaggtcccgaggggccgagtgcccctggaggcccagcaccccactcttgcacctgcaccagctctcctggcggggagcaggtcccgaggggccgagtgcacctggaggcccagcaccccagtcctctgcctgcaccagctctcctgggggggagggggaaggggggagcccacgcaggtctctgaaccacgcctcaggctgcagcagccgcattactcatactcagcggacaaaggatcactcagcattcaatctcaccacttcaaaacattacagagggaaaacgacacctagaagtaggagtgagattcgctgaagttcccttctgaggaagacccacccctccgcctggagagccggggctggcggtgcctgaggaccccttcggcctggacagcccacgcgggcttggggggcctcgctctgccctcatggggcggccatcggttcccgaagcggcgagtgaaaattcaaatggccagtagggggcgcactcggaagtggccgccccgcatgaggcagttcagcggccccgagagtccggggagggaggtttattctccgcctgcacgagactgtgaaatccgcaaccatgagcaggagaggcggccctggtggggaagaggccaccaacatctggacggcaggtaagttccgacgcttctgcagcgagcgcgggaggagggacctgaggcaccgctaacactcagagaaaactaccggctgagggtccctggtctgaatgcttgggaccggaagagtttcggagttcagatttttgcagattttggaatatctgcaggtacagaatgagaaagctaaatacgaaattcatttgtgtttcatacacaccttatacacactgcctgaaggcaactttataaaaacacttttaacaatttcatgcataaaacaaactttgaactgcctggactgcagcccgccacacgaggtcaggtgtggaattttccacttgtgtcacgacgctccaacagtgtcggactgtggggcactctggatttcagatttccagatgcttaaccagtactcagattcctaagttacttgtcagaaatgcctatttcttgggattacacttctctctgcaaatgtctgtgaaattcctgttaaattctttatggatcatgcacatgctactaagttaattatgaaatttagtgtttaacgcaggtcagttgcaaaaacaagaatattgcttgcttcaacccaggaggacaggttattgcctaaaagatacacaacacctagtatgatgccttcaaacttaaagaaaggtttgtatctgtgggtgaagaaaagcagttaaaccagaaacttccacaaaaacaagtctagtagaactgagctgattgccaaagtgtgggagaaaaagggccagcaaaaaaatggttaacactagccttctgaggaggccgcccagagcctggccagagaggagccagagaggagcggggcggagggggcctataaagccctgtgccaaggggcagactcactggctcagagggaggacgcacccgccagccagccgggaaccttccctcgcgggctcccagggcgggtctcttcctctctctag

SEQ ID NO: 11372 - DNA, 6000 bp, Homo sapiens
gacgttaaagataaagcctctaaggccgaggcgggcagatcacgaggtcaggagatcgagaccatcctggctaacactgtgaaacctgtctccactaaaaatacaaaaaattggccaggcttggtggcgggcacctgtagtcccagctactcgggaggctgaggcaggagaatggcgtgaacccgggaggcggagcttacagtgagtcgagatcgcgccactgcactccagcctgggcaacagagcaagactccgtctcaaaaaaaaaaaaaaaaaaaaaaagcctgtagcagcagaccatccacatcaatttgtgaggaaaagaattaatttggtcattccctaattgaagaggactgatgattaatggcagaaacaatagccaacaccatagacatctcaatcagttcactctacacaattccagcagaaaaattaaagttgggcaaacttcccaactgatggttgccaaaagcattgcacccagatcaactggagacacgagcagagatttcagcagaaattttaaacaagtaggtcaagatcctgaaacatttcttcaaagatttgtaagagaagatgaaggatggctttgccagtacaatgttgaagacaaagcatgatcaaagcaatgactacaaagaggtagaagtggtcctgtcaaagcaaaagcagaccggtcaagagcaaaattcatgatgaaaacagttttggggatgcttgaggtattttgcaggttgactttctggggagccaaagaacgataacatctgcttattgtgaaaatgttttgagatagccaaagctttagcagaaaaatgcccaggaaaccttcactagagaatccttctccaccaccacaatactcctgttcattcttctcatcaaacaaggccagttttgcgagagttttgataggaaatcattacacatccacctcacagccatgatttggcttttcatgatgtctttttgttttctaatcttaaaaaatcttttaagggcactcatttttctttaggtagtaatgtaaaaaagactgcattgacatggctaaattcccaggactctcagtgttttagggatggattacatggttggtatcattgcttacaaaagtgtcttgaaagcttatgttgagaaataaagtttatattttttattttttaattccatatttccatgaactttgtgaaatcctcttgtacaaatagatttagttcataccttttaaccgctcagtagtattccattgtatgaatagatcacattttgtttagctattcctttctcattggacaattgtgttgttttctggtttttactacatgttataaacaacactgaactcagaacgcaaatacccagaactggaatttctggcttatagggtatgttcattcttaaattcattagataatatcaaattgtttttcaaagtggttatacaaaattcactctcatctgccatttatgaatgctcccatttctttacattatcttccagacactgtgttatcagacattaaagttttaggcaatgtattaggtgaaaatgggtagcttattattatttttattttcatattctttagtattaggaatgttaaacatttcttcatctgtttattggcctgtatatttcacttcttttctgaattgtctatttgtatcatttgctcacttttctgagttatttttatctttcttactgatttttttctcttctttctttttttttttgtgacatagtctcactctgttgcccaggctggagtgcagtggcacgatcttggcttactgcagactccacctcccaggttcaagggattctcctgcctcagcctcctgagtagctggaactacagttgtgcaccaccaggcctggctaatttttgtattttcagtagagacaagggttcaccatattggccaggctgacctggtgatccgcccgccttggcctcccaaagtgctgggattactggcgtgagccaccacgaccagctgatttttagatatttttaaaatacatttttgatactacagatttgtttgtcaggattggttgcaaatatttctttcagtttgtagcagaaaaatgcttttagttttcatctatggcatcctctcttgaacatacattttaaaatgttaatgtggtcacacttgatttttttctttacgatttttattttatatgacactctcctttattctaaggccataaacatgaatttctattttttgaagcatttttatgattttgttgttttataattaggatttttaacctagaatctatattttgtaaatgtgagctagagattcaatcttatttttttgtacaaagaatcagctgttccaatcttacttgctgttagtccatctttgttacatgctgtcataaatgattgcccactggatctaggctctgtatgaggttctttatagtacacggctttccttgtccacttatcccaccaatcctataaggaaggtgttagtatcatccccacttttcagatgggaaaacggaggctcatatggtttgaatgttttgttctctccaaatcttatgttgaaatagacctgcattgttggaggtggggcctggtgggaggtgtttgcgtcatgggggtgggtccctcatgaatggcttggtgccctccccatggtaatgagtgagttctcactctgctagttcatgcaagagttagtagttttaaagagccagccagacatctcccttgctctcttgctccctctctcaccatgtgatacaccaggggttcccccttcaccttccagcatgaatggaagcttcttgaggccctcaccagaagcagatgccagtgccatgcttcctgtgcagtctgcagaactgtgagccgcaataaacctctttttaaaaatataataccaagccttgggtattcccttatagcaatacaaatgtactaacacagaggttcagaaaggctaaatgacttgccaaatgtatgacagctagcaagtgatggaggcagaatttgaatcctgagtgtatacagaattagctagagaagacagctccatgaagaaacaggcctgcagggatccttggggaacatgtacagttagagcagggtttctcagccttggtcttattgatctttgagactggataattcttcatatgatcaagggtgggggcatcctgtgcattgtagatgcttaatagcatccctggtctctactcattcgataccaggagcaactcaccaccccactcctcaccctaactcctagtttttattttgataacaaaaaatgtctccagacattgccaaatgtcccctagggaagcaaaattgctccaggttaggaaccactcgtttagacagtaataactattattaattatcactatcaacctcaataattagccatcattaatgctaatgatattgatgctaattatcaacagtgattaatcgtaagacttttttttcctggtgctgttgcttctttgtagctgaggaacagaaggttctagctttcccttcaagttataccttttcagcactctgcttttccaacccgtgagctctcagcctgccaagagaggagctctgctctcccctaaaagtgtaaaagtgtgcagagctctgtgtggcatgctgcttgcacccatttcacagttaagctcatgaaaacacttgcacaggataggagggttttggagcttggggtggttcatgtttttgtttcgaaatatttttttttcagtattttgttgacaatgaagaaaaatggaaaaataaacccctgctgatgtcaaaataagccctaaatccagatgtagcgggggcgaggagccttcaacattcatgatgtgatcgggctgtaaacatgtctggtgttctagcacgcagcccagcagcttctgtgagtggagacgtgcacacaaacatcaggacctgtcggctactgggatattcaggtctttcagaggtgacatctttgacatttcaaagtgctgtgcaagatccaggggcatttagaacactgtctttagcctggccaatggagaccctgcattttaaagtctaaaactataataaaagtgaccaggcaatgaatgttcaatatagtttgctgtgtaagtcttctcatttctgctaccgatgagagttgtcctccccctattcaagatggcttgacccatgaatccttcacaaggcttccaaccaacctcattttccccttttgccgtgagagttttggagagattttgataagcccccatgtgaaatccagagccttgatgcttgcagcttcagctcaccatccaggccagcgtccttgcccagtaaaggacccaggtcttgctgaaatgacacattcctggccagcccatgccagtgcttacagatcatacttcctttcctaagaccattccaaccctccatctccactaataccatacccttccccttccccaccagttccacacagctctgacctcactctccagccctgtggatgaggctaggagcacacatcaaataacctgggagcttcccaagggcaggcccaggtccccttcctattctttaagatcccatcaatctgaggggtcactccaatgatggccaccagagacctgggcttagagaagaaagtggtagagaatattgaccaagtgacctgtggctgtcacctctctgggcccttgctatcaggacagacacacaagcagacttatagccagagtagaaggcgatgagggtgggggctcagcccctgcctgctggaaacagagtcccacctcagggtcaatgctgagctgggcaggtgtcctgcaatcctggtgaatattcagcggtctgtgtccccttggctagctcctgcctatgcaaacagccacctgagaaggggaagcagagggtgcggtggaaacggctgtgtcaggggacagcaggggaaggaagatagccaaggcttactgaggctggtggagggagccactgctgggctcaccatggaccgccggatgtggggggcccacgtcttctgcgtgttgagcccgttaccgaccgtgagtagccagctgagaccctctggcctctgccactgggctccagatttgggagccacagggccaactggagcctggcggagaccctactgcccttctcctgctctagagtccctccctacgagcaggtggcaggctgtggcttggagagcccctgacactggggctccctccctcatctccctctgcccagcaatctgtagtgactctgggtagtgctattaacatgtccttccaggggctgagctgagctcaccttcttgttgcttcccccagggcctggctgtgcctctgggggccacagagactctgtctgccacaagacagtgcctcagaattggtgaggcaaagtcaggctcccctcttagtccctgcagtttgctctttctctcagctgtgcacctgtgatgcttccacacgctcctgtggtaagctttctggacccttccttagccctatgactccctgagccactctccagtttggtggtttcctttgaagagggtgtggccagggaaggaatggaacctaaggagttggtggagaccagctgcttctgctccagcacttaggggatccatcatcttctcacgatgctgagggctggagaggcttttggcaaccaaattgtactccatgggctagagcgctggagcacggggcatcaggagagagggcccttcctgaatgggctgcagtttcccagtaactttccaggaggttactgcaagtgacagcagggaccaggctgggagtcacaaggttctgggatggtgagggcctgaagcattcttcctccgctgccttattggagggtgctgcccctcccgagcaccttgctgcacctgctcctgagtgcacaggctttgagcttgaatcctggacgcatgaaactagccgtgtgaactgcaagttcc

SEQ ID NO: 11373 - DNA, 6000 bp, Homo sapiens
attccagatctgtggatggcgtgtatgtgtgtgtgtgtggcaggcctgcgcaactgagtgcatgcacatacttggaccgtatgtgaatgcacctctgggcatacatgttaaatggaaatgcacgtgtgcatgtgtgcacagtgtactcgtgtgtagcaataagtatgcatatttgagtatatgctcatctgggtataagggtgcatttgggtatttatgtacactaaggacagagactaagggcatttaatgcttcacatatgtctcttgctattgctccaggcttcaagaaattacttcttccacccaccccacccccaacacacccacactttccagctccctagaggcatgtcttcccttctaacgtcatgtttctggggatagagcacaggactaaaagcccagagacctggtgtgttggcccagctctgccactagttagccccataacagaacaaatcatttctgtttcttgagcctcattttcttcatctgtgaaagggggtggtaaatggtcaagtctgcacttagcattcagagtccaagtcctttgattcctggccccacccgcacccactcccaacggcccttctccccttgcgtgtcctcacccattgctgtgccctgtggtcagtaggggacagagaggactcaggcctaatctgtgaggagctcccaggcatctcttaacatgggtatcccttcctccttgactctaggctttttgtgaggcagcttcaaggatttctagagctcttggaatacagtttgaaaatcatggatctaagcaacctaaccttcattcccttggtttctcagaggattccaagcgtcctggggaccagggtccatggggtgactgaaaaggttctagatggcattggttcatctgatgaggatgctacctcctggctcctctatgagacatcaggggaaaggagtgcacttgaccttctagggcctgcttctggggtgggtgttctcccagggaactcagccctgccactggaatgtctctggagcctgtgcgttcagggacaaagggccttagtggggcaatgggcatggcttacccagcttaggggggctgagctttccaaggcctctctgttgcttgctctattctgatgctgatgcttccaggccttccagggagcactctctgaggcacctggggcttctcagagtctctctggccatctgaccccagtgcagatgtagcagaccggagggcattctgaatgaagctttcccatagacagaaacgctatttcacagtctggcattcaaggctcacaccattccccaaacagggattaaatgggccaatgcacaaaaggcagttacttcccagcctttccataccctggtgcctgtggaaaatgaaaacatttatatgtctcctgaggaaagtggaaaaggctgcttatggctgcccaggaggctgagggaccagcaactcagcacacttctaacctgttctggacatacgagcatgctatcttgggatgcttgcccgcaaagtattagcaaagggctgacgacaggggtgcctaaccatggctgcacattagcatcccctggggagttgtaaaacattctcttgcccaggcctcaccatggaccaattgtctaattatcttgggtggtgaggcctgggtgtaggtattttttaaaagctccccggggggattctgtagcgcccggagggttgacaagcactggtgcaagacatggtgagcattcggtcgatgtcagctgtctacaataaagcacctgggtccttgtgtgtgctgttcttgcctgagcagcgtaaaagctggagtggggtggggtagagtggggtgggctggggtgggagccctgtagtcagggaggaaactgttgcttaggaaagatgaatgctgggtagggtggcctggcatccatctccctcagccacgtctcagaaaattgaattaaaacccatatttttcagctgctgcccgcctggctggctggcttgtggaagggagtgaggcagtgagcacctcaaggcagggaaaagctggtgaggggggcccccagcctccttccctaggagacagaaggcagcccaaggggtcctctgagagaagacccttcccaggggtggtcccttggcctcaggtcttcccaaagccaggcacgtaggggtagggtgggagtggtaggctggctggcttacaaggtcagagctagatctggaggtgaagttgattttttgggtgaatgggtggggaggcagagaagaggggcctgtccctggggaggcctaatctcagggaacagaattggcatagctcctcttccaagattatttggagagaccacagtggcatgcctgtgacaggcggagaacagcgcaggacgtgaaagcctgagtggcttccagaattaagggggtgggaagagctcacaaggtagaacaacactaagttgggcagcaggataagatttctgataagaaagttgcctgtgtgtccttgggctagtcttgttgcccctctgggctaaggtaccccacccatagagaaggagactagacaaccctcctggatcccagctctaatgtgtgttccatgcctcacccaggctgatgctactcggggggctggaattagaatcgaaatctacgagggctgctagcctacacggcatctttaagacagttagagaggtgccgcctccaggtgaatccactagaaaaaactgccctttttgggtagatgggggcatgcctggtttggtgggcagtgggtagagcaggatctggatttccagccccactggccccttccaggggatctggaacccgcagtggaaactggagaaccaagagtacggaaagagaataaatctggaactgagtgctgaacttcaaagtaggggggcctctatctggaagcctggccatccacattcccaggatgggctggtctgccatagatgaccttgatcttcacccttcctctcactcccaggccctctacgtcctgcactctgagtccctcttgactctgagactcctggcagcctcctttccctcacacttagtttcacagtttatagagagtttttatacacatcatctcatttgatcttcacaacaccagagttggaggcagatgaagaaagcggctctcagctctcaggggttagggcaacaagctaagaaggggttagccaggattaaagggaggtcctgtctgtgtctgattttagcacagcacctggcccttttctctccattatttcttctctcctttctcttcattctttcttgatatagataagactgatattctcctccaccaggaagctctcctggactgaaaggaacatgaaccaatcagactaccagtgtgttgtgtcaatgggggtcagcggtcattggtcagtaaagagaaacatggacctaggaacctccacgcgtctttctgggccctcagattgcttctttcaagtttccatatggattcctctccatccacaggtcctttcctctttggtagactggcgaccccaaaggaaggctcaaggctctccctcctccttcccccttcttgaggcctcctggacaaggtggccatacctagaacttggacccaaagggaagctgagcgagaatttacttgaatgggcaagaacagagcctggctgcagaactgagagctctcagagactgacgcctgaggcagggaccaaaaaccgagagcagaggcaggcaggagcagctgtgggatgggggctgggtggggtgggcagagggtgagaacttgcctgggagtgggtaactaactactctcagttaagtttgggcttcgctgccaacccgctaggccacctttacctgtgtagttctccttattaagccatttgcactaggaggaggttggacaggactgtaataacagtagcaatagtaatttattcagcatcggcgaatcaatgataccagggagaaactactatggggtgagtgtaccatttttatttaatgctgctgtgaagagacctgggggccggtactattgttcccttgtgcagatgaagaagctgaagctcagagaggctgagccacttacccaagctcacagagctgtggcacagcagggactggagccaggcagtctgatattttaagttgcctctgtcctgtaagcaccaccatccccttcctggtctttctccgggggcgggggggtcacattggaggacatcccgacaggcaccccaaaactagctgaccctcccaggcctgggcggtaggggcaaagaagagcccaaggagggtctgagacttgcctggtaaggaaggcttcttggaggagagggaagacaggctctgatacacaggaaatcttgaggacctagggagaagaaagaaggctttctagtcctggctatgatggagagactggaaagagggtggtgagcccaggaggcccagagtcagaggagacggggatgacagggggctgagggctccacctcagcgcccccgacccccgccgctgggatttcccgccgcagctcctgctccagtctgtgctgcgggtggggtcgggttgagcagcccggcgccccccaccgcgccccccaccgcaccgccctcgatctaaccccgcccccgggcgctcattggcctgcagcaccccctccccagcctgtgaagtgagcagggggaggcggtggtcggtcgcctccctccagcgcccagcctggcttcgcggcggaggcggcgcctctcccgcaggacggagccaagctggactgccgcgccgcgcggggcgggcaaagggggcgctgcgctcggccccgggcagggagtgacggcggcggcggcggctccgggcgagcgtggtccccgcgtgcgcacacgcacacgccgccgcgcagggacacacggaccccggccgccagccggccacacaggcgcggagacccggctcggcgcgcgctcctcggcgcacacgctccccatccccgcgccgcgcgggccgcggacttgcaggctgcgcgtcctttgcggagtctgccccggccccacggacaggccccgcagtgagcaggtaagggtcgccccgccgcggctgcccctccacgcctcggccgtcttctccccctccagaaccttcgcccagccgggacctcggatcccctcctctggcttggcggtctccgccagccgcgacctccaccgacggagagcgggcgagggccggcgccaggcaagcctcccagatctgaaatgaagccccctcccgccgctgcgcccttcctgcgcgtcaggctgacaccccccaacccaagtgtctggcgctgcgctcggggcggccgatcgccgcagactgccggggtgggggtcgacctagctatctcacgcccctcctgatgcggagaagggagaccaggggggcaggcaagccatgcggccggagggacccggagggacatgcctccctacccttaggtggacggacgcacctacgcggatcgggaaggcagggctggagggtcccccggggctaggtaccgcaatccgcacggggtttgaggggtgggcaagcaatgtgctaggtgggggttggggtaggggccagtgtagaatgcccctctgtggtgacacatccgggattgttcaaaagagtgtcgtcttcgtttcccgtggcgcggaggggctggggttggggatgccagggcttcagtggtccccagaagaaacgccctgcggggtctgtggggaaacgcaccggccttcccaggttgaagtgggcccgctgagacccctgcctgccgctttagaggcagaagctcctgcggcggctgcggggggcggaggccacatcctcggcgggaccttggcaggttagggggctcagaagggacaggggagccgatggatgcaactagaccctcaggagggaacccagccggaagccgattgcatttcacgtggagctgaggaggggagcc

SEQ ID NO: 11374 - DNA, 6000 bp, Homo sapiens
catgagaactaaaatcaagaactcactcattactgcaagaacagcaccaagcccttcatgagggatccacccccatgatcgaaacacctcccaccaggccccacctccaacattagaggtcacatttcaacatgagatttgaaggggacaaaacatttgaaccatatcaatgcccacaaggcagcattggtgaatctgatttaagtcacatggggaataatggttagctgcacaaagccctttctggaacacaaagcagtgggggcatttattaaccttttctgttttccaggatcacagggttctggtaaagttcaaacttgtcagaggatacaaggagaaaaggtgcagtgtctccattcaggaatttggagactaaagaaagagtcaaggaaaaattgttcacatttttaaaaatagtaacgattaagcagaagacaagaaggaagacaattagatctcatttgatttccaataccttcatgatgcaggcaccacagtctctcagttaacagatgagaagaaagaggcttagaactgttaagtaaataatccagggactcacagacaggacatagcagagccaagtttgaatccagatcattttgacagcccagggcacagttcatatatgaaaaggccaactaacaaaatgttagctaacaaatgcatcactgtggacagtcaggaaatacctgcaagctccagaactttctcatttacatagcactaacagaaacttttggactttccctgcaatgaggcagagtgtcaatccctactgagatggaccccaataaccattaaaaatacatatataaaaaacaagtttaaatattttgcctataacttttattccaaagcttatgaactcttctcttttagcattacaggaaaatgatgtatttgttcaaggatataaaaattgtggccagggctcccatagtgaatgtatgaagcaggaagctggggggatccatggaaccttgagcattctcttccagaactctccatccctgctaaagctaaaatgcctgtatcatgggcaaagcttgtcacactagaaaggtcaaaacttaaaaatgttcttaccaagtatctcccagtagtatgtggctgatatgagactgaggcaaagcttctcctagcagaaaagaagggactcagtaacctgggaaaggtgaccttcatctagaaaaggaagagacagaatttctacaaatgagttcaggtaagaatgtgtattagagttctccagagaaacagaaatagaactaataggaggggtgtgtgtgtgtgtgtgtgtgtgtgtgtgtgtgtgtgtgtgtagggaggggggagagagagaaacagagagagaaatttattatagggaatacaatatgaaataatcattcacacaattaatagagactaagaagtcccaagatctgcaagcagcaagtgtcaggcctctgagcccaagccaagccatcgcatcccctgtgacttgcacgtatacgcccagatggcctgaagtaactgaagaatcacaagagaagtgaaaaggccctgccccgccttaactgatgacattccaccattgtgatttgttcctgccccaccctaactgatcaaggtactttgtaatctcccccacccttaagaaggttctttgtaattctccccacccttgagaatgtactttgtgagatccacccctgcccgcaaaacattgctcttaacttcaccgcctatcccaaaacgtataagaactaatgataatccaccaccctttgctgactctcttttcagactcagcccacctgcacccaggtgaaataaacagccatgttgctcacacaaagcctgtttggtgctctcttcacacggacgcgcatgaaagcaagctggagacccaggagagctgatgtgtagttccagtctgagtatgaaggcctgagaaccaggagagccaatggtgtagttccagtctgaaagctggcaggcttgagacccaggaagaactgatgtttcagttcaagcccaaaagccagaaaaaaaacaatgtcccagctcaaagaagtcaggcaagaggagttccccgcttttcacagaagaattagcctatttattctattcaggcctttaattgaatggatgagagccattcacattagggagggcaatctgctttactcagtctgccaattcaaatgctaatctcatccagagccacctcacagacacacccagaataatgtttaactatttgggcactccatggcccagtcaaactgacacatacagttaatcattataccatgttagtttgtcttcttgtccactcaactttcttctaactactgtatagtattccattgtgttatatacatgcacagttatactttataaagatgaaagggctgggcacagtggctcacacctgtaatcccagcactttgggaggccgaggcaggtggatcacgaggtcaggagatcaagaccatcctggctaacatggtgaaaccctgtctctactaaaaatacaaaaaattagccaggcgtggtggcaggcgcctgtagtcccagctacttgggaggttgaggcaggagaatggcgtgaacccaggaggcagaacttgcagtaagccgagatcgtgccattgcactccagcctgggcaacagaaaaagactccatctcaaaaaaaaaaaaaaaaaaaaaggaaacaaccatatttattattttgcttaatattatgtttgtaagttccatttatgttatttttggctacagatcattttcttattgctatatagtatttcattgtgtgactacatgaaaatttattcatccagttgatggacatttgggtggtttccagtttgggatgattcattgattttgacatcatgaatatttaggttgcttctgatacgtttctttaatactttgcgaaggcatcattttgcatgactgcttgtatagatacataaatgtttctcttgggtggccacaggttaaacaatggtctatctggatcatgaatggagagaaaaggaaacaaccagaaagctctctctccccacctattctctgtccatggcatctgccactttctctcactctgcccctaccacactgtgacctaaccagcttctaccttctcccaggagttcctcacagattttgtcttataaacattttcttgaagtaaaacatacctacagaaaagtgcatatgttttaagtatgtagtgcaaagaatttatgtgaattgagcatatgtaagtaacccagatagagatgaaaaattattagcatctagaaatggaacaatgcattagaggatatgtaattccagctttactaaatactgctgaattgcttttcaaaaattaccacatcaactaactctcaccagaagtaaagatgtacacccgtttcccttcaatcttgtcagcacttggggatagccacacgctagctttcactataataataggtaaacattcttactggttttagttattttccttaatttttaatatggttgagcctatcttcatactcatttgttagttggaatatgctgcacttgttttgctattgagttgttgtcctgttttgaacctttccttaagagtccacagcttatccagttttctacacaactcacttctgtttgctgcccttcattatagactcaatgccttctcattgctagagcactgtgccctccttggggctcgatggtttataataaagcttccccaggagatctcatgggggccaggttctttagtggtggccactaaagctactacctcttattccaggtgccataaaccagtggctggacctggttggttcacagagtgttctcaatgtgaggaatcaggtattgtgcttggttgtcatataagcagcttagttcccattgttttatacctggcctgctaccctcattcatgttaccttcatgccccatagacatttgagatttgatgcaaaccagtctgttacagtaaaagcaccactgtctaggaagttctggagatgggttatcagctcatttacatcagcagctgcgggatcttgggcaagtcatttcacctattggagccactctctgctagcataaaggagaacataaagataccttccctgcctatctcacaaggttgtttgggaaactgaatgaaagaacgtgtaaatgtgctttgcaggttttttgtgaaacaggaatagctgttagtattctcgcctagccctgtctgtggtgcccaggatgctgcattacctcctttctaccctcgccctgagtattggtcctaggtagaagctgaggtgaatatactgaaagcagtaagaatcttcaccaggcccctcccagtcatatcacaaggtgttgtagcttattgacaaacacagacctcatgtttctctgagaaccgccctgtgaacacctagatagaactaagggtgtgaaatacaaacgtactatttgcctacacttacggaaataagagcacatgacacagtagatggcaaggtgaggctttaagtcagaaagcaacctcagctgaaacaaatgcataattataatttgatttcagaagtggaaacatgacccgaattcatgcacctactgattagtccaaattcctttattgttgaagctggagcagaagtgggggtccaccgtggaagtaaggaaaagcaaaacagaacaggggtctcatccagggagccatgtcgatggctatggggagctccaccttgctcttggggtggggccctggccctgggtgggactgtggggtgatgagggttgtgctatgctggctacctggtggtaattgccaaggagagagcagcacgtagatcctccctgtcatcaggcagagctcttcagtgaggtgggctcagggagggctctgtgcctccgttcagcagagctgcagctgctgcccagctctcaggaggcaagctggactccctcactcagctgcaggagcaaggacagtgaggctcaaccccgcctgagccatgccagccaacttcacagagggcagcttcgattccagtgggaccgggcagacgctggattcttccccagtggcttgcactgaaacagtgacttttactgaagtggtggaaggaaaggaatggggttccttctactactcctttaaggtaagtttcttgcctgcgactctgaacactgacttataacaatgagactgctggaacttaagagtgtcaattgaagtatcatagccagtattgtgaatgagtgttattttctttactaaaaaggatttttaaaagtctgaagtgctaaaacaacaagctgtagtgtgcagagacctagattgtagtttcttaggaatacaggtgacgtttttctttctgatgctgctggaaatgtgtgaatcgtgagtaacatttatgagtggatgatttttactttccccctttccttaggtgaaagcacttttaattaatcctatagcagtacttgaaatgtctgtttctagtaggggttagagctatgagttttttgctaggaacaccagagatgcggaaagctcacaatccccaggacagtgactgatatgatgagaaacaacattgaataaggcaggaaggacgacactttctttgatgatccttttcattaaacatcagtgaggaatatatttctttgagggtagttgatgatgccaccatttgcaacaaattacctcctagaacaaatgaaggacagagagtttggtgagtttcaccttcaaagtatccaagggccacactgaggaaggatcttcattaagctaatactgtattgtttcttattccgcaacaagatcttgtggacagaaatgaaccgcacatttgggaaaagaacagtttcctgcttcttgcctcagaatgctgggttgtcaggttatttcacacctgtctaacgatatgtttagtcattgcaataattcacaggtctcaaactggtcctttcc

SEQ ID NO: 11375 - DNA, 6000 bp, Homo sapiens
aaaccaatggagtgtgtggccctgagctttccaaaccaacagggagcacatggtactgagctctctggggtaagtgcttccttaggcctcaccctgagacagtgatcctgggcacagagctggcaccttggggcttcatggtttcttgcttcaccatgtcacgtgggaaggggcttcctgcctccctccctctgtcactgtgctgtactccctcggaggagacggcaaacacgttcttaagagaatgacccttaacatgtactgtgctctccagtctccaaagtacttttccttcttagcaacgcaggaaccctgctcctaaatgacattgtttttattgtcaagtgcaggcaataaaactcataactcacaccccaaataatcataacaggtgttttaaactgttgcagttaactttgagctcaccaaggttcaaagaagccaagaggtatgctcagggccccaaacttgccctggcaccagctctgagtctttgcttatgtcgcctggtgggagcagggcagagggggatggggtcagcatgcttagggtcagatgatgtggtgggagaggggaggttgtgctccaggaaatgactgtgcgtattttgtccagcaggggccaacaatgttctgcctgaacacactcacacattcctcacgtgtgcatacacttatgccccacaccacagtcacaatcatgagacacatagattcatatatgctccacacacaacacacatgaacacccattcatacaccacacacacacaccatcacctcacagcaggtacacacacatcccatacacacatgccacacattcgtgagctgcacaacacacccacacaggtacatatactcatcagtgcacacacataaactctcacaacacatgcattatataaaacccaccacatgccacaaaatgcactgtaggaaaatgagaaagcagagaccagcagaaggtaatgtaaattaaacaccactttaaatctttccagagccagaaatgaccacagataacattttaatgtattttcctcaagacattttctgataggtttttcaaaaataaaataaaatgaaagtaaacttgcttcattgacttaaaaaaggaaatgaatggcagatgaatgggtaaatgaaatgtggtctatccacacaacagaatattattcagccttaagaaggaaggaggccgggcgcagtgcttcacacctataatcccagcacttcgggaggctgaggtgggcgcatcacctgaggtcaggagttcgagaccagcctggcaaacatggtgaaaccccatctctaccaaaaatacaaaatttagctgggcgtggtgggagggcctgtaatcccagctacttgtgaggctgaggcaggagaatcgcttgaatccaggaggtggaggttgcagtgagccgggatggcaccattgcactcctgagtgacaagagcaaaactatgtctcaaaaaaaaaaaaaaggaaattcatctcagcctccacagtatctgagactacaggcgcacctcaccacacacggctaatttttgtattttttttgtagaggcggggtttcaccatgttgcccaggctggtctagaactcctaagctcaagcagttagcccacctcggcatctcaaagtgctgggattacaggcataagtcaccacacccatcctaaaatgcttgatttgacgttaagtattttttattgcaattaaacaaatgagcaaacaaacgcaacaggagatggaaggctgtgtcttgatccgtgggaaggtggaaaacagctgagggtcagaggcaccccttcctggaatctccttcatcacccttctttgaagaccggtcctctgtgtccctggagaggggtcaccgaggcgttgctgctgcctcagggacagaggcgtagtctcatcgacaatgataccgttatttcagtgtctgtccagcagggggagccaggtgcccgggaatggcttcccttggctccttctcaacccccaccctcctgaagtctagccccagagcaagcagaaccagatcccaaacctcaccaggttctgtgctcaggcccttgcctggacacgtggactccgggcagaagcattacttccagggagagtgaaggcccagcggccatgtgttcccctgatctggtagaaacaccaggatgttatttcttcctcttagaagaggccacttgagtgtcaagaaaatgttctcttacaactatttaagaataagaggaatcacagaataaatatcatgataatggtgaatcagggcttgatcaggagagagactacaccgcaacctgaatggggaagtttggtgtaaagaattatgaaccggccgggcgcggtggctcacgcctgtaatcccagcactgtgggaggtcgaggcaggaggatcacctgaggtcgggagttcgcgaccagcctgaccaacatggagaaaccccgtctctactaaaaatacaaaaattagccgggcatggtagcacaagcctgtaatcccagctactcgggaggctgaggcaagataatttcttgagccccggaggcagaggttgcagtgagccaagatcatgccattgcactccagcctgggcaataacaatgaaactccttctaaaaaaaatataaataaataaataaataaataaataaaataaataaataattatgaacgctaagaggggattcctgagaggaccccagtgcacacaggatcgcagacacagggaatggtgccggggccagcacccaccgagggacaagcagggagacaggtgctgtccagggcacaccccatggtcaatctcatttatggcggcagcctttccacactcagggtcggggggatgcaccgtggaaggggcaggtccctctctcccatggctcagctcctcacagcctgtgttaaacccacctgccctgcagaggccatgggcaccactgggcacagagaggagaagtgagggccctgccttagagggacctaggggcagtagacacaactccctgggagtttgttggggcatggttggttccatggaggagaggtgttggaacccaactctgtagaatggccagggcttccccactgcagagccagggtggggagtccaggaaagggagcattgctccctggtgcaggcttgggggaactggctgcccccctcccacctgacaaccccatcctactgttccagcctgcaagctatgtgcaaccgcctttggggctgtgggaccgagtggagactaagactctcctggagagagctgtagggccgagtctgtgtgggatgtgggtggacacctgggcctggaccatcctcttggtttgtcttggctggtgtagggtgtgcgtgtgtgtaagccagccccctgctgccctggtcagcttgttttatgacccctggcctgtgggcagaaggcctggctgtgggcaccatcagtctcactagaggctctgtggccacccctacacctgctgcccacccctcaggcagaaggcaggacaaatgatcaattttaattagttttgactcctttgaattaattctggctgtaatcagaatttcttcagtaaaaaagcacagaaagttcttctcccgaataagggtcttgttaaataaagtgggtctttctaagccaggagaagttcagctcagctcctgggaaggtagcagtacctacggctcagaggagtggagggcccatccatgtaggagcctgggcctgtgccccaacctcagaccagcatgtgcccccaggggtggtgggtgggccctggagggcagagaggtgcctctagctggctctcggaagtcctgaccagtgacaattcttaagacaccattaagtgtccactggagccagggcctgtgctaggggctgagggtgacagaggtgacccatctggccaagtgacctgtggctggagaaactgaggccctccttcgcctcagggaccctgacactcttcaaggccaggtctttggtggtgccagatactctcctgtcccttggtttgcttgtggcttggttcttggtgtgtgatacgtctctgtgtgtgtagttgccacaccctccagtctctctcatacacactgtttcccaagcatacactcacaaacacaccttgtctcagactcaaacacacacatgccacacacacaccatacatcacacactccatgcacacacatgcatctacacacaccccacatgcacatcacacacacgtactccatgaacaacacacacacgcacacacacagacgcacacacacacaccccccaacctcttttatgcactttcctgacctttggagacctggctcctagatgtatctctgctcaaagttcccctccctgcctgggggcagctctggactctggtctactttcggccagggcacacctagcccactcccaggtccaccttcctccagtctacccccagactcctctaggccatcatcagccagcgcttcatcctcacctcagctccctccccggtctacccccaccctctgcccctgagcctggacggaagttccccaagtctctccagcctgcatcccagcccaccgtcagccggcccccacgctcaccccagctcacctcccagtctgcccctacaatctgctcccaaaaagctcctttgcagctcagcaccccagccccgccctcagagcccatcagccggcaccccaccttaccccagcttgtccccagctcgaaaccctgccctcgcccccctctcaccccgctgagactccagccgcccccatccctcccacccggcgcgcctgcagggactgcaccccacatctggaggcaacggggcacggccgcaggcgtggtctgggggtgcggcctgagggcggaccccctgaggccccgccccaccccaaccccaaccgggcgtcccccagccgcgcccccagcgggaccgagcgtgacccagctgcggccggccagccatggagactggagcgctgcggcgcccgcaacttctcccgttgctgctgctgctctgcggtaagggggcgacggcccgcaccgggggcgcccccactcctcggggttcaccggacccgggtggacccgcgccttcccgcacctgcgccgcggtccttcccttgccccggagctcgggaggggcgcacagtgaccctggcgggattcccaggctctgcgggagggttccacccgggagaagctgaaggcgaaggactctggcgggcaagggaggcacagggccccctccggggtcttctgacggcagggtccggcagcccccggtccttctagttgtgatgtccccccacgccccggttctggggtcgcctcagggtgggcgagaagaggtggaccaggtctggctctttaccccttatcccccagggtgggctgtctgtaaggtagtgagctctctgtcctggcattgagtgcctgcccaccactcacaggggcgtgggcgggtggactccggactgggtagctggtcctcccagggcccctcagtgtgtggacgcctgtgtgtgtcctggaactggctgagaggggaagcggggcgactctctgagccatcctctcctaatgccttcttcggcaagaaatcaggactctaggaagaaccattgctcacaaaatggaaatagattaaactaaaagcttgttttgaagtaccttgctaaagaaattatccaagaaaaagtaagagagagagagagagagagaatgtgtgtaaaggctgttggggaagagtgcttgctgagggctggggtccactgagtggtgactgagcctggccagttctgggggggacattggtgatggagggccctggcctggtggtccccagtttccctggctgtaagatgcagagttgggcctgttttgatgatttgggatttggtacgggaggtgggaaaagggtggaccaaactcagtggtcattttccttccattgaa

SEQ ID NO: 11376 - DNA, 6000 bp, Homo sapiens
tgacctccccaggctcatggggatgaaggcacaggtgcagcatggtggctgcaaggcacagaggtgggcacgagggtccgcagggcgctgagtgggggtcatcctggaggaggcaggaaaggaaggggagggtgtaccctctaggggttgacatgtgttcggggaggggagggttggggatgcagggacacaggtcaggagggcgtcccttcccacatatgcaggacaactactggccccagccaggggtcccaggagggacggcttctccccagggggaggaggagttaggggggcccctcggcccagggaggggtgccggagatgggcattgatagtgacctccctcctcccggcccctccggtcctccggtcctccgcatagtctccctttcagtgagctccaggagcattgttccacctttgtaaagagggagatcgggtgacaaagccgggtgggtgggcaggaggccagaggcctcttctctcccaggccgcatctgcgtgggggcggagctcatccactcccctcctctggcttcccaggcgcggccgttgccatggtgacaggcctggcatcccacggcccctggggcgccctgcccaccgaagctgccagaggaagggccccccgacgcttctccaccctggcaagatgggggcgggggcccacaaaacctggctcttaggctagccccagcactgggaggtttctagcagcctgaacctcccaagtctgtgggaggggagccccacctcctggcaccctgacagctgggggctcaggagttggggccacacatcactatcatctgtgcacctaggcctccttggggccagatacagagaaataatatggttgtttttttgtgggtttttttgtggagagagggggtcttgctgtgttgcccaggctggtcttgaactctgggctcaagcaatcctcccaccttggcctcccaaagtactaggattgcaggtgtgagtcattgcacccggccaatatgttatttcttgatgttattccatggcccttgaacagtggctggcatggggccgagggagggcacggatgcagaggccacagtgtgctggacagatgggctggcctggaccctggatccacagagcagagcctccagccccagcccagctctgctgggctggccctgggaggtgatgcttcaatctggggtgccagatggaacagaagaggaggaagaccttcagagctggggaaacaagcctggcaaaggcctggaagcatggctttgcagggtgtttctggggaggagtaagagtggggtgtcgggtgtgacaggaaatgaagaggtgaggcggggtctctgcttggaggaacttccactgccatccctgagagcatgcactttattctgggcagctgctgctgaagttttgggaccctccattatcaatgcccaggtgatcaaagctgggtcccttcccttccctgcagtgccctgccctgccctgccctcccttcccccccgctcccctccccctccccctccctccctctaacccctccccctccctccccttcccctcctccccctccatccccttcccctcctccccctccctccccttcccctcctcccccctccccctccccctgcctcccctccccctctccctgtctttctttttattttttttctagagatagggtctcactctgttgcccaggctggagtgcagtggtgtgatcatggctcactgcagcctcccaggctcaagggattctccagcctcagcctcttgagtagctgagactacaggcgcataccaccatccctgacttttttgtttatttttgttttagagatggtggggtcttgctattttgcccaggctggtctcgaactcctgggctcaagtgattctcccaccttggcctcccaaagtgctaggattacaggcttgagccacggtgcctcacctgggtcccccagggtcacaggtaccatactcctgccttacctctttgggaacttcaggacgtctcatggcccacatgtggctgagtactatcctgtgctggacacagggctggctgcgtctccttggtgccccatctcccgatcctcttgaggagcgaggggctgagtgtatgcacgagatggcatgtcccctgcctggtcccctccctgctccagcacagctctaagggtagcagagtactaattacagggatgtgtgggaaatgatggccccattttctcaccattgccaccaccactgctgactccttcccaagtccctaccacaggccaggctctagtgcaggcaggtgtggctgagctgggccggctgggctggtgtcctgcctctggtggtgttaacaggcagcctcttgcaatggaggagcctggatgccaatcttgacccttacgagctgcgtaatcctgggcaaatatttgagtttgctaagcctcaatttctcatctgtatatgggtacgggattccttgtagcactgtgatgagggtgaacaaatgatcactgtaaaatccctggcccagagcccaggaggctcacaacaggtcctcggtcagtttctgtgcctccctgaagttctaggttactcactcattcattcactcaccatccctgggctcagccagggtgcctagccctgtactaagtgctcgtatgaaacagtgctaaatgctcacgtgcaacagtactaagtgctcacgtcaaacagtactaagtgctcatgtgaaacagtgctaagtgctcacgtgaaacagtactaagtgctcacatgaaacgatgctaagtgctcacgtgaaatgatgctaagtgctcacgtgaaacagtactaagtgctcacatgaaacgatgctaagtgctcacatgaaacagtactaagtgctcatgtgaaacattctgagtcctccaggtgtttccaggccaagagaataggaacagttgggtgaaagggggatggccttctctaaagagtcccagatcagggccccttgccccttgtgtggcctgccggtggcacttggatttcacccacagagctacccaggaaccatggcagtttctaagcgggtcccaggagtctcaagggggcagcctagagagaggtgagagggtgatggcgacactccccagaggagcacggtggccttgtgaaatgggtatgggttccggaacagacaatcacaaatggaacacttagtagctctatgcccttgggtatgtcattcctctctgagactcagtttccccacctgggaaataaggataacgtagcattcttggattgctgagaagatacaataagggcaagtatgaagtgtgatcgatcagattcaggtgcccaacacgtgttgttgattttctttttttttttttcttttttttttttttcaggccaggcaccgtggctcatgcctgtaatcccaacactttgggaggccgaggtggatggatcacctgaggtcaggagttcgagaccagcctggccaacatggtgaaacccctgtctctactaaaagtacaaaaattacccgggagtgatggtgggcgcctgtaatcccagctacttggaaggttgaggcaggagaattgcttgaacccgggaggcggaggttgcagtgagccaagatcgcaccattgcactcctgggcgatgagatgagcctgggcgacaagagcgaaactccatctcaaaaaaaaaaaagctatttttttttctttattagagacgaggtctcactatgttgcccaggctgatggggcaagatgggggtgggggtgagccactgcgcctggcagaactgttgattttaacagtaggattatctgcctgcattacagaaaagcaagctgaggctcagagaggagccccaagtcacatacactgaggggagaggcagacgctgtatttgagctgccactgggtacaaggcagacttccacacgtgggaagccttagaaatggtctcccctggccgggcacggtggagcacgcctgtaatcccggcactttgggaggcagaagcgggagcatcccttgagcccaggagttcaagaccagcctgggtaacatagtgagaccctgtctctacaaaaacattttaaaattagccgggagtggtggtgcccacctgtaatcccagctactctggtggctgaggcgggaaggtcgcttgagcccgggagatggaggctgcagtgaactatggtcgttccactggactccagcctgggcgacacagagagaccctgtctctaaaaagaaataacaattaaaaataaaaataaaaagtcttccagctgggcgcggtggctcaagcctctaatcccagcactttgggaggccgaggcaggtgaatcacctgaggtcaggagttcgagaccagcctggccaaaatggtgaaaccccgtctttactaaaaatacaaaaaattagaggggcgtggtggcaggagcctgtaatcccagctactcgggaggctgaggcaggataatcgctggaacccgggaggcggaggttgcagtgagccgatatcgcgccactgcactccagcctgggcgacaagagcaaaactccgtctcaaaaaaaaaaaaaaaaaaaaaaaagtctccctcctagagtaaaatgaggcgacccagtctgagagtgtgggtacggggacttcccgcagcctctcccaggcagcaagggaagggaagaaaccgagtgtaagcggagggcaagcgggcggacacccaccaggcccggccccaccccgtgctccgcgtggccgggagacgcggcgcctttaaagcccagtgggaggcgtgtccctgggcgtgtcctcccggagccccgccccgggggctggtagcctcggccccgggaggttgcgccggctctggctcagcggcggctccggtggcagcggcggtggcggctaggcgggctcggcggctcctgtccctcgggcggctgcccgctcgctgcccagggcgcccggacacacgtgggcggctcagcgatggcccgcgccccgcgacgtggcgggcaggcaccggggcgcgggaccgctgagcccgagtgagccggggccgcgctcccgccttcggcccgggcctcccgggatggccgtggcgcctctgcggggggcgctgctgctgtggcagctgctggcggcgggcggcgcggcactggagatcggccgcttcgacccggagcgcgggcgcggggctgcgccgtgccaggcggtggagatccccatgtgccgcggcatcggctacaacctgacccgcatgcccaacctgctgggccacacgtcgcagggcgaggcggctgccgagctagcggagttcgcgccgctggtgcagtacggctgccacagccacctgcgcttcttcctgtgctcgctctacgcgcccatgtgcaccgaccaggtctcgacgcccattcccgcctgccggcccatgtgcgagcaggcgcgcctgcgctgcgcgcccatcatggagcagttcaacttcggctggccggactcgctcgactgcgcccggctgcccacgcgcaacgacccgcacgcgctgtgcatggaggcgcccgagaacgccacggccggccccgcggagccccacaagggcctgggcatgctgcccgtggcgccgcggcccgcgcgccctcccggagacctgggcccgggcgcgggcggcagtggcacctgcgagaaccccgagaagttccagtacgtggagaagagccgctcgtgcgcaccgcgctgcgggcccggcgtcgaggtgttctggtcccggcgcgacaaggacttcgcgctggtctggatggccgtgtggtcggcgctgtgcttcttctccaccgccttcactgtgctcaccttcttgctggagccccaccgcttccagtaccccgagcgccccatcatcttcctctccatgtgctacaacgtctactcgctggccttcctgatccgtgcggtggccggagcgcagagcgtggc

SEQ ID NO: 11377 - DNA, 6000 bp, Homo sapiens
tatctccagtgtctatcagtaaagatggcgatatttggccaagttctggttatatttgaagacaaagttagtaggatttcctaacagattgaataactaaggcttgcaggaaaggaaagaatctaggatgactccaagtatttggcctgagcaaacagaaatgtggagttgttgattaccgtgttttcctctgttcaagctcagctgaacaggtatagtcatacagaggcagagtagatttaaccagatttgaagtttttcctgttgaatacaatggtgggagtgttttgaggatattgcaaaggaataattgtcctgatggaagatgggatataagttgcataaggagagacattagcacatgcagcacacgacagaaagagaaaaggcatgtggtcggtagatggaaggtctctgtgggactggagaattgatggtaataacgtaacagagggtgagatgaaaaggtctgaagtggtggtcagaaagtagggtggccatattttttcctttgtcccataactgtatcagtctgttcttatgctgctaataaagacatacccaagactgggcaatttataaaggaaagaggtttaattgactcacagttcagcatggctagggaggcctcacaatcatggtggaaggcaaaggaggagcaaagtcacgtcttacatggcagcaggcaagaaagcttatgcaggaaaactcctacttataaaaccattggctctcatgagacttattcactaccaggagaacagtatgggggaatttgacctcatgattcaattatctccacctggtcccacccttgacatgtggggattattacaatttaacctgagatttagttgggatcacagtgaaaccatatcaatagcaatccttttttctcagttgaataatatttgagaagagttacaagtgaaatgaaacaaattccaaacctacctctccaactaccatcccatgtgtcaacccctctccatggttaagattcttgaaaaagtctccttattcagcttctgcattctccatgtttacttcttaattccatatggtaagtctcccattcacaacatagcaaggcaaaattttgtttgctacaggtttcaacaccaccttgaagccagctaaaaaagtctattccttttgatttatgacatctcttcagtcatatcttctcattcctacattaaatatcccccaatttcttcaattattccttatgacatagtttgtagctactttgaaaacctgaggctctcagctgaatgtgttctaatttgtcttttaacatatgtctctaactctcttaacatataatgttcagtattattcagaaataagaagaaataaagtactggtggatgctacatggatgaaccctgaaaactttatgctaactgaaggcagccagtcacaaaatactgtacactatatgattccttttatataaaatgtcagaataggcaaatctaaagagacagaaattagattagcggttgtctagatctggggaaagataaaggattggagatgatggctaaggaatgcagagcttctttttgtggtgatgaaaatattctacaattgattgtaatcatggttgcacaactctgtgaatatactgaaagccactgaagtgtacactttaaataggcaaattctatggcatatgacttatatctcaaaaaagcttgaacccgagggaaaaaaaaaaaaaagctgttaaaaaacaaacatgatgttgaaaagaaaaaacagtattctgaagtagagtgctttaacctctataatttcaatttcactctgtataaaagagataaataaataatatctgcttcatctccttgacaaggttgaatcatattttgcaacatcataattacataagttattagcttgagtgactctcaccacctcacatttggattactaacacaattcacttgctggtacccatttgttttacatgtagtggtaagagggtttttttatttctttgctttttaacatctagtacccaactcaggaaagaatgtaaggagcactttgtacccactgtatcaagtccaacccttcaccttagcatttaaagctgtcttccaactttgtcccatacatcccatcattcttcacaccaactttgtcccacacatcctatcattcttcacaaccaaacaactttcagttataaaaccattgttttctctttcacgtatcttgcatattaactgtttagctggttattcccctcaaacaaaatataccctattatggcctgaatgtctccaaagccctaacccacaatacgatggtatttggagatggaacctttgggaggtaattagatttggatgaggtcttgagagtggggcctttaagacagggcctttataagaagaggagagaccagactgctttcaagctctctctctcttgctctgccatgtgaggacgcagcaagaaagaggccatctgcaaggcagcagcagaaccctcactgaggaactgaataaactggcaccttaatcttaggtttaccagcttccagaacggtgagaaatatattcctattgtttcagccactcaggctatggtatttttagggcagcctgaactaatacatacttctttaaactccccaccaatatcctgttatcatttccttcaaacgttttttcaaaactttcttatcttagaatttccccccatactgatcagttcattactctgcattctcttaggaattgtgctacatataaatctaatttgctgttcttattcgtttatgtatcacattttaactcacctatttgactaacttcaaaggatggaagtaatgttacctatttgacaaacttctgttacacatacttcatttctccgaaacacaagttttgtagtcatttctaccaatattcagccagcactgcttcttcttttgctgaaactgttggttccacactctggtccgaacttaataggaaagactcaccataaaagataattaagaatggctaatacacagtgtgttgaaatttgatttccttaagtttaattccagagttctgatacacattagcatttagagtgcctagaattacagtgtagaaggtgactaagtacatttaaagattgttcctttttgttgttatattacaaaagattatagttgaggcagatcttgaaattgcatctcatcagcccagcaggtggtgtgactcccataggagaacaggaaaggacatgtcccataaggaggcaactcagtctctgctagctcacaagcgtggtctcagtgacctactcgaaagctattctgcttgtatcatcagttcagcctcaccttggaaaactcaagcccagttttcccaaatgatttttagagaataagatttccagatgaaaaccagggagcatgttccaatttttagtacatcaaggaccatgtttttccttgctaccagccccattttctaatcagttaacgcttcctgtgatatctgtaggggaaaggtgtagtgcaactgacagggagagatgagatcttaagcctctgctcattcattgggtgctgagtagcaatgcctcccgcgggccacaggaacttatctccgccgattgttacagctggaaggatggggagatagcaccatagatccactcctcattttatgggcaaagaagctaaggcctgtaaaaatggcatgcccaatggtacaggagttacaaacacggtcataaatattggctccaaatttggcatggaagcttatgtgctgctctagaggagatctgctacgatgtggagattggcttgtgtgggtgtgttttattgctcttgtcatttaaaaatacttttgattatttgtcttccattttttttaggttacgaggaaatccttcaaaatgcgttcttgtgaaaaacgtgagagtgcaaggaaagagggagggataggaagaaggaaagagaagcaaaaggtaggaagaaagtgaccttggtgcccttttctagtcccctcccccgactttcctgttctccactgtgcccatctctggtttcaccaggctccattccttccccagttccctgtttctcacggccctgaaaccagccgacagggatttgcattttgaaaaaccttgcgtggctgccggcgctgggcatgctcaaacgcccagaactggcttttttcggcaactttggcagctctcccacccccacccgaaggggcaggtacgcacagctccctccgtgtgagtaaacggaaagaaattaccccactcccgcccagggcagaaggccacagccccgcggggcagtggcgcgccccggggacgctgccagggggcgccaggccctcagtggtggcgcggcgccggggtccggggccggggggcgctgtccgagggcacgtgcgcgggcgcgcgctctgggagtggtcgcggggtggtgggaggggcgggcaggggcggggccgcggcggcgcgcggaggccgagctcggctgggcttggcgaggctgcggcgcggccaccggcgggagtgcagcggccactgtacccagagattcaaaaccccaaacccgggacttgggggcgctgagccgggccgggaagcagagcctggtcgtgaggaacagccgcccgttgctgtctgcccctttgcggacagcgtctccctcgactccgcttaggaagtggtgggggcggcgtggcccccgtcgggaggcgttcgaacgcccgctaggagagagaaaggattcccctgtgcttggagcccgcactcgggcgcggagggagcggcggcaggctctcgctttcggcaccatgggctgcacgctgagcgccgaggacaaggcggcggtggagcggagtaagatgatcgaccgcaacctccgtgaggacggcgagaaggcggcgcgcgaggtcaagctgctgctgctcggtaagggcggccgggtcggggcccgggggtcggcgggggaccgggtgcggcgctgcgcggccctcggcgtttggaaacccggagggaagggggaggaagcgcccgaggaggcttctgagcgggagctgggtccggcggtgcggaggcaaggcgggtccccctctcccggtgtctggtctctctccgccccggcgggcgaggactccccgcggcggggcgggcgcgtcacttcactcggatgctttcgtgcgacccagcaaagagcccaggcgcgagtccgaggcggcgggtcgcgtggaaaccctttgctttgaagtttagctcagccttgtaaagatgaaggggcattcgcggctagaaaatgaaaacacccccccccccgcgccaccaaccccctcccggaaaacccttcttcgtgtgcggtgtaggttgtgtttcgactgtggttttctcatgcccagagtgccacgtttggtgaaatcagtgcaccttttgtggggcctctgagatggggctgaagcgtctttcctgttaacttcctatggcgactccttaagtggtcaaggagcgctgattacattccccctgcgctgagaaaaggctgcgctggatgcttgatttttcttgctgtgggggcatggaagccacccaagtggggttgggaagctttgctttagtagtaggcaaggcagatactcgagtggtgaaaactgctgtgaaagagcgagagggtcacgccagacaacagggttctgtctccgctgccaccgtttctgatgaatgagatttgccaggtacacgcaaggcttttatttgttcttagcactgttctgttcgtgaaacgctacgtggaggtcttttccaaatgtttgacggggaagaaaataaagagtaaaccagggttttcactgagggaagcattaggaaaatctttacaggttaagattcgtgagttagggttttcttttgtttgcatgttttcttctcacactctaggtatttagatagatgaaaaatttctcagaatcttcatttgcatttcca

SEQ ID NO: 11378 - DNA, 6000 bp, Homo sapiens
ccctcaggctctggggatctctcactgcagactctgacctgattctggcgaggcattcatgacaggccactgactaccctacccaaagcctctggttgtctgcatttctccttcagccttctactaccaccctttatgtgaattataaaatggtggcacctccaggttgatgaagtatagacaggtgccctcccaccatgttgatacagccctatgcacaagcctgggcaagcagctccttctcacctctcagccaggagcctttgtgcagaccacaacctacaaggtgacattaccacagccctgtgcccttcacagactgtctactggaatcacagattctccaccaagtacttctgggtaggggctaagaaaacacgtctcctgctctgtgctcactctacccaaatagagtacacaggaaacccatcccttttgcctgacataagggcaagtgcagtcacttgccctattttattttagtcctctgaaagacagattcagacacagtgttttatatttctctgctgtgaagcagttcactacatcaccctaactccaacggaacatagcaatggttttcctatagcagcagcacacttcattagagttgaagcaaggagaaagtatataaaccctcaccctgggcttgcatatttaaaagaacaccaaaaactctctatgcttgtattccctacctttcttttaactctcttatattccacatggattagggatactccactcgaatccagcacagggggtgtgacaactcttactttggaatatggagtaattggctcctctttgcatggaggcttcagtcaaaagcaagactagaatacatttatttttatatattgcaacagtaattaaaataagaatttacagatgttctaaggagaaacgtatttttgaaagaagttgaaaagtgaatgagggatgcttattagcaaattaaagagaattttagtattatatatttacaaggacatatgtactttaagtccccagaatagatcagtcaatcctattctttaaaaaattatacagaggaatttacagtcacagggcagatgaagcaagtaaaggctgaagcaagaggtatggccagatgactagaaggtttaggtagccatataatttaatgcccaaacctgacactttgagaaataaaatgaagactatgaatacattcagacaacagatgtaaaccagaactgttctgcataaattggatgcctgattaccctatgtgaccaaaataacagttcattcctgactggtagtagaaggcaacaatgaaattgatctctgaagaaaaacagaggtttgcttcaaagagaacagtgcatttctgactggtagtagaaaccaacaaagaaattgatctctgaagcaaaatggaggtttgcttcaaagagaatgctagtgagagtaaactatggatcagcatggggacatggaagccattttatttgtaattaatgatgacagtacttccattttcaacgtttattctggatgaaagatgggacactttacaggccatatttatttgttttttgtttttgtttgaggtggagtttcactcttattgcccaggctggagtgcagtggtgtgatcttggctcactgcaacctctacctcctgggttcaagtgattctcctgcctcagcctccctagtagctgggattacaggcacccaccacatgttcagctaattttttgtatttttagtagagaggggttttcaccatgtttgccaggctggtctcaacctcctggcctcaggtgatccacccacctcagcttcccaaagtgttgggattacaggcgtaagccaccgcccccagcctacaggccatatttaaaaaatcactgtaaagaagtccaagtgttaatggtaaagactcctaagaaaaaacatcatgatttagttactcaaacaaatatagatgaattagtgaaatttagataaactaataaaaatatgagctacaaggagtgatctagatgcccaaatacatgtgtttcacttgaaaaatatttgagaaacttgatacatcagatgtaattaagaaaaggaactaggattgtttagaaatggagcccagctagaatacttggggagggtgtgaagagagggataatgtaatctcttaattgacatgttacttagtcagaggtttttatttagacctatcccttgaggcttttaaaagtaactcgaaaacacacacacacacacacacacacacacacacacacacacacaccaacaaataaacattaaaagccaatctatattcccgatcaatgacgaatttaaacagtgaagactaattgctttcaattaaatatgctcaacaattaaaataccatcagttaactattatataaaccagggatttttaatagtaactaatatttatatgcttcttacatggatttactaatcctcaaaataattctgaggtatgagcaattgttattcccattttacagatgatgaaactgacatataggcaggttaagaaacttgcccaagttcacgcagctaggaagtgatgaaaattcaggattcacattgaggaattcctttgtgtgtatggcgtaacgtgggagaggaaagaagtgtctcatcaggcaatatctgataacagactgataatttgcctcagcatttcagcctctactcaccacaagccttagttaacagctagatacagactatggagtgcagtttatcagcactttccgttgtgcaaacatcagctacttttgtgtgtgtgagacaaaaacatcagctctcttctacttctctcaatcccagctaattctgataaggtcttggaagcgcaaaatgatgtcttctggaacgttctgaaagagaccaaaatctacccacacagcttcatgaggatctgaagccttgcagtgtataaatctttatctttctcatgttcatgtcattgccccttgatatacagttgtctattgggcagacattgttaaaagtaaataaattcttaaaattaaaattaaattcctataaagatctttttttggtgaacaattcatgctggaaaatactaatgaaacacaaaggaagaggaattttgcttgtacgtggtcaatgctattgcattccagaaagaatacgttgaaagggggacttctaaaattttagcatttcactatataataacactttattttttaatatattcaaatttctggatctagtggagttcacaatgaaatatatatatatatatatatatatatatatatatgcacatgtgtcttttaaatattgctgtccctctaaaagaatcagtaggtaaaattatttctgtagtttaaaagttctggctaggttacaaaagacagcaattgttaaacaacttaacattaaatattaaagactaaatgtagcatttaaagcattaagtttaattgtgtctggcttcatataattcagtccttggttaatacaaagttagtatattagagtacaaaaattaatgaagtttcaatttggaaattaaacagtatgtgtttctagacatagaaagatgcctggaattttacctttaggattttatctgtagctggcagcctattaaagctgtttccgcgtgcctttttctcttttgtgcctacgtcaccgatttaaggttcctatttatttatttatttttaagaagaaagaagaggttctgtaggaaacattgactgtatccgacaaccatagcaggactagagaaggaccaatgagggggtgctgggggtagctttaagaggcgaggtggtagcagaaaaggataagaagaaagataattcagcagtcccctataatcttattccacccaagaaatttgggagaatgcgaaaaagcagcagcccagcattcccggatgggcgtggcttttctccaggggctgtccaattgaattccttcagagggagaagattgataagggttgctaggaaacaggagcgtctgcctcccgcctgacccagagattgttctgcacaaaccctctccaggggctcgcagtgtgcagttgagtcgcgagtacggctgagctgcgtaccggcctccctggctctcacactccctctctgctcccgctctcctaatctcctctggcatgcggtcagccccctgcccagggaccacaggagagttcttgtaaggactgttagtccctgcttacctgaaagccaagcgctctagcagagctttaaagttggagccgccaccctccctaccgccccatgccccttcaccccactccgaaattcaccgacctttgcatgcactgcctaaggatttcagagtgaggcaaagcagtcggcaaatctaccctggcttttcgtataaaaatcctctcgtctaggtaccctggctcactgaagactctgcagatatacccttataagagggagggtgggggagggaaaagaacgagagagggaggaaagaatgaaaaggagaggatgccaggaggtccgtgcttctgccaagagtcccaattagatgcgacggcttcagcctggtcaaggtgaaggaaagttgcttccgcgcctaggaagtgggtttgcctgataagagaaggaggaggggactcggctgggaagagctcccctcccctccgcggaagaccactgggtcccctctttccccaacctcctccctctcttctactccacccctccgttttcccactccccactgactcggatgcctggatgttctgccaccgggcagtggtccagcgtgcagccgggagggggcaggggcagggggcactgtgacaggaagctgcgcgcacaagttggccatttcgagggcaaaataagttctcccttggatttggaaaggacaaagccagtaagctacctcttttgtgtcggatgaggaggaccaaccatgagccagagcccgggtgcaggctcaccgccgccgctgccaccgcggtcagctccagttcctgccaggagttgtcggtgcgaggtaagggtcccagaggaggacgtgtccctctggagggcgcccagccagggcgcggaagctcgggtgccgcgtggggcaggcgcagccgggaaagttgaggtagagcatggaccagtccctacagtcctgactggagtgggaagggtggagggcagaggcgatgtgggtgtgcatgagtgagagtttgtgtgtgtgcgcccacgtctgtgtctgggaggagggagatttcagggcatagatctgcggccagggtgcgagaggtgaagggacgaactagcactcgcagaccccagagagaccagtctcatcagccaaccacctccatctcagctctgggctcagaatttgtttctatttgggggctccctaaggctttgtgcacaggaatccgtggatacgggcggtttcatgtgggtgtggaggttgcaggcagaggtgggcaacggtcagcgagacctggtccatgcagcccagataagctccgaagccggaggcggccagaggtttgccctcccgcaagcagggttggaaaggagccttaactcactgccctttgctccttttggcttgagtgaaaaatcgaaaagccagacagggagcatatcttttcatcgaccctgttccattttcttatctgacagtgagataactcagagagggcgggagatttgcgatccaaaaatagactaggtgatatatccaataagcttgtttcttaaggatttcatttaaatttctttctagttattccttgggttatcaaaggtggacaattctctaaggtacaacacttttaggtaaatatattaaggaaggattctcccactttaagtattttagatattgtaaattttgaaaaacaaaactatacacctctaaagatctttggttaaggactcaactaatttgcttataaaaatatttctactatttgaatagtaatagatatgtttggggtctatatgtaggtac

SEQ ID NO: 11379 - DNA, 6000 bp, Homo sapiens
tctacaactgacattcaaaagtaatatagggtgagagtccaaccttataaaataaaaattcaaaatatagtaggtctaattcagcatttttcaagttgaatctcacagagcattaatgtcaagcaaaatattgatgcagtgtaatatatatgtgtgtctatgtatgtgtgtatgtatatacatgtgtgtattccaagtgtgtgtatgtatatgtatattccaaatgtgggaaatactaaataagaaaaaagtttaaaagggttcttaagctcagcaattctcagagattatattaggctaatgtgaatctccaataaggacacagaatatggcctttttccaaacttatttgaacaaatttatttcacagaatgcctttggagaagatattgtatttcacagaacacagtttggaaaatgctggtctaactcattagtgaatcccagcatttaagcccctagcatatatatcctggtatagaaaactatgttaaataccgagcaatcatctggtgtgctcccagaaaccacattttcttctacaattttttcagtggacatgatcacataatgttactaactggaagtccatggaccttggtcagacacaagccccactctggcacttactggctatgggatcttgtacaaattacttaattgttttgagccttcaattcttcatcaatcaaaaggagataacatagggaggctgagtgggaggacagcctgagcccaggagtttgagaccagcctgggcaacacagcaaaaccctgtctccacaaaaaattaaaaaattagatgggcatgatggtgcatacctgtagtcccagctactagtgaagctaaagtgggaagactgctcaagcccaggagtttgaggctgcagcgaactatgatcctatgatcatgccagcttgggagacagaatgggaccctgtctctaaaaaaaaagaaaaagaaaaaaaaagggataagataattagtaccttcctcaaagtttaagcaacacaacgtatggatacatcgtgcaaaataacaccaagtatacacagtaggtgttcaaaaatatagtcttaacctgtgttaatctctattcttcaacaaagacaattcaagtcagccactcacaagccagcaaaaaagcaactcacctaaaagcttaagatccttcaggttgggttgcacatggagcgttcacctaactgcctgtgtgtctgtgtacactcaactatatgtaattggaactggatctccatccctgctaattatccacattcaacctgacataagcagtctggagaaacttcagaagatttgggaaaggcctgataaaacaagatctttgatatgagaaaacttgactgagtctgatgcttgacaaagcagtatcaaggaagaattgggttatgtttatagttttgacctaactgaaatatttttattaccaagttcataatagttcatacttacttagtaattttgatctgtggatctcaaacttttccacatcttgagaaaatattacattttatattctgttaaaatacactgctcatatttgtcttctaatattttgttacccattgccttcattacctcccccaacagacctcctttcatgaccctggttattactgactaaaactcggaattgtttctgattttagtaccttcctctgtattacatagttttgataaattaaatattgtatttgtataataaatgaaaatcaagtttgttggttttttttaactttgaaagacaactctcagaaaatgattttttaaaaatgttataaggtcttttatttacacattctattgagggagaacttccacagaaaactaacttttaaaaaaagataaaaagaactatagctacttaaaataacatacaaggattaaaataagcttctaatgaaattcaagccaaatagggccatttaaagtgaggcacatcccttaatatttctggatccaatattcttaattgtagattgcagaaaattaactcatttctcgatgacatttttggttgcttccagtttcataatctggtaagaatgacattttttctctctctctctctaactctagctgtacttctgagcctcctcgtagtaaacttcactgtcaggtgaaacataaaacaagttcaagaatttcagtagaacaacttttgaagcaagagagtgtcttctactctgagaaacagaactgagtgctctgccatatctctgtgccccaaccccttaggggagaaggagaaggatttggagtgatggtagggatggatggatgtttaacacgtgatgcttcttggtaattaacacatcagaataaattcacttttcactcagcctagtcagctcgaatgacttgagagaatagaacacaggacaggttaaatctttccaagacaggagtgataggagagagatggcttgataaagttcctaaacatgggatactatcagcagaggaatgagcatcagagtggaaaggctagagaaaaagtgtccctgggagcctgggggccaggatgctagagtgaaaatgaacacttattgaacggttcaaaggacttcagagagctgtgcttcccaacctccttttcaatatcaaaatgtgtcataaattacagtcaacacacgtacacatgctcacataattgtgcatttagtacctgttgctttaaaaaaatgctagcaatcaaatactttaaagcaaaaatgcattttatgaaggtactgcttatataaacatttgaaaaacaataacatatgtatctgagacaaacagatgtcattttgctttagcaggtaaagatatgactgcaccttctttatagacaccaacatgctgggtagtgaaattctcagagacttgttagcatgtagtacaagtaacacccatctaagtagtaacctttatgtgtagatgaatgttaaagcttcctaatgacagcctgcctcaggtgccctctttcagtcaccctggaatcactccctgcttatgtggggaaagtgaccttcaatagttttctattttctgtataatttggcccaaacgttttagtctggattaaaaccttttctcctgcctcccctcaaagtgcctcagctacactcacctctctggcccccttcagcaattcaagtgaatttgagctttaatcttttgcaccttgcacctacctctccgtcagaaccccatttcatctgagctggttgctttctatgtgcctttttggctttgggatggacactgtaacaagtgatttgcatttctgtgcctcactgtactatgcccctctctaaggctggcacaggtctccttcattttatactctacgacctaagagtgcttatagcacaatgggtggttggtatctattaaacaaatgaatgtgtaaatgaatgatagaaagtaattggtgaaaagtacgctgagatagagtctgatcacaggcaaaaaaaaaaaaaaaatggaagaattaatagtccaatggcacttttcttataaaactgaattacatagtcaaaccatcatttaaaataatcttacaaggaaaacaacattaatgtgcgtctgttgagacggattatgctgttttggaattaggaagagaatgtgcagttcgctgtttgctttcagactgtttgtttgttttgtttattaaactggcgtctccagctctgcagcccagcctgtggaacctaaatggcccaggtcccaggagttcccatcggagccgtgggcgtccccagggtttagaaaggctccccaggggcccaagctgccggcgagtgcagctcccgccggcgccacctctgcggtctggagcggcgaggacgatcccagagaggcgcccccactgcctcggtcgtcgggttcttaagtttttctctccaaaaatttaatggatagttttcttttgcttctgtttctgacttgattaaagaggcggaaaaaaaggagtttgactccaagaagaatgatagtagcagaaggcgcatctggctttactttccaaattccatcaaagtttgtgttttgtttcatttgacagcgatcccgtgaacgtctcctctggggaaatggcgcgaccaaagcccgccaagcccagcctgcgaactggaggatttattaatgtaatatgttaaacaaaacctcgacagacacaaactcaaaggaaaccgtgcgctccttaagtcaaaggcatctgttctggaagcagaacccggtttgctgttggtaaccagcgttaagagcaggatttttaaacatgataatggataaaataaaagaaaagcgaagtcccgcggtcctctgactcctattcattatctccagcagcatatgggaccattctcctacgtatcctcgcctttttcttctgaaaaagcaaaagcaaccaagcctgtcccgcttcagagcaatcctactctttgtgcctgagtagtgccaccaccactacttcctcctcctcccgcctcctcctaccccgccctcctgccgctggctttcgctctggcgaggaggcggccggctccctttgcgccgggaagccggagccgcgattgggcgacggtccctgagcctccagttctgcgtcggtttcaaggctcctccctcctggtgaaagacagactacggggcgcctggaaaccggtccgagggcgcgcgaggcagaggagagggagcgagttgagggattgacacaaatggtcaggcggcggcggcggagaaggaggcggaggcgcaggggggagccgagcccgctgggctgcggagagttgcgctctctacggggccgcggccactagcgcggcgccgccagccgggagccagcgagccgagggccaggaaggcgggacacgaccccggcgcgccctagccacccgggttctccccgccgcccgcgcttcatgaatcgcaagtttccgcggcggcggcggctgcggtacgcagaacaggagccgggggagcgggccgaaagcggcttgggctcgacggagggcacccgcgcagaggtctccctggccgcagggggagccgccgccggccgtgcccctggcagccccagcggagcggcgccaagagaggagccgagaaagtatggctgaggaggaggcgcctaagaagtcccgggccgccggcggtggcgcgagctgggaactttgtgccggggcgctctcggcccggctggcggaggagggcagcggggacgccggtggccgccgccgcccgccagttgacccccggcgattggcgcgccagctgctgctgctgctttggctgctggaggctccgctgctgctgggggtccgggcccaggcggcgggccaggggccaggccaggggcccgggccggggcagcaaccgccgccgccgcctcagcagcaacagagcgggcagcagtacaacggcgagcggggcatctccgtcccggaccacggctattgccagcccatctccatcccgctgtgcacggacatcgcgtacaaccagaccatcatgcccaacctgctgggccacacgaaccaggaggacgcgggcctggaggtgcaccagttctaccctctagtgaaagtgcagtgttccgctgagctcaagttcttcctgtgctccatgtacgcgcccgtgtgcaccgtgctagagcaggcgctgccgccctgccgctccctgtgcgagcgcgcgcgccagggctgcgaggcgctcatgaacaagttcggcttccagtggccagacacgctcaagtgtgagaagttcccggtgcacggcgccggcgagctgtgcgtgggccagaacacgtccgacaagggcaccccgacgccctcgctgcttccagagttctggaccagcaaccctcagcacggcggcggagggcaccgtggcggcttcccggggggcgccggcgcgtcggagcgaggcaagttctcctgcccgcgcgccctcaaggtgccctcctacctcaactaccacttcctggg

SEQ ID NO: 11380 - DNA, 6000 bp, Homo sapiens
aagtcaagacaatgtacatttcctctaccacttctggggctctatgaccatgaatttcatctaatccagagtctcatttgtacaagaagtattttgtaatggcctgtttaaaaccatcaatatagtgaggctaaggcaggaggatcacttcagctcaggagtaagtttatggatctatggatgggatacaactcagaaatacttctcctactcccgccctcttcttccctgatcagcctgggcaacatggcgagatcccatctctattaaaaaattaagttagctggacgtggtggcgtatgtctgtagtcgcagctactcaggaggtgaggtgggaggatcactagggcctgagaggtcaagactgcagtgagcagtgattgcaccactgcactccagcctgggtgacagagtgagaccctgtctcaaaaaaaactcaccaaacccatcagtatggtacctgtattagtcagggttctctagagggacagaactaataattaaactaaataattaaactaattgtttaatttatatatatatcatatatatatgacatatatatgatatatatataaagtggagcttattaaggagtattaactgacacaatcacaaagtcccacaataggctctctgcaagctgaggagcaaggaagccagtctgaatcccaaagctaaagaacttgaagtcaggtgttcaagggcaggtagcatccagcacaggagaaagatgtaggctgggaagctaagccagtctagccttttcaccttcttctgcctgctttttaatctgcctgcactggcagctgactagattgtgcccgcccagattaaagatgggtctgcctttttcagcccactgactcaagtgttaatctcctttggcaacaccctcacagacacactcaggatcaatactttgcatccttcaatccaatcaagttgacattcagtattagccatcacagtacctaaattatatttataaaatacaaaaaatcagcaaattatatagactaaatacaatatgaaaatattcaccatgactatacataatgaaatagatttatgtatagaattaccacggacatagcagccgagaatagatacacatatatcaagcccatgcctacatagagtgatatgattttctgaaagagaaacaaaaattattggttaatggtcttccttttatttatatgcattattgtaaaaagtgtatataataaccaagaaaaatattttgtttctatgtaaaatgaagtgagtttcaaggttcaaagaactataaatatggcttttgcatatgtggaagcctggcatatctgacagtcatgctgaatgtgtcacatttcatcttatgctgcaggatcccagaaaatgcaagatatctgacattccttatccatacccacaaaaattatggaatactgttataaacaagctgacatattttcatgagggcccctagggggcagtattgcccccattgagaaccagggatctatggatgggatacaactcagaaatacttcccccactcccaccctcctcctgccttttattggaccttagatactctgatggtagtgcaggatggaggaagaagtgaaagggcaaacatctccttaactagggtatgctttcccccaggctggctgtaatagcagtcttagcttgtttgtctatagatcttcactcttccccttaaattttgactaaagttggggtggggatgtttggcaatagggataataatctgacctagtctcttaggacttttttgtggagaagtggaccaacctgaaagcttagaatatgaggggcagctttagtgctatttgtcatcaactccggactttctatgtaattctggggtatgaagaaagaaatccactcctttacactagtttgagagagacgtgctggaatgaaaaacacctcagttcagacatgctggaatgaaaaacaaacacctgtattgtaacctcagctccactgcctctcattgtttaatttagggcattcaaactccctggaatgcctttgcctcatctgcaaaatggaatagggagtaaagtagatgatattaaatttgaattatttgaaccattgacttcaatataacactaaacatttggaatctccatgcagacaatattcactgttcttctttgtgtccttgaaataagtgaaaattttggtcctctttttttctcatataagacctgtgccatcaaatttggtaagaattctagaatcttctaataatatgtttgccctaaataaagtgttttaaatgtttaatattattgagcatggtgaatcacagcattttagagttaagaaatcatttattgataaaatgaagttagaaaaattggatgtttttctatgtttaggtaaatgcatatgacataggttaggtgactttgtcaatacttcctgatctcttctatataccaaacaatatacagaacaatagaaagtaatgaggacgtaaaagtcatgcaaggtatgatctcccttgtaaaggctctaaaaattcactgtgtcttcggttgggtttgctagaagcaaagcctaagacaggaattattgggtaagaaagttttccagggcaagctctcaggagaaactgctagaggagtaaggctagggcaagaggagaagttagtcaaaagtggtttcagaagtctagcatcattctaaacccatggaaaggctctggaagtttctcagttacaacaaagtttttcagcccagaagcaagggggctgggctgataggaccccacattagccagccttttgctccaagtcaacctcaggggtcagatgggagcataatctcccaggcatcatcaggaaaagtgttgcccatcagacaagagccaacctgagcaaaaggtttgcccttgacagtcaacacctgcagctgctgcggactaggtatcttaccctggaaaaaaaggagagctgggcagtaacatctggaatgcatgatattaaaggagtcaaattatgtacgcatgatctcctttaagtgtatcagtaatatcacctatcttctttagagcacctataagatcacatacattatatggcaagggccatataagaaagtacagtttgaaattctggaagcacaacaaagtgaataacaccagctaacacgtgcaagtgcttgctatgtactacacgccattacaaagtccttacctatgttacccccatttaatactctcaacaaatctacagggtaggtaatattattgcccctatttccctgtaaactaaggcacaggcaggtcaagtaatttggtcagtgtcacatggctagcaagtaccagtaaacgattattttgttggtaagtatatgagagggcttcctggaatagagaaaatgaaattctaaacccaacacaagatctactaaattagaatctctaaggttggactcataactttaacgagtttcctaaagtgatttctgcacacactggagtgtgaagagccattacctaaaggaattaaaagttttccaaaatgaagaaaaattgtgcaaagaacaatgtcaaaaggtaaaaatgatcatcaaaaatacttaatgaagttttatatttagtctaaaagactgggaaggaagatgagaataaaatttgggttcccaaatgcaaaacaggcttatacaggaagaaataacctttgtatagtcatagtgtttcttaaagaacagaatagcaaaaataaaaacataggacacattgggctcaagtacccacagtgtgttattttctacctctatgttggcctatgtagacatttgtcccttaaaattatcttaaacttgagaccatcctggccaacacggtgaaactccacctctactaaaaataaaaaaattagctgggcgtggtggcatgcacctgtggtcccagctactcaggaggctgaggcagaagaatcgctagaacccaggaggcggaggttgcagtgagctgagatcgcgccacttcagtccagcctggagacagagcgaaattcctactcaaaaaaaaaaaaaaaaaaaaaaaaattcttaaactactacttatccggagaaaaacaaggtattttaagactgggaagggaaagaatcttccttcaatggttttggaaatgaaaacaccatttaaattcaaggaaataagttaattgctgatagattattagcagagtattttcatgtagatgtaaaatgttattttgttctctgaaatagtatgtgatctatatacacttacttttataataatacttcattacaaaaattggactagggagaaggaggagacactataggtacaatgccatttggctacactgaaatctttcccaggcaatttcataggactatcaccagctattgagccttcttccccattactcactggtctaattggggagaagaggaattgcaaagagggcagaagaaagagtctgttctagtaggaggttattggtagatcagacttgctatgtcccctttagcctgctaaattttctcatcattgttaccagattcattgtgacagttacaggcaaatttcatgtgttgttggaaaaacgctcacaagtaatacgctagtttatttctgattaataagactgtttactatatttccattctacgggtacacatttaaacaatccattatttataatgaaattatagtgatactttttatatggttcccttttaataccaggttaaatactctagagatttagggaattaatggaccgtcatccaaatgacctcaaattaagttaaatgacataaaacataggtggagggttttggaattgaaagtaaggattggaaaccccaaattttacactatacaaaagaccaggggcaaggaggcgctttaagtattttagattatatactgacaaaactcacccctcccaacaaacctgctgaacaggtgtttggagtcaaatgcttgacttaatcatattagtgaagattaggaagaagctttaaaatcccaaggctagtgtgcattgctagaattgttaagagagagagctcatatgaaattggttatcgtgggatatttaaaataaaacaaagaacagtttactttgtaagttaagagctgagggaattgttggctaagactgacttgaaataactccagcaattcatgcatagctgctaaccttctacatcttcagcaggcaaaaagatgccagtaatcaatattgaggacctgacagaaaaggacaaattgaagatggaagttgaccagctcaagaaagaagtgacactggaaagaatgctagtaagttgctgctttctttagtattttattttaagctagagatactgtgggagtaccaggttagaaaacattggctggaaaggctcaatgtagttacaaataaattgttcatctaaaaatttatcaaagattaagaaaattgataatcaatcataactatctcttgatttagattctaaatcaaggaggttggcaaaccattttcctctggccaagcccaatccttagcctctttttgtatgaccacaaagataagaatgctttttcatttttaaagagaagggaagaaagaaagaaagagagaaagaagagagagagaaagaaagggaaaaagaaggaaagaaagaaataaaagagaaagaaaagaaaaagagaaaaaggagaatatgagacaaaaaccatattttagataagcaataaaataaatatacgcatgcaataatataggcattttgtttttacttttctaaacttctttttataatgcaatattttgatattgatattttgatacaatgttttgatattgctgcaatactttaagctatgatgtcaacccctctccactgtcatggtcagtaatacataagtacattctactcttctttggcaaataaagatgagttcaaacataagaactcactggttcctcctacaaacttctg

SEQ ID NO: 11381 - DNA, 6000 bp, Homo sapiens
aaatgtcctctattattatacttcccgtggacattttcccaccacctggaatttggtcatactgatccctccacctgagatctccctccactccaccccatttcagccttttgaaatcctactcttcttatgagactatctctcccattctacctcaagagtattttgtgtgtctcttaagtcatttaacgttactttactttttctcattataatttctacggttgttttaatttcagtactacattggagatttcccaagtcagaagcactgttcatctttgaaaagtgtcatatcaactaacaaattgtctggacaatgtaattgactttaaaagcaggcaagagtggtgcttataaaagtttatattggatcaaacttcctaaatgcctcaataatgtgtttacatgaggaaaatagtaaactaagtaatgagaatgatcagttatatatgatgggagttaaagtaatatagaaacaaaattggtaagagaaatcatttatttttatttgtattttattttattttatttttttgagatggagtcttactctctcgcccaggctggagtgcagtggtacgatcttggctcactgcaatctctgcctcctgggttcaagcaatttcatgccaccacacctggctatttttttttttttttttttcagtagagaagggatttcatcattctggccaggctggtctcgaactcttgacctcatgtgagcctcctgcctcagcctcccaaagtgctgggattacaggtgagagccaccactcccagccagagaaatcattttgatatcctgaattataagtagttgctaagatactcagagcatcagacacagatcatcctttgacttggcattctcttcatctagaaaaggaatcttagggctgggtgcagtggctcacgcctgtaatcccagcactttgggagtcctaggtgggaggattacctgagatcaggagtttgagaccagcctggccaacatggtgaaaccccgtctctactaaaaaagaaaagaaaaaaagaaaaacaaaattagctggctgtggtgacacacgcctgtaatcccagctactcgggaggctgaggcagcagaatcacttgaacccggaaggcggaggttgcagtgagcagagatcgcgccattgcactccagcctgggcaacaagagttaaactccttcccctgcccaagaaaaaaaaaaaaaaaagaaaaggaatcttaggtaggtagttacaggaaacaaatgagctcctgaaaattgcctcatgattgttttaacagattaaaacaaatatcaaatgaaccaagagcgtctgaagtgtactttctttaaagaaaccataatttcaatggtcaaaacagttactatgcactttttaaatttatttatttatttatttatatttatttatttttttgtagagaccggggtctcggtatgttgcctaggctggtctcaaactcctgaacctttggtctcaagtgatcctcctgtatcggcctctcaaagtcactctataaattttagaagagcagactttgaaaggtaacctagtttacttacacgaaataaaaaagcagaaataatgtgtttcttgcaaaaatcacaagataaaataagaccagaatcctgatcttttttgagttcaagttagtattagctcaattccagtttaactgccttcaatgttttatttttctttatatagatttttaacaacataacaaatcacaaaaattgtcaaaaccttgtttttcctatttttgcataccaaagtaaaaatttcatggttgttactcttttataatttaaaagtgaaaatggttacttttatttttattaactaatttctataaaacatttgtgaaacgacagtgggctaattaatcaaagttcattgctggttgcacctgtcatttttactaaagaatggtttctactcatactacttgtaaaataaattttaccggggtactatgtaaaatataagtaaaaacctaacaaaacatttggacacagctaaacaaattttaaaatttatttattcaaaatttttgaatattgctgataaactatttctgcaagtatacatgagaaattgcttaacatggttcttctctgggaggtaaattcggtgtctaggcatagaagactacacatccttttgtttaaaaaaaaatattctcatcattttactatttaaaaccaaacagggccaggcgcggtggctcacgcctgtaatcccagcactttgggaggccgaggcgggcggatcacgaggtcagcagatcgagaccatcctggctaacacagcgaaaccccgtccctactaaaaatacaaaaaaattagctgggcgtggtggtgggcgcctgtagtcccagctacttgggaggctgaggcaggagaataacgtgaacccaggaggcgtagcttgcagagagccgagatcgcgccactgcactccagcctgggtgacagagcaagaccccgtctcaaacaaacaaacaaacaaacaggaaaccagcaacaataaaacctttttcagaatcctgtgtgatcatgcaatttcaacattttgcaattcacttcagtttaatcaatttacttaagatattagaatatgaattatttaataacaataaaaaagactaacaagtattttgtttctaatacgtctcataatacgatgggaaaagttaaagaaccaatatgggcttataagtatttatccctctaagcaactagatgatttcatgggaaagaaacttcaaagccaaaataattatatttttatgacttagaacaaacacacattaacaaaaaattagtcaggcgtggtagcgggcgcctgtagtcccagctcctccggaggctcaggcgggagaatggcgtgaacccgggaggcggagcttgcagtgagcggagatcgtgccagtcactccagcctgggcgacagagcgagactccgtctcaaaaaaaaaaaaacaaaaaaacaaaaaaacaaaaaaaagaacaaaaacacaataatttatttaaccaatttatttaacttaggtgctgaacctatttaatttaggccacattcacgttgattactttcactaatttaaggtatttttgaccaaccttttaaatttaagtaatagaaaattttaaaaatgaattagtgcacaagacagatatggacatttgtctagtctccctgcttatttacaagtaaacttcagtagatgctctaactactctgagcttggaaaaccctggtatttcaaatattgaaagtgaagctcttaaacattttctttgtgaaaatgatttatcatatatagacataccaacacaattagagacacaacatagcttagctgattcactacttccctgccttactatacattttacaaattagaaaaccaaaactaagaaaaattaaatgacttcttcagtgatggcctgtggcagagctgcaactacacgccaggagtattcattaagtggttcattgtttttttcattctaatttattcattgaggttgagcggagcgtggtaagaaactaggaacgaacaaaaactcctgcttcctaaacagggaatggtcatgggtgtcttgggtcagctactctgaaatattaagttaatatttcacttgcctttgactctgtgaggcaggaggttatctctggaaagaaagagaaatatccaactgctagggaaggtttcttacattcatgtttgatttttcttctactcttttgaccaccatcaacaagactttagttacagttaaagggaaagttttattgcatgtaaacttttttcacatcggacacttttcctggctttccagagcaacagctagataaatagtgcttgccagaaagtggagaaactaatactaaatgaatccactgcctacatccaggaaggttcaggagccaggaattcaaaatccttggtgtcaagtgtcacccaaaacttagggttggggagtggagaaaggctttcggttaagaactctaagattcctgcttctgtcttctcttatatcatcctttgatgcacccctctacataacattcccccggaaaaataaaaaaaatacaaactctgctgctgttgaggatgcagatgattatttaataatagaaaatgttcttgcaacttgtaaacgatattcacaccctgttgccccctcctcgcccaaaatgtataaacccatattaggcctcgaacaagccggatggacacaaatgagcagaacactggtgggtatttctgggattagggctaagcttcattttcttttcagccttttcttaagcgtccgcattctccactatgcatttattacgttggtgcaaaactaattgcaccaacctatatatgtaattagagaaaagtaattacttttgcaacaacctatgtatgtaattagggaaaagctatatctagcatatttttaaaactctttgagaggtgaagggtagttatttcctgctgggtagtgtactccttttcctagcttcacaaacaaaacccggatgtgacttggaaacggaaaaaaaaaaaggagcgggggtgcgcggagaacacaaagtaaaacttctgctgttcccagtcctgcagccccagcccagccgtcccccgcgggcgtggcaggtcctgagtcagggcctgtccgtggccagcatccctgctgggcgattgagcagcgggaagctgcttggacccagtctcaaacttaaccctcatctagcacccgggcaggcctcctgggttgcagggacttgagaaaaggcagagttctcaggtcctaggaagctggggcacgctggcgtgacaagcgtcccggagaaagccaagccctcggggagctggggaccgcagcagggctgcagtcacatcctgcgcgggtgggcggcgggccaggccttcagttgtttcgggacgcgccgagcttcgccgctcttccagcggctccgctgccagagctagcccgagcccggttctggggcgaaaatgcctgcccttcacatcgaagatttgccagagaaggaaaaactgaaaatggaagttgagcagcttcgcaaagaagtgaagttgcagagacaacaagtaagttggctgttccggaatatttccttctctgaaatgaagcagggtccgatttttcctgcttagtaacagtaaagcaaatagtttagcttatttttccccctttttgtagcttctcttctcaccaccctttggcagtgcctggggactgccagctgatgtggggaaatcctaggaggtagaggagggagcaaggatctgataagtaatttaaggccaaatgtcctaacttttaagatgcctaggaaggggaaaatagacaagaaatcttgctttccattagacagctgtttttcaaaactcacttgtaggaaaaaagcggatagctacttggttctttgatcttttacactactagaaaggatgatatttgaaagaaattttctaaaaccgtattttaaagtcttacaagtacattatttaattttgaatttcaccagtggccttcagtgatatgcaaagaacagtccaccgaaatttgggaacaaaatattagaatttctatatttatttgtaaatctcatccctttataattttcactttatgttttattagtatgcgattaatacagtagtatctgtacttatttataaataattatacatacactgtggtgcatatgaaaaatttttttagtgatcacaattttaaagttttagagactattgatagagattaccatttcattgagaacatatgacccagtattcaatattctccactgaaacgtctcgggagttttataagttttacttcaatttcttactggtcatcaagaccttccttcagacactaatccctcttcctgttttaactcaatcaggcatcctgtagactaggaaaggtctttgaatagatattg

SEQ ID NO: 11382 - DNA, 6000 bp, Homo sapiens
ttagtaaagttgcaggatatgagttcaatatgatcctaattacatatactaacaataaacaattggatttttttaaaaaattaggtgctacttcaacagtactgaagaaataattaaatacaaatctaacaaaatatgtgcaggatctgtaggccaagaactacaaaatattgacgaaataaatgtaaaatgccctaaaaatagtagagatactatgttcataagttagaagactcaatactgttaagatgtcatttctttccaaactgatctacagattctctgcaataccaatcaaaataacagcaggactttttatagatattgcacccctaaacagagatcagaaggtaggagtaactgaagaaacactgctgaatatacctggcagaaagacaccagtgattacagtctttaagaattattaattaaactcttaaaatgcattcattttcccaaatggatgactcaagtagtatagtggatgttactgagtttatagtagaactacagcctatagtaaaactctgccattctcaggctctttatataaagaatggcagccttcttacaaaaatgttatgtatctaactagtatcaataacagagcactagattgtagacagtcagctatgtcccccagcacagcataagagtcataacagcacaaaacaggggacttgacacagctttgttaaatatgtaatctagttgatcaatggacttggcctcaggacacaaaattaatttgattctgcataacttaagagtaagagaattatgcaaagaaaaaaaggaagcaagagaaaagagaaatcaatggggtgatggagcacaaacatggctatttgtgtagttccttgatgaaaatataagagaaaaacatcaataaaatccataatatttaggaaggcaaagagggatagtaagcagtcaaaacagtaaaccagaaaactggacatgaaggtaataatttggacaaagccccaaagtagacatgccaacagttgtgcaacagagggaggataaattgtaataatagtcacaggatccaaagtgtaggtatggatggaaaaatggcaagaaatgccatgtatttacttttataatgtatgtgatactggcaaatgacttacaaacacagtgtgaaaaataaaaatgaaaaaaacgtaaatgcccaatttaggtgaagtagggaaggatgggaaagaatggctttggattttctatctgttaagtgtatgcaattctgatgcatgtgctttatcaaatataatcagtattcagttattctcatatagaaaatgaatcaccaatgttgttgattctctacgacttctgctactccccacttgatggaagttcagcagatggtccatttctatttttctgataaagtatttgttgtgaaagaaatgtaaagttgagaagccaaataaaatctctgaattggcattaaagcaaaataaaccttttttctatgggctccagtatcagagagagttcaaggtttactacgctaagtatccactgaaaaaggacccttgtcgcaatacagcttaaaactgattttcagcaattaaaaattgtttgtacatagataccttaaaattgtttcaaagtactttcagttatggtgaattccaatatttcacaaagctgagtttttatttacaaactcagagaatcttcaaaactgtggcatcagaactagccacaagctgggtaagaatgatttgatatgaatagtacaatgtaaatatacaataaattactctgtcatagtcacggttgtcaaaatttaagaaaacaaatacataaaattagttagagacttcccataggaggaattaaaacagatatgcaattaaaatatttataactaaaaagaaaagcacgacttttaaaaaaggattttaattgagctgtattttggggttagaatcatatctagtgcttagttattattaggaagtcaaactgctctcctaggttagtatataaaggttatattaattgcacaaaatatattaaatgcacaagtgtgagtgttactacggaaacaaggatcttcataaattgataatctgaaattattattattttttttttgagacctagtctcaccttgttgcccaggctggaggggtagcggtgcaatcgcagctcactgcaatctctgccacccaggttcaagcgattctcattcctcaacctcgcgaggagctggactagaggcttgtgccaccatgcctaatttttgtattttttgtagagacagggtttcaccatgttggccagactggtctcgaactcctgacctcaagtgatccacccgcctcagcctcccaaagtgctgggattacaggtgagagccactgcacccggtctgtaattaatttttttcatgaaaataatataatctgattctcaatcagtagttgagatatttgcatatttgttaaaaacaggggaagttggaattaccttgttaagatttcggcataccttgttaatcaccaatttgtggtttttaaaaaggaaataaaattatactaagcactgtacacaataaaaaaagtttgtgatatcttatttatccttggagacaagttactcatacagaaaataaagagcactgtctgtgctcgagctaccattatggctcagaaaccccagattttgtttttttgaaataatctgaatataacttgaaaacactgtctcacaaagagttaaacaaagcacaaaaatatacttcaacaaaaggaatcaaagttgacccaaaggatgtttgacttgccaaaagttatataggtaataaatagcaactaaatctagattatccaattctaagtcccaagaccttcataattttccaaagagagaaggccaaccgcctagtacagcgtggtttgcagttttaacattgactctgctgctaacttaccttgaccctttcaagtcagtaaatttctctgtacctttgtttcttctacttcatggggatattctgatgataaacataagcaaatacttgaactctggcagaaaagcactctgctgtgttaataatctcctcatccccatcacatatttccactgatgctatgctttctctggtcttagttttaagcttaaatgaatgtgtgtgctgtggtgtgtgtgtgtgtgtgtgtgtttcggtgtgtgtaagttttctttataaatggctggcattctagcaagatccttttccccaactttcaaaacgcatgaatagcagcacaacattttcatttttagaattaccaaagccttgccacccaaagctgtgcagaagattttagaaattcacaacaaaattttccaccatattactctcaacttctatagaaatgcaactcacaactcatattggtcagctattcccctataaagattcaacactaccagtggaagattataaaaatgcatacggcttttcaaataataagagaatagttccaattgcaaataaaaaccagtatacattttgaaaaatgaaggtcactaaatattcctaaaataatggaaacaggtgataattaacattctaacagtttagccacatgtaatgtcctctattttgtcaacagagtccagctgttttatctacttaagtctaaaagaaatttatcctcatcattaaaaacaggaacttatttataggtaactaaaattaacagaaatttaattttaaatattttaattttatttttaatattaaatttaatttaaatttaatttaatttaaaatttttaatttaaatatttaaatatttaattttaaatattcagtacttgtaccattattttcattttgaaaatgtatctatcttataatgatttggctttataacttataaagacatgtaacttactttatcctttaaaataatattttactaacaatattagcgtgtagctacatatcatatttaagaaacagcaatctactaagaaatgtgcccaggtcaaaaatagaataagccaattgaaataaaatattatagcaaatgatcagtatacatctaccaaataaaagggttatgaaaggtgaagaccaagtagtaatctccaaaagtaatacaatgattactgattgaagttttatacccgagactaagctactataatgaaatgtttaaaaaatattttagggtattatcaccttaggtcaatctgattattattttgaatgaatgaatgaatgaaatgaatgaatacccaaatgaatgaatactgaagtcatgacaatgtttaacaccttgagatgctcacaacaatttggaatacccagagaagatgacttgaatacaaacaaactatttaaaattcactgtggctcacagtaaagatgcagtgggtttctatttgtagaacaaagaatctcaatcaaaaacctatatatgactaaaatattctcaaatgcaattatcaaggctttagaaagcatatatactttttactatgtaattctttcctgttcccccacctccctgcatttttttttaatgtttggcataagtgaccaacaaaccagaatagaatacacatttttaaaatactaatttacacatattctatttaagaacaacatacaaccactcataaatttagcctttttaaaagtgtcctttatataaaacagtggggagcgggggaaatccctgctatacatatgaagcacagtttaagcccaatacaactgaccaatcaaaattagtgaatacactgcatctctctgcagtggagagaagcgacaaggtaggctgtcattctgcaaaagctgcccgaacaggctttcctctgaaaagcagtgccgttcctttttagaaagactgaatctaaatgttgtctctggagacaagaagccttcagtatgttaaattactttcattatgtattttcagatgcttattgattccacagtaggaagagtgagagactgcagcagcctctaagcagcactacatgttccatacattagcagtactgctgaaacaatggcacactacagacacatattttcattaaggtcattttcgaagagatgtttatgaccctcttcccccagtcctctactaacaagtgaacaaaatgaatcaatccaaactggaaatgcttcaactacatcaagaatttatcaaatctttagcagaggtaagatttgttcctattatagtatacagctgcttttgaaccggcatagtggggtaaaaattactttgaaaaatttcagcctaaattttaagagtttgtttaattctacttattgctagacatgtattttaagatctatttcttttaagacatgctacattttaaatgtaattttttaggatgcattgttaaatacaaatattctttgtaaattcattatgaagacagcttttgagtcacttcagatatactaaatattcttaatgtaatcagtacagtttttctccagtgtttcaaaaatgcttctgtttcttaaaagaactaggtttactattttgctgttacttattacttaattttatgttaagtttattatttggcatgttcactgaaaattaatttgcagttacaatttttattaccttttgtatttcaaccacatgaacaattcatcaatggaaatttatagtatcttatgaaatctgttttaatgagttaaaattcaaaccatgtgctaataattaggcaagttacaatatttttagagcaaaaaatgttgttaaatttattacaaagaagaaataacagtatgtttagtgtatgctaattgttcatcatctctgaaaatacaggttagcttctaaaatgagagcagaaattagttttaaaaaatatagcttttctctcacaattgtatttgaaatgtgaactctattgttaaataacataatatatacaatctttattaggaaaaaagacttatttaaagaaacaattttatgcatatagctgtggctctaataataacagtttggt

SEQ ID NO: 11383 - DNA, 6000 bp, Homo sapiens
taatttttatatttttagtagagacgggctttcaccatgttggtcaggctggtctcgaactcctgaccttgtgatccacccatcttggccttccaaagtgctgggattacaggcataagccaccgcacccagccgtatttaattattttagatgctattgtaaatggtattactgttttaatttccctttcaggttattcatcactggtatatagaaacacaacggataattttctcatttttgggagggaagaaattgaggctcagaataagttgctcaaaggtgcatggctagtaaggcccaactcagggctcttaattctgaatctatcgtgctgtctctctgaagaggttgcttattgggcccctttaccattttgccctttccctttgactcaatgctcttaattgcaaaataggaagcactgggaaaagaaagaactggagcacagccgggtgtggtggttcacacctgtaatcccagcactttgggaggccgaggtgggcagatcacctgaggtcgggagttggagagcagcctggccaacatggtgaaaccccatctctactgaaaatacaaagattagctgggcatggtggcagaagtctgtaatcccagctattccggaggctgaggtaggagaatcgattgaacccaggaggcggagtttgcagtgagttgagatcgcaccactgcactccagcctgggcaacagagcaagactccatctaaaaaaaaaaaaaattggagcactgcaacagttatgttccgaattttgccagtgtaacaactgaaccacaggaggcagccatggtctcagtgatacccatggatacgttcacatcaaccctctttgactggagggcccacaggcaaatgacagtcaacattgaatttgtgacctcaaaatgccaaaatactttatgagaatgactcagaaatcaagaagctacttgtaacaaatcaagtactgaaatgcattgtcaacacaggacagcctctcatccctgagaaaaggattgtgttaggacatgcagttgaggctaagactcttgaggaactgggtggggtgtggctcaggcttgcttgggagagaagcactttgcagcctgccaccaggctggagacctgagtgtgccaagtcactctgcgtagtctaacagacactggcagtcttgtatgtctacaggaggggatgcatgaactttctccaggaacctgaataccattcacgaacgactgggaaattccctctccccagtccccactgaacagtttccttctctcaaatgacaggattcctgaatctctttctacttccttctatatctaggagatagcacatcgctgcagctgtcactaatgggaacgtggcctgatagctgtggacagtactagcagcattttctcagtctgccttcctgctaccctttgctaggccagcaggattcccacaagggaatactgaagtctgatgaataggagcacatgtgtgcatgagtgtacacacacacacacacaaacacacacacacacagaattgagaacttatggtatattctcccctcaagaagggaagagcattctggctggaagatagtgtcttaggatagcctcaatttacctctgctatctccaatgtgaaggtattatattcccacaatgcgaatcttcctcatacttcctgagaaacctcacacaagaaatgggagagcctatatccttgaagaattacctactgacatttggagtagagaaataagggcctgcctgagcacatgtgtaagttcttccctaatacatgaaatattaggaaaatcccacagggcttcgagactgccacaaccagatattttactcttgctcactcaggaaggtaaagagaaaagcaaaaacaaacaaaacaacacacacacacaatcaaatagaaaataagtgcagatagttcacaaagcaaagcatcgggtgtgctatcaggctccaaggcagctttctctacagcttggacttagacatgttataacagccattttattatgtcacagaaagaaataactgaagtaggtcataacatttcaaattatttttccagtaggaatattatgccctgatgacatagtctagtttcacttcttccataagtcaccagagactttccttaaaatggtcccttgtctccagcctcttgcacttcatgccatcctcatgttgccttatgtattagtctgttctcgcattgctataaagaaatacctgagactggtcaggtgcagtggctcacacctgtaatcacagcactttggaaggctgaggtgggtggatcacttgaggtcaggaatttgagaccagccggggcaacatggtgaaacctcgtctctactaaaaatacaaaaattagcctggcgtggtggcatgtgcctgtaatcccagctactcaggaggctgaggcaggataatcatttgaacctgggaggtggaggttgaggtgagccgagatcacactgctgtgctctgagatcacaccactgtgctccagcctgggcgacagagcgtgactccgtctgaaaaaaaaaaaaaatacctcagactgggtaatttataaagaaaagaagtttaattgggtcacagttcagcaggctatacaggaatcatagcagcttctgctcctggagaagcctcaggaaacttctaatcatggtggaaggcaaagggggagcgagacatcttacatggcaggagcaggaggaagaagcggggaggtgccaaaccctttaaacaatcctcgtgagaactcactcattatcgtgagagcagcacgaggaggatggtgctaaaccattcatgagaaactgcctccgtgatccagttacctcccaccaggcctcacctccaacactgaggattacaattcaacatgagattgggtggggatgcagatccaaaccatatcacctaatattaaccagtaaagattaatatcattcccctagtcaaaactttgagatttccttactatcaagagaattgacccttaattctgtgtgttatttgaggcttcttaccaatcagtttccctacttatctatgtccttattctaactcctcctactcacactttagtcctggattcaaaacccacctcctccacttctatccacactgacctctgtcccctattcctatagcatactcacggtacatctcattttggcagcttatttatcaagtgattactatgtatgctcaagtgaactagatgttttgtgaacactaagagaatgagataaggtccctgacctgaaggagggaacgttgctgttctgtcatgctatgtttcctgagagcaagccatgtatccacaggaaaatggaagtctacaggttcctccaggatgtctctgtgctatgtacatgctggaatttcagaaagacttgctaaattgaattaaattctctctctctctccaattgatatagttgaagtgcaataactaatatgcacttaaactgtccaaagtaacagaactagtccactaccgctaggccatgagcaagtcttccaggggtaagaaaggaaaacccaccctggtgtgcagcccgatcagcaacaaggaaaaagttgctcagtgcaagtctactctcctgtttggagccttgtggttatgctgggttatacttggttgtgcaggtgtaaactgctgaagtgggaaattaagtgtggtgaccaaaagtgtgatgctcaaaggagtgaggaaaggcaaaatgagcagagtggggaagaggagcagcagaaacctcccagagcagatgagcagcagggccatcaaagaaggactggtttccttctcacataaccaaggccagtccctgggaaccacagttcagacttcacatatttgtagcagtaaaggcttgatgttggcaagtttatttcccagacacctgttcccgcaggtaacagcagccagagcagctgccgtgagtgactctgaggtcgtctctctcaaaggtcccgagctggaaggatttggagaagcgcaaaccccaaacccaggttcttctccatggggccccgggatacgttggaaaatctaaccaaagcaggaaaaactggcgggcctggagaacggggcagagatggaacagaagtccccgttgacttcaggcatcccctgtctttcccatcctgagccaggagaaaagtccgcttcctgcagacgacctcagaccaagcaaggtgcccgccgagtctctccttgcaggtccggcccacgatttccactcatctctttcccccgggcgcggggcggcggcaggcggggtcaccagatccccctagcccgggcccctccaggcgccagggacgctgacgctcgcgctcttcctctctcgcctcccctccccacctctccgctccttcgtccagtccctcccccagcctcggcgcaggggggccgggcttggctccgcgaggcccgtgcattccagagagcccagcgagctagagcaacaaaggagccgggtcgccggcggggagagttcggggggctgcggcgcgctggggcgaaggtggctgctgggccgcgggctggcgcgggggcggagccggagctgcactcgcacccccggcccgcgtctggcctccctcgcggggcggggaggtggctttaatggtgggagagggaatggggctggggattgggggcccaggggtctcctagggctgaagacaacttggattgcgaggctagggcttggggagtcgtgcatcccgttccgggcctccgcagcccaacatgggccccgggttccaaagtttgcgaagttgggcgccgaggggccggggcgcgcggagcgtccgggggggcccgggcccggattctctgggcgcacaggtcgcctgagccgcctccgcggccgccgaggtcgtgcgtgtggccggggggctccgaggagcaggcgggggcgccggggcttttgctgagttggcggggttggccatggccgctgcccgcccagcgcgggggccggagctcccgctcctggggctgctgctgctgctgctgctgggggacccgggccggggggcggcctcgagcgggaacgcgaccgggcctgggcctcggagcgcgggcgggagcgcgaggaggagcgcggcggtgactggccctccgccgccgctgagccactgcggccgggctgccccctgcgagccgctgcgctacaacgtgtgcctgggctcggtgctgccctacggggccacctccacactgctggccggagactcggactcccaggaggaagcgcacggcaagctcgtgctctggtcgggtaagtgcggcggagccgggtctggggggcgggaggtgccgcggtaagatgggggcacccttggaaagaacaggctcaggcctgagttttggagagggcggggacagcacccgggagagttggagggacagatcccgaaactttgggggcaggttacgtgcaggatgggaccctcggtcatgggaaaaggagggcaaggaagttgacgaagcgggtcacaaagggcctgagctggtgggtgagcaaaggatggcggggatgaggggcccgtgaggaggtggctctaagccacgggaaaagacattttgtaagaagaggagatgctccacctattctggaagcagggtgccgggggattcaaggaggtgttgaagaccctggggaaattggagttggagaggaaaaggggagggatgacggaggaagaggtttagacatttggagggaagggtagggggacatgatcgagtgaagttttgaaggaaaagaaacctccctagtgatgaattattaaaaggtaaccagaaagttctggaaatcttgatttgggagacaggaatgaagcctagagaactgtgatcttgtctggctttcacgggagatttcattcagtttgtgcatctgaaaaaccggccctctgacgcatgcaggaggttatgaaggaataag

SEQ ID NO: 11384 - DNA, 6000 bp, Homo sapiens
atttctcttctggttactatgtaccgagctaagctaagtactttttatcattgtctcatttagccattatcctaagaagaaggtacaataatcccattttacaggtgaggaaacccaaaactgggagaggttaaataacttgtcaaagtcatgcatcttccaggatgcacacctggaggttgaactcaggtatgtgaagtttgcattttgctttctgcccaatgcctgcctccacttgcattcattctccactggccctccgtatccacagattcccgcaaccaactgtatttgtctgttttcacactgctatgaagatactacgtgagactgggtaatttataaacgagaggtttaattaactcacagttccgcatggctggggaggcttcaggaaatttatggtcgtggcaaaaggtgaaggggaagcaggcaccttcttcacaaggcagcaggagagagagggcacaggggaaactgctacttttaaaaccatcagatctggggagaattccctcactatcaggacaacagcacaggggaaaccacccccatgatccagtcacctaccaggtccctaccttgacacgtggggattacaatttgagatgagatttgggtggggacataaccaaaccatatcatcctgccccagcccctcccaaatctcatgtccttttcacatttaaaaaccaatcataccttctcaacagtcccccaaagtcttaactcattccagcattaactcaaaagtccaagtccgaagtctcatctaagacaagccaagtcccttccacctatgagcctgtaaaataaaattagttacttctaagataccatgagggtacaggcattgggcaaatgtttccagtccaaatgggagaaattgaccaaaataaaggggctacaggcctcatgcaggtctgaaaacccggcagagcagtcgttaaatcttaaagctctgaaatcatctcctttgattccacgtctcacatgtaggccaccccagggcatgctgatgcaagaggtgggctccaacaatcttggtcttgggcagctgcccctgcgttcctgtggctcagcaaggtacagcccctgtgtccactttcatgggctggtgttgaatgcctgcagcatttctaggcacttggtgcaagctgtcagtgtatctacctttctggggtctggaggatgggtgcccccttctcacagctccactaggcaatgccccagtggggaccctgtgcaggggctacaactccacattttccttccacactgccatagcagaagttctccttgagggctccttttagccgtggctggtgctggatccactgggatgcatggaaccaagtcccgaggttgcacagagcagttgggccctgggtctggcccaggaaaccatttttctctccaagacctctgggcctgtgataggaggggctgccaagaaggtctttgacatgccctagagacattttccccattgtcttgactattaacattcggctccttgttacttatgcaaatttcttcagccagcttgaattcctcctcagaaagttggtttttcttttctaccacatggtcaggctgcacattttccaaaccattatgctctccttctcttaaatataaggttcagttgggcatcttctatatatcatgcacccatataggacctgaatgtagggatgtatataacaggattcctgcactgaaggaattcacaattaagcttatgaggggttagggaggataagcagaaacttttatagctaactgtgatagggtgtgaggagtagcttagaagagaatggataggtgagctttcagcagaggaaacagcatgagcaaagatccagaaacaaaagtttatgaaacaaaggtgaggcatggaaagtgggttggggctagatagtaaagggccttgaaagctttcagagaactttggcaatggggagcaatagaaggtttgaaaacaaggacatcttatcagaattgtgcgttaggagaacaacaaagacagagtgaagggctagaaggagaaagcctagaggcagttaggaagctctaataagcctagaaaggttagcaagaatggggatgagaggtgacttgaggggcgtttgggattcaagttgatttgacaaatagtaattgtgtaccaattttgtgctggaccctgtgctaggctctgtgttagagatactgcagagaatcacttatagcttctgcccaagatctagtggtgacacaaccactattgctaagaggaaatgcaattcagaggtggttctgaggttcctgcatggagatgtgtggatagtagcacttcatttctgagtttatggaacatggatgtgggagcagagttgagagggggaaagataatgagcttagttttgaatatggtttatctgtagactttctaatggctccttggcagggtattaattatattagtctggagctccgaggagaagttgaggcaggagtgattattctttttcttctgctaaacacattataaatggtttatgagataacttttttgttttttatttttaaattttatttatcctttatttataacatatgtatgtatgttggagtctcgctgtgtcgcccaggctggagtgcagtggtgcgatcatagctcactgcagcctcaaactcatggttgcaagtgatgctctcaccttggcctcctgggtcgctgggatgataagcatgagctaccatgcctggctgtgagataactttaaagcattctagctttctattgtagattctagctttctgttatagaaaaccgtattgtggaaaagatttccagttgcctacctgttttaagatgtacctgggacttgccttaatcatgtatggtaggagacaactgctttaatcatgtcacggagacagctgctttaatcatgtcacacagacaactgctttgaaagaagagtcttttatttcacagttcccaataggaggttgcatgctatgccatgcaaggccactcagggatgcactggagttggtcaggaggaagaaggaggggggaaaacataagccagaggctttgttgtgtttttcatagggaagcaatgagtaaggcaccagtggaaagctaagcaaggttaggattgggtagtttgaataatttcagcaggctgcaggttctcaagatggtccctagttatcaggtgcctggccctggggtgattgaaggcaaggtcatagtgtcctgggctcgttttctacctaagcaaaggaggtagatgggaggggcagtgtggattcaggattggctggtttgcttatcaaaggagttttctcaggcaagttggctaactccaggaattagctaaccttgggagggcatgccctctctgggtctgcaaggcccaaaagtgtcaaagcataaaatacagaaaataaacatgattaatgcactacccagtatctattgtcccttctgtatttatagaacccagatgtgacagggtgcacagcacatgtactgcattcctgttcttttcagttaggggttgccaaggggctataggcagaagtcacttggtgatgctctcagggaactttctatatgagttactcttgggaggcgtatcctgtgtgcttccccagactctcgtcctacagcattttcttttttgtctgaaatgtggacatttcatggctggatttccagttgccatcttggaccatgaggcagtcttcagaatggaaggtagaagaagctgggatctgcaatcactatgcaaccaccataccagcctggacagtttgcctctggactgctttgggagacaaaaatatacctctcctctaagccatttacttgtgttgtgtacttaaacctaattctttcttattcatatattgttgactttatctccgtatacatgagcaactctttactcttatctttctcttacatgacctttcacggcaagtagaagtaaaatcttttctttattcccacaatcctttaggttttaaactaatgtctcattaaatttagggaagggagtaggacataaaaagtatacaaaccttagcaattagctttaaaaagagtcaacataagcatactttaatacaaactacgtactgcttaattctgcatatagtcctgaatgaagatccttaattaatagccgcttgttaaatagaggagctcttaggttaagaacagaagtattgttcttatgcctccctggacagtattatagcagactagcaatccagagtgggtctgagacttcccactgcaagtccaagttcgggatgtaagcttggccactttctggtgaggcttctcttgctagcttatagcttacagccatctctctgcatgtaagccaggctccaaggggcatgccttttaattctaatccatgatcaatggcactgaacttttacaattttatgcacttaaacctcactccaggtggatagtggctcctagtggaattccttttctgtatctctgagtcctccctcctgaggaatgagactttttactcttctgagtaattctgagccgcctccatttggtgccgctcatctttctgttttgggtaactcagagccctacaccctttgaaactgagtccaagtcctccatcatctttgtgacctagatctcttccttctctatgtgacactggacactactcatttgcattttagcaaagagctgcaaagtttaggttcattgatggaatatgacaatccatatcatctgtgaagaggacagactaacctgaaagagccagagaggatttcctaaattgtgctctacgacagactaaattgggcagagacaagagacaggtacagtgaagcaacaggtagaggagtagattaacgagaaaaatatcacatcagtgaggagattctatgtatcaacagaaagaacaaagatcagggctgcctaattgctgacatgatgggactcaccgagggggtgttcctgattctgtctggcactcagttcacactgggaattctggtcaattgtttcattgagttggtcaatggtagcagctggttcaagaccaagagaatgtctttgtctgacttcatcatcaccaccctggcactcttgaggatcattctgctgtgtattatcttgactgatagttttttaatagaattctctcccaacacacatgattcagggataataatgcaaattattgatgtttcctggacatttacaaaccatctgagcatttggcttgccacctgtcttggtgtcctctactgcctgaaaatcgccagtttctctcaccccacattcctctggctcaagtggagagtttctagggtgatggtatggatgctgttgggtgcactgctcttatcctgtggtagtaccgcatctctgatcaatgagtttaagctctattctgtctttaggggaattgaggccaccaggaatgtgactgaacacttcagaaagaagaggagtgagtattatctgatccatgttcttgggactctgtggtacctgcctcccttaattgtgtccctggcctcctactctttgctcatcttctccctggggaggcacacacggcagatgctgcaaaatgggacaagctccagagatccaaccactgaggcccacaagagggccatcagaatcatcctttccttcttctttctcttcttactttactttcttgctttcttaattgcatcatttggtaatttcctaccaaaaaccaagatggctaagatgattggcgaagtaatgacaatgttttatcctgctggccactcatttattctcattctggggaacagtaagctgaagcagacatttgtagtgatgctccggtgtgagtctggtcatctgaagcctggatccaagggacccattttctcttagagtaacagagggcatggggtggagcccttgagccttttggcctggctcaagactacaggactcttcctgac

SEQ ID NO: 11385 - DNA, 6000 bp, Homo sapiens
ttcataaaagcacacaaaaataactccctgggccgggcgcgatggctcagcctgtaatcccagcactttgggaggccgaggcgggtggatcacgaggtcaggagatcaagaccatcctggctaacaccgtgaaaccccgtctctactaaaaaatacaaaaacttagctgggcgtggtggcgggcacctgtagtcccagctactcgggaggctgaggcaggagaatggcatgaacccgggaggcggagcttgcaggtgagccgagatcgcgccactgcactccagcctgggcgacagagcgagactccgtctcaaaataaataaataaataaaataataaaaaaataactccccctctttcatctgcagtcccctcactagcccgcttttactctattcactttcctgccctgaataacgttgccgatgctggtcattttcttcctcggggttgtgatctttgctgcacacagcagccagcctcagtggtgtagtttgtgcttcctcctccctccgaacgcctaaattgcggcaccaaagaggccgcaatgactggtgagcaagactcctcttcctcatattttgtgaggaaggaagctggcaagactatgaatttgtgtacatttataaattgtgttcctgttacacatggttattaaaaacatgcttgatctgttcagtttctgaatatctgaactaattcagctcattaagggaatttgtatacttaggtcaacagcttctacagaggcgttgccttgacgccatctagtggcaatataggcacaattctgagaagcattttaaaaagtcttgagtacaggaatacaggtttgcaagagagatgtagaataggggatggaagatggaactgtactgagtctggtagcaggacagggtgattttttgggggaaagtgccaggttttggaaaccaatgcttgttctttgtttcattctttttaatattcttattatagactgctctgttgacgctgagtgtaaagccataacttgcccctatgagcgtctctttggatgcttgcatcccgcttgatgtttcatcagctttcttttcttggttcaggtactgctaaagtagctgagggctcagaacagtggggaataggagcatgaatgcaagagactttggtagaaagaattatggtagtattatggcagacacattttggttgtgtcaaaattaaaaaccatagtgttactctggtaaagaggatggcactgaggctgttactctccacatacaccccttcattgcagctcttggtgtggatgccgataggctgaacagttctgtgtggagatgaagtagcagccgtggttcacagatttctctcctgcctcacctctcctagaatttattattcagcagttgatatttatcctgtcttctccttgtttttgcttgtttgctcaccctatccttccctttgttttcattgtcattgcagtaagcctttgcataggtgtaaatatggctctcatgtttatatattcaaatttcaaacatattgaaaccattaattatttgcctcacccaccagaacataagctgcatgagagcagcaactttgtttctttccattgtatcccaagagcttggaacagtggactggcacatagtagtcattaataaatattggttaaataattgataaatgtcatgctttccctttttttttttttttttttttttttgagacggagtctctctctgttgcccagactagagtgcaatggcatgatctcggctcactgcaatctccacctctcgggttcaagtgattctcctgcctcagcctcctgagtagctgggactacaggtgtgtgccaccatgcccggctaatttttgtattttcagtagagatggggtttcaccatgttggccaggctggtctcgaatttctaacctcaagtgatccacccgcctcggcctcccgaagtgctgggattataggcgtgagccaccgcgcccggcccatgctttccctttttataacatgaggtaccttgcatttgccactgttaaattctcagactgtcttacttaggttttgtggagttaggtcgggtggaagtaggatttcaggagactgtgctctaggctgtctggattttagttctttccttcggaaggccattctgtaattgtgtctctgtacctaatgtcagatcccaggccagtgtcaggtagatgtaagtgacggtgggaccgttaccttcaagaacgtttcttctggtcacagctgtaacatctttaccagagaagggatttcagacagtaacaaaactgagtggtgagaagtgaaatgctctgccataatactgataccgtccccagggattctgacacagccagcagcagtacgtgttcatcagcactgaagcagggcacctcctgattcagcagagagaccctcccctccccagccatgttggcggctgccctaggattgctgatgcccattgcaggggctgaatttctcattggcctggttggaaatggagtccctgtggtctgcagttttagaggatgggtcaaaaaaatgtaaggagtccctataaattctcatgattctggtaagtagccactttctcctactcaggccgatcatgttggacataagtctgtttccactttcccagagcagtggttggctttactatcttaatgtcttcgagtcctggtaagccaggccaacatgtagtttgccactttcttcagtggcttctgctgcatggagatcatgacctttgtcccgctgacttcttgtagctgaaaagactgggtttttgttttttgctagtgtctttcaagatcactttttatttctcagctcttgttggctggaccctttaaaaacccttaacaggaaacagcaacatcctgcatcccattttaaatctgttatttttatagattgctgtccagtgaaggagactgattgctatttgtgatgtttctgttccacttgtctttttgtaaagacatcacaggaagatggaggaccacacagctgtcaggaggaggctcaaaccaaggtgctcatcgctctgaacttccccctttacatggtttctgccttggccagacacttttccatgaccttctaatctccctctgatctcaccattcttgccatctctgcaacactcatggctgtttatacttcatttccgtctattgtaatggttatgaggaatcagacttgtcagagaattctgtaggagatgatatgtacatggaaatcctagaggccatgacttggaagaaggatctaatcaggcccttaactgtatcactgacaacagtaaaaataactgtagattttagaaaaatgaaatttttattctcaattctcctcatttcttctttgattttgaaacaaaatgaaagggtaacatgaaaaacaggctagaaactggagcttattgctctctaagcaatgcaaatcacatcattttaataaactacagaagtcaaaaccgagttttcatattttgcatgggaagtatcacatttttaaaaattactgcagataatcaagttttctttgccaatatgctatgtttttgataaaaggaagtagaaaatagctatagtttgaaaataatatattttaaaaagaggtgagcctgtatattttttaggcaagcacttttcttaggggaattagctaaattattatctcaattttctatgtagtttagcctctcaacaccggtagtaaagtagtcaaaaacctacctttatatttctggatactttggtttttttgatgccagactagctttctggaaacgtgtcagttggctaccaggatcggtggcaaattccactgccaggctagattggggcaggtggggagagagaggcactatgtctctatcagaaagtcactgaagaaacactgtttttggacgagttcaagcctcatctagatttttagtccagtagaagatcgcgaccacctctgcccctccatagcctacagccagagttttagagtaccaggccttgcagcttggtggagatgatgtacaatggatgctacctggaggcagggactgtgtattataatggcgccgtcccctgtgcctagtacaccgtagtttgacacaaaataagcactttgtaaatttagtccgaaggaatggaaatctcatcctacaatccattcagttattaatagagcaactgaggcccagagacgggcagtggcctgcctgcctacagcttcgtagagagttctcagcatgcttactttttttttttgagatggagtcttgctctgtcgcccaggctggagtgcagtggcgcgatcttggcccactgcagcttccatctcctgggttcaagtggttctcctgcctcagcctcccgagtagctgggactacaggcagccaccaccacgcccagataatttttgtatttttagtagagatggggcttcaccatgttggccagggtggtctcgaactcctggcttcaggtgatccacccgccttggcctctcaaagtgttgggattacaggtgtgagccaccatgcctggcccagtgttcttttcatgaaaataaaatttctttttttatatagcatatgagctcataactggcactgtatagcacctgagcatgttttgatttggtctttcttgttgaggggccttgttacgttataccctggtgtctagactttggcccaaaacctttgagatggagagccggtgtctgtggtactgtttgcaatctctggttctacactcagggttcattcatgtagatgcaaatacagatggtatcataacttccaacctctctgttcctcatcacagctgttcagtctcgcttgaagacagattacggaaggacgaggccaaatccagattttgtggtgtgaaaatttaccctggtgtgttatcactaccaggggatctgacctcagccaggagcagtgagagcctcctctccccagccatgctgagcgctggcctaggactgctgatgctggtggcagtggttgaatttctcatcggtttaattggaaatggaagcctggtggtctggagttttagagaatggatcagaaaattcaactggtcctcatataacctcattatcctgggcctggctggctgccgatttctcctgcagtggctgatcattttggacttaagcttgtttccacttttccagagcagccgttggcttcgctatcttagtatcttctgggtcctggtaagccaggccagcttatggtttgccaccttcctcagtgtcttctattgcaagaagatcacgaccttcgatcgcccggcctacttgtggctgaagcagagggcctataacctgagtctctggtgccttctgggctactttataatcaatttgttacttacagtccaaattggcttaacattctatcatcctccccaaggaaacagcagcattcggtatccctttgaaagctggcagtacctgtatgcatttcagctcaattcaggaagttatttgcctttagtggtgtttcttgtttcctctgggatgctgattgtctctttgtatacacaccacaagaagatgaaggtccattcagctggtaggagggatgtccgggccaaggctcacatcactgcgctgaagtccttgggctgcttcctcttacttcacctggtttatatcatggccagccccttctccatcacctccaagacttatcctcctgatctcaccagtgtcttcatctgggagacactcatggcagcctatccttctcttcattctctcatattgatcatggggattcctagggtgaagcagacttgtcagaagatcctgtggaagacagtgtgtgctcggagatgctggggcccatgatctgggaagaaaagtgtggtcaggacactcttgggacgctcttttgatagctctctataagggagctgctttccatgtcttttaagattttccttctttt

SEQ ID NO: 11386 - DNA, 6000 bp, Homo sapiens
ttgaagaggaaactttttactttctacaaagtacatcatcagcataaatatgaaagctaaaattataaaacttctcaaagaaaacacaagagaaaatatgtatagctttgggtctggcgcagttttatgaccaaacaccaaaagtgtaatccacaaaagaaaaattgatcaattgaattttaccaaaatttaaaacttgtattctgtaaaaaccattaagagattgaaaggataagtcatgcactgggggaaaatatttgcaaagcacatagctgataagggacttataattagactatataaggaatataacaactcattttttaataggcaaaattctgaataaacaaagacatattgatggtcagtaagtgtattagtcagggttctctagagggacagaactgacggaatatatatataaaggggagtttattaagtattagcttacaccatcacaaggtcccacaataggccatctgcaggctgacaagcaaggacagccagtccgaattccaaaactgaagaacttggagtccgatgtttgagggcaggaagcatccagcacaggagaaagttggaggctaggccagtctctgcttttcacatttttctgcctgctttatatttgctggcagctgattagatggtgcccaccagattaagggtgggtctgccttacccagcccactgactcaaatattaatctcctttggcaacaccctcacagacacacccagaatcagtatttcgtatccttcaatccaagcaaattgacactcagtactaaccatcacgataagaatatgaacagatcctcaacatcactcgttattagggaaatgcaacttaaaatcacaaagaaatagtgccacatatttttaaatgactaaaattttttaaaaacacttgacaataccaagtgctggcaaagatatgaagcaactggaaaactctcatacattgctggtaatagtataactactctagaaaatagtttggcagtttcttacaaagttaaatacctagatattggtgtgtaaatgccattctccaataaaagaattaagactctttgaataaatgatttatttcagtgttggggtgggaaaaatatgagtttggaacatcccatgatgccacaaagttaggaagttcttaagaaaaaaaaaatggagccatatttaaaagacataagaaccaatctgaaagagttcccaattgccaaagcttgagcaggttgagcaaaaaataacaatagtattgaagtgtgaccgaaatgcaaaatataaaataaaaatccatgagtgcataagaatacaaataaatgtttgattaagtaactaaatgggagaggaggaataattttttcttagagaagaattctaattaataaaggtgaaaggaaagaggaaaacaaaaaattataacaccacagtaatgttaattgctgcaggcagcatgccgtcatgaatactcaaatcagtggacaagagttttaggaaaaacaagatatttgcatagcttcaaaatatctcctacagaatatttctgtgttggtttttaaaataatgtccacaaattctttaagagttctcctctgggaggtaaagtctaattcatctcccttgagtgcgggccagacttagtgacttacttctaattgatagagcacaaaaggaaaaaaaagagtaactttatggccgagagaccagtcagataccaccttaactaagtgatcaagttaacatcgccagtaaaagtcattgacatcatgggtccctgcagtcagaggggcacatcatctctgtggtactcttcccaaaaatccattaacccaggctaataatgagaaaactaagacaaacccaaatcaaagaatacactgcaaaatacctgaccaggactcttcaaaactgtcaaggtcataaaagaaaaggaaagaccaagaatttgttttgaattggaagagatgaaggaaacaatgatgaattacaatgtggtattctggactgggtctcgaaacagaaaaagaggacgttagtggaaaaactggaaaagtccaaatgaagccaaaaattgagctgatagtattgtaacaacgccaatttccttcgttagatcattgtagcatgattatgtaagatgtaagcattagtggaagctgggtgaagggtgtatgagaattgtctgtactatctttataactcatctctatgtcaaaagttatttcacaataataagttaaaaatataaccaaataaactggacttttaaaacctattccctatgtccttaatgggtcagagttttcttcatgagcgttccttaattattaggttgatgtaaaagcaattgtggtttttgcctttttttaaaagtaatggcaaaaaccacaattacttttgcaccaacctaatattagaaatacccactcaaatacatccaagatgtatttaggaaactgaaggtgccatttaggaactggtccaacagtgttactttaagaagatcaagaaaatgtggcacatatacaccatggaatactatgcagccataaaaaaggatgagttcatgtcctttgtagggacatggatgaagttggaaaccatcattctcagcaaactatcgcaagaacaaaaaaccaaacaccgcattttctcactcataggcgggaattcaacaatgagaagacttagacacaggaaggggaacatcacacaccggggcctgttgtggggtgtggggagggggcagggaaagcattaggagatacacctaatgtaaatgacgagttaatgggtccagcaaaccacatggcacatgtatacatatgtaacaaacctgcacgttgtgcacatgtaccctagaacttaaagtataataaataaaaaaaagaaaaagaaaagatcatcttttcacccagaaaggttatttcatcccccctcagatcgcccctggaaatttccatgaacaaaactctttccattgcaggaagcacctctttcataagctgtggcaagcagagcatcttctgaaatgcctttggtgatgtctgtggtcccagctcctgcccacagcctctgcagcaccctacactgtgaagccagaccctgtctgagctctttctcatctggctgctctgtctctgcttccccttcctttgttcccctctgtcacccaccagtgtttcttacacagatgttctctacagtctgctgtgttctcactgaacctcactgtttatgctctgacacttgatttaggcataggacctgcagattttcaaatttgaggagacgtggaactgccattcctcctcatgtctctcataaagagcttctctgagctgaaggtcttcactaaggccatatatcaacccagcaagtatctatgtactgcctcctgggtgtctggcatgggctaggggctcagagtgggatacatggataaacaaatcaaatgaggaaagacgcaacagcctctgaagggaccatgtcctgtttctcctcccactcttggaagcctggatcagcagaagtaggggaaagccagtggcaagaaaaatcctctttaaaaccaaactggaggtcctgagatactccaggcctacttgtgcaaatgggtagaaacaagcagagaggagcagttgtctattacgctgtattcaagggaaatatttgttcaggaatagtgattttcaaatgagatggtaaaattcgtaacaactcatctaaaatcattaatcaagccagaaaacgtttatgagttcttgccttgtttttaaaaggctttaagtaaaaaccaaatgttataaagattttctgagacttctcacccaccaactttctctttattagaattattacttcatcattattttaaagttacatacattcataaaaattaatttaccctgaaatgaaaagtccattttatcattatgtgtcctatgcttgcgttttaaaatcagaaaaaaattccttaagataaaagtgattcttttttcctttctttttgttttaatattccaaaattggatgaattgggacattgcttttattctcaggttcgctagcttaccttgctaggaactagggagttttaccttcaactcttattttcctagttttgcttaaaatgaaaggtgaatatgtgtgtgtgtgtgtgtgtgtgtatgatcttttatgtataattaaatttattacctctcaagtaatctactttgaaaagagagtcctatctcttaaaaatcagtgtcttcttgctttattgatttttctttagagggtggggacataaaaggctaccaggaaaaaaatgtcatagtggaatcaaccctgcatttagtcttgggcacacaaaagaatccacaggtctaggtagcataacatggtggataagaggaggaactctgcgaccaggtgacttgggtttgaatcccagttctatcacgctctagttgtgtgatgttggccaagttatttaacctctgtatgccttagtttcttcatctgcaaaatggaggtaatagaagcacatgctcataaggttgttgtgaggtttaaatgtagtaattataaataaatcatttgaaaatttcttagcacaaaatgagaagtgcgtgtgtgtgtgtgtatgtgtgtagcagtttttattttcaatcattttctgcagtcacaagtgaaagtaagttaaatgatgactcagttaaccaatgttcaaattaactgatgctaccaaagaacacggacctcagtaccatgttagctgcttttaaagagtctactcaagcgcttccctgggcctcattattgaaccactaccaacatgttcaaaaatagagagaggattagaaaccaaatccttccaacatttgcatctctagatgtagagctaagaattctgaaataaacaaatgcagtgaatttggaaatgatacatcaattgcttcctcctatgacatcaatactgggagttatcaagagtctgcccatcaaatgctagggagatgttttcctccagacaccaaagagaagcaacagctcagaatgactaaactctgcgatcctgcagaaagtgaattgtcgccatttctcatcaccttaattttagcagttttacttgctgaatacctcattggtatcattgcaaatggtttcatcatggctatacatgcagctgaatgggttcaaaataaggcagtttccacaagtggcaggatcctggttttcctgagtgtatccagaatagctctccaaagcctcatgatgttagaaattaccatcagctcaacctccctaagtttttattctgaagacgctgtatattatgcattcaaaataagttttatattcttaaatttttgtagcctgtggtttgctgcctggctcagtttcttctactttgtgaagattgccaatttctcctacccccttttcctcaaactgaggtggagaattactggattgataccctggcttctgtggctgtccgtgtttatttccttcagtcacagcatgttctgcatcaacatctgcactgtgtattgtaacaattctttccctatccactcctccaactccactaagaaaacatacttgtctgagatcaatgtggtcggtctggcttttttctttaacctggggattgtgactcctctgatcatgttcatcctgacagccaccctgctgatcctctctctcaagagacacaccctacacatgggaagcaatgccacagggtccaacgaccccagcatggaggctcacatgggggccatcaaagctatcagctactttctcattctctacattttcaatgcagttgctctgtttatctacctgtccaacatgtttgacatcaacagtctgtggaataatttgtgccagatcatcatggctgcctaccctgccagccactcaattctactgattcaagataaccctgggctgagaagagcctggaagcggcttcagcttcgacttcatctttacccaa

SEQ ID NO: 11387 - DNA, 6000 bp, Homo sapiens
accttgttgacattacaattctctcttcagctccttaggttttgatcacatgtctcttccatggccctcttctttcttcttccagtggtttgtttcataatggcacctacactgttttcttaaattacatcttttgccaaatatgcacacaggagggttctatgaggaacacaggaggaacatatgaccccctcagtctatcttccttttcctacttttaataaagatatgactacaagaaatatgctacttttctaatactattgggtagatgtgacttcacaccaccaaaaacccagttctgcaaaatgttataattattttcctaattcaatctctgaatttggtctcctaccacctgataaacgatatgtcctcttagtcttcttcaggaagtcattcggtcacttctacaaagatattgagggccacttttcctgttgccccaagtaaccctggagctcatactaaaaaccataagggtaagtccccccaaagggcagtgattctcaaccctgtcctgcttcatataagaatcacagtggggagttttgaaaatgccaatgcttagctgttctccagaacaattattcataatcttcgagggtgggacatatgtataggtgctttgcaaaagcccttccagtcataagggtaattctagaatgtggacagggttgagaaaaacagatctaaagaaagcagccaacaattgaggccaaatatctacctgcaaagcttaataagaggcagcagtacctgcaaatggccaggatcccagcagcagccctccacctgagtctgcacatatagaaagattagggaggaagaaggggggcctatgggagttatgggcagcagagtgaagagttgctgcagagcctcctcaagactcacatgagatcctcacaagacagccaacatatggatatctggcacccggaagtcatggagggccagatggtgttggccaggggagcagcagcagcacaaaagagtgcatttacaacagcagccagggaaataaagagactcttctgcctgtcctctctctcatacactagccaaaaactgaagagggagagacgggtgtctcagggtccaccttgtctcctcccagtcctagcagatggggtgtcagctgaaactgtgcttggggaaaggcagaagataatacttaaaccaaatatgaaattaaactggactgagtattaataaccaaaagaagacgaacatttggaacctgcccaagacattacaattggatgggaagcacagaatggggcactgaaactggagggggagaaacatgttgtgtttatcccttctcctttctccttcttgtcttccatgaaggacacctatgctccttgggagtcactcaaagatttggcatgaaggtgggatgtagagtctatactgtggtcattcctgtccttacgttgatgtcaattcacgtgtccacactttgatctcatgcttgtaaagtctccttgatatggccactagaccccatggaatccgataactcccttagcagatttccaaactccttctgtgaacacaaggaaggttgaacagctctcccaagtgtggacaggctgcaggggactcaggggccctcttgcagcctgtctgcctttgacacccccatgcagccatgagcagtgggccaagatgtgggaccccttcaaaagagatccttaccttctctagctctttcctgcctcctcttctttcattcctctccaactgggaaagcattttctagtctacatggtagtgatggagagagatgtgaaagaaaaatgtttccctggaaacattggaagaataggtgtattcttccaatctgttctatcctatgcctggaccaaagcttttaaacttcgtagccaagaatttgaaacttttgttccttgaagacccccatgagaacttctctaaagcaggccgggtgcagtagctcacgcctgtaatcccagcactacgggagggcaagacaggtggatcacatgaggccaggagttcaaggccagcctgaccaacacggtgaaaccccgtctctactaaaaatacaaaaataagccaggcatggtggcacacacctgtaatcccagctacttgggaggctgagacatgagaatcgcttgaacctgggagggggaagtttcagtgagctgagatcgtgccactgcactgcagcctgggtgacagagcaagaccctgtctccaaaaataaaaataaaaaaagaacttctctaaagtagagatgatgcctccattctagctctccaaatgataaaatatggaataaaaatgaattggccccacatagctataaatgtggcactgtgagtgccttggagttgtcagcccagactgccagcttgcattgagcctcagcaatagtcccacaccccaatggctgatcccctccctgctcctcttgcctgagcctctggggctgcaggcagaccctgcccaagatctccttctgttcccacctcttaaaatcagagaaaaacatgaatgaagaccaatagaaaacagtaccagaacaatggaagtcaacgattgtgtgccagaaatttggggagatatcatttattacaaacttgcatatgttgggacaaaataaaccaaaaagtgagtttgatgctttggaatacgtgaaagctgctgacaaatactactgtcctcaattaagagaactaaccaaagttaatgagtctcttacaggagatgcagaacctgccaacaaatctcgtttccagttctgactattatgaataaagctgctgtgagcatttttgtacaaatctccgtgttgacataagttttaatttccctaaataatgctttcttaattttgaaatatattgctttgcctggtgcttatttctatacaaataataaatctctacttccttatttaattaatttatttatttttgagacacggtctggctctgtcacccaggctggagtgcagtagctccatctcagctcactgagacctccgcctcccaggctcaaggatcctcccacctcagcctctcgagtagttgagaccacaggtgcatgccaccatgcccagataattttttgtatttttggtagagaaggggtttcactatgttgcccagcctgacctcaaacccctgagctcaagcaatcctcctcctcagcctcccaaagtgctaggattgcgggcatgagccactgcgcccagccaacttccttattttaaataaaattaatttggggtggggaaacccatttttatcattcatcaatttatattattaaaaaatataatggaccaaggcccaaaatataatggaccaaggtgtgaaggatggtagctcacacctatagtcccagtattttcggaggctgagatgggaggattgcttgagcccaagaattcaagatcagcctagccaacatggcgaaactctgtctctacaaaaaatacaaaacttagccaggtgtgttggcatgcatctgtagtcccagctactcaggtggctgaagtgtggggatcacctgagctatggaggtcaaggctgcagtgagccatgattacaccactgcactccagcctgggtgatagagtgagacccagtctcaaaaagaaaaataatcaaataaaaataacagggtaagcacactggaaaatgataactggcactcagcttctgtgtcaagaagacactaggaattagtattgtcaacaaactgaaaagtatataccttgtttaaaatgggcagccattactcagcttcagccagttcactatgaagacccaatactgccaaatcttctaatttttcaagagaagatagattttttgtgcatgcatataagtaatctcctaagtttaaatgtttgccaatagaacccctcaaaaagaaaagttacacactggtggattaatgctgtacagcattaaccaatgcaaggtaaaatgactacaggccaaatctgacccaaggctcattggtttccagctaagattttggatctcaatcctgactatgagcaacaagacctttcggcttttttaaaagatagcatgcctgagccctagtccagttctgatttcctagatttggacgagtcctgggcatctacatattcttgtaaagtgccagagttcattctggttcacagccagggttaaaaagtaggaaattaaatttcaagtcatagtaccttatcacatttccaaacttcaacaccatgtccagaacactgaattctccccaggctcattctacctgattctgagctcaaatagtcatgtgggatctcagtaagctgaaattgatgacacatacacaaacaataaaaactgggactatggagacttccttctctccaactcgaatagcatccaattttggcttttctatatactattcgaggacattataatagcaggcctttttggaagaaactcaattctaagtaaaagatgttcatatatgagcttatgggaatttcttattcacaaacatggtaactatcaaaataaaactctctcccaaaataagagagacaagaaaagaagtggggaaaacagattttaaaagctgtatgagcttttacaaataatttagcaggtaacagagatcttgtgagacaagtaaaaaggccttgtattcattgcttatcaggtaaatgtggacttaaagtaaataaggtaagaaggtgttgagctagaaacatgtctcaaattatttccagtgagcttctgaaagcccaagacaaatgtatctttatgaaaaattgagacagacccagtaaccagatcctctcattatttgcatgtgaagcctctaacttgtagtcatgtgataaacaaatggagaaaaattggaaataaccattaatgagggcggcagaaattataacattgagcaagggtcagaagattgcagagcagttacccattcttggcgcagaaacctgaaagtcaggatcaaagagaatggcaacggtgaacacagatgccacagataaagacatatccaagttcaaggtcaccttcactttggtggtctccggaatagagtgcatcactggcatccttgggagtggcttcatcacggccatctatggggctgagtgggccaggggcaaaacactccccactggtgaccgcattatgttgatgctgagcttttccaggctcttgctacagatttggatgatgctggagaacattttcagtctgctattccgaattgtttataaccaaaactcagtgtatatcctcttcaaagtcatcactgtctttctgaaccattccaatctctggtttgctgcctggctcaaagtcttctattgtcttagaattgcaaacttcaatcatcctttgttcttcctgatgaagaggaaaatcatagtgctgatgccttggcttctcaggctgtcagtgttggtttccttaagcttcagctttcctctctcgagagatgtcttcaatgtgtatgtgaatagctccattcctatcccctcctccaactccacggagaagaagtacttctctgagaccaatatggtcaacctggtatttttctataacatggggatcttcgttcctctgatcatgttcatcctggcagccaccctgctgatcctctctctcaagagacacaccctacacatgggaagcaatgccacagggtccagggaccccagcatgaaggctcacataggggccatcaaagccaccagctactttctcatcctctacattttcaatgcaattgctctatttctttccacgtccaacatctttgacacttacagttcctggaatattttgtgcaagatcatcatggctgcctaccctgccggccactcagtacaactgatcttgggcaaccctgggctgagaagagcctggaagcggtttcagcaccaagttcctctttacctaaaagggcagactctgtgactggaactcacggagttctgcgggacct

SEQ ID NO: 11388 - DNA, 6000 bp, Homo sapiens
attctcctgcctcagcctcccgagtagctgggactacaggcgtgtgccaccatgcctggctaatttttgtatttttagtagagatggggtttcaccgtgttggccaggctggtctcaaatctcctcacctcaagtgatccacccacctgtgggattacaggtgtgagccaccgcaccccaccttgaagcttatttttttatagtgacataggttgtccagcaccatccacttgacatcgcctgcccttctgctccacacctgttctcttggcctcgtctctccacttcagcccaataaatcttcttcccctcttcccccaagtccttttcttcttcatgtgcttcttgggcccacccaatacttccttctttcctttctctgccaatctccgtcattttcttcctttgtgctctgcttaagactgattccactcagggagtttttccagcctgatctcacagaaggctaaagacacataggagtttggtgccactgtatgtcacatccataacttcatgtgctcatgtcgaatgaataggaattgtctgatgtgaaaatgcttttaggttttggccaacagaagatagatggaaaacaaaggaaatgtcctacacttcttaattttgatgatcctactcttcctgtctgctcacccaggaggtggatcccagatgctgctgctgaggatgggaatctccagattgggatgtctgcatcccagagcttgtgcaagatgatccactaggcctgtagcaatttcagtttccatttatttttatctttttcttttaatcccctttttttgggtattttatgatgcatatgacgtattagtaaaatgtacatgcatataattaaaaataaatatgcatatggtaatatcttagtcagcctaggctgctgtgacagaataccataaactgggtgtttatgcagcagatatttatttctcacagttctggagcctgaaactgagggtgccagcatggttgggttctggtgagggccctcttctgagttgcagacagataccttcttcttgtgtcctcacgtggcagagagatttatctttcttgtgtttcttcttataaggacactaatcccattcatgagggcttcacccttatgaactaattacctcctgaaagcgttatctctaaatgttatcacattgagggttaaggtttcagtgtatgaattttgggaggacacaaatattcaattcatagctggtgggttgcatgttcatatatatatattttactgatggaattcatgataaagtatggagaccgatagactaaaagagattgggaaaaacactgcacacagttaagagagattcatatgtttgaactagtcaaaatagaagcagtaaataacaggacagaacagaggttacaaagaattttcaaatagataaatgcgtgtaaggtcaaatgtccaataataccaggaagctgaggccccaaaacattatgctacaatgctagctggaggccaggatatggcaagagaagagagagggatgactagaggcaagataacaagatcaggaattttctcttgcaagaggatgattaaaggtttaaaagaggagattctcaagttgctgttgaggaacccagggggatttccccagggggtagagcaagggtgaggcaggatggaggaacctgtggggagctggcactgtggccaggctttaaattaaatagacacctaaagtctgtgaattatcccacctagagaacatgtattatcctcatcatcaatcacgaagaatttttctttttctttgtagcaacatgagtgagctaatgacttcctacaggtagattaataataaattatgagactgagccttgcggctcaagccacaagttggttggaggcaggaaagacaggagcatggcgggagcggggagatctttctcctctatcccttctactcaactgtgagcacctggaagactcttcccttgggcggagctccagaagtttactgaaggtgtttgggtggggagtgggtggtgattcaactctcatgttctgctccatcttcacagcccttcgagtgataccaggttaagtggacttgtctcaggagttcctaattgatgttctcaatctcctttttaaaactctagctcataaaagccccaaaacacttggtggctctgtcttgactaaagatacaatctaatatctcatcaaggcttccaaaattttctgtgatctctctccagcctacctttttggcttgatatgccatcttctctatgtaagtcctctgttgtagctaaatgtatctaattgttctggatataatcatgtatccccctcctttactgatgcctcatctttttccttccaacatgcaagacagcatctttattgtctcacaattatggggctgttacttctcaactcttctgagagatcttgggatgggaatagcaagatccctaacacatagagccacagactgggagtcacttgttgagagtactgagttgaaggttttccatatagagagctaactcaggatccctatcctactaccctcatgattacatttataaagactggttatgaaaagttaaaaactctcagacttgacttttacctaagaagataaatctagacatgagaaagccaaatgcaacaaacaaacaaacaaacaacaaacaacaaaagaatcaccacgaaacacattgcatatttaaattcaaatgattattccctcttttggattaacttactctgcacatagtatatgtccagtaaatgtttgtggtttatgtttagcccataaaagtgctttgaaggcagatatctaattcactgttgtagcccaatgtctttcaaagggttatcatggcatataggatatgcttaataaattattattaaatgaattgaaggttaaatgcacatctttatcattgaaggtgtgggaggtggatgaaaaagattcaagttttccatattgggcggtttgtaggtggccatactccagagctataagcccgaagtttgccccatttctccaagttccagtagaaaacagccaaatgtcagccagaagaacaagggcaaggaagagagcagttgggaactctatctcctggaaatttgcatcttcacagaaaggcagagtgaattaccttagttcatcttatttcctttactccgaagacctatgtccactatggttggcgtatgtgttaaagaaacaattccacctggaagtggactactgggaagtagactgggaactgggaagagatgctgacatgcgttctattccctttttgtgggggtcctatatatggaactggtaggttgtggtgtcagcagatgtgtattcattacaaatccccttactgtcatgttacttgatcctgagccttcaatattgctgtatttgacccagaacaattcctgctttcctatctccctgtgacacgttaacctacttacactcacctgggtgttgattgctgatttttttgactctttgaagctgatttctataaagaatgtggtcttttttttactctgtccttctctggttgatatcagtggtctgacatttggtgccctgaacttctgttgcatccctgatgctctcctgaattctccttatgctacttattatgccacaggatggatggaatagaagatagccattctaataaagtaattgtcatcatcatcattgctccttgtccatatgcagaggtttataatttccaatatatttaccatatttatggtcatatttatttgtgacccatattttttataggtgaagaaaggggggtgttcagagaggttaactgcttgaggatccgtagtgattgtgacaagactcaaaacttgggcttctgagttcagctagggatgaagaagatggaggtgtaacatgtattgctaaccatggcagagattcctggtcctggaatcagtttggatcttggtctttcctctgtgtaactgtgactttaggtgggagttgtaatatataatttggggtcttatttcttttatctgtaagattatctttcatgtcttctttcattctaagccgagattctaagacatctttgtgaattagaacataggatacttttcatattttacagatggacaaaatgaggcgcagaggggctgacatatccagcaactcacagtaaggggtaaagtttggactaaaggctgtctcgactcctagcacagggctcattctgccatatcccattggcttatcgctactgggggttcctctgtgaagtgctattttagaggccaccagttatcaaatatatatttttaaattttgaaaaaagttgcctgcctcattatgtataattgtctccagtgttctttttttatgatgatggtcactgtgagtaataagacttgaattaatccttctctgtaaaggtttgctcagttttctctctgtctcagttaaaggggtcttgccatactactccccgcatagagttgttgtgagaactaaggagagcactcagaacaatgcctgcaacataacaatcaccccccccccgtggatgtgagcgctgtctcagtagcgggtgtgccccacggatgatactactgagctggcaggtgcatggtcctgtcataggtgtccgcttagagaagtataacctcctgtgtaaggacactaaatgccagggcctgatatattatccactttgatgttgacatgggcagagaataggcagaagagcaggcaaatttttgggcaggtatggggactttgaaaattgagccttgacaatatttgcatctactctgagaagaaaaaacctctcaccctcctctgatagcctgcgtcctctactctggcctagcttctgcgcttggggcagctggagggacaaacatatcctacaggaccttccagagcaacccaacagagatagcccttgaagttttgggacccatcttgtccaccagagagatgaatggagaccacatggttctaggatcttcggtgactgacaagaaggccatcatcttggttaccattttactccttttacgcctggtagcaatagcaggcaatggcttcatcactgctgctctgggcgtggagtgggtgctacggagaatgttgttgccttgtgataagttattggttagcctaggggcctctcgcttctgtctgcagtcagtggtaatgggtaagaccatttatgttttcttgcatccgatggccttcccatacaaccctgtactgcagtttctagctttccagtgggacttcctgaatgctgccaccttatggtcctctacctggctcagtgtcttctattgtgtgaaaattgctaccttcacccaccctgtcttcttctggctaaagcacaagttgtctgggtggctaccatggatgctcttcagctctgtagggctctccagcttcaccaccattctatttttcataggcaaccacagaatgtatcagaactatttaaggaaccatctacaaccttggaatgtcactggcgatagcatacggagctactgtgagaaattctatctcttccctctaaaaatgattacttggacaatgcccactgctgtctttttcatttgcatgattttgctcatcacatctctgggaagacacaggaagaaggctctccttacaacctcaggattccgagagcccagtgtgcaggcacacataaaggctctgctggctctcctctcttttgccatgctcttcatctcatatttcctgtcactggtgttcagtgctgcaggtatttttccacctctggactttaaattctgggtgtgggagtcagtgatttatctgtgtgcagcagttcaccccatcattctgctcttcagcaactgcaggctgagagctgtgctgaagagtcgtcgttcctcaaggtgtgggacaccttgagccacagctgatgaaaaacttcaaggagattcttgtggagaag

SEQ ID NO: 11389 - DNA, 6000 bp, Homo sapiens
aaacaaatatatacacaatggtagtcttggtaggaaaatagagagaaagagagaggtgacagaaaacatatttaagtaaataatggctgaaaacaccccaaatcttgggagggaaatagacatctggattcacaaaacttgaagaacactaaaaaatttccacccagagaagactacatgaagacaaattataatcaaattgttaaaagtcaaggacaaagagaattttgaaagaagcaagagaaaagctatcatacttaacagtacacccataaaactatcaacaattttcttagcaaaggtcttgcaagccagaagagagttggatgatatgttccatatattggagaaaaattccaactaagagtactacatcccacaagactattttgttttttttaaatgcagaagaggtaaagtctttctcagacaaatacaaactgcgaaggttcatcaccaccagatctgccttacaataaatgcttaaaggagttcttcaaattgaaataaaaacctgctacacagcaatgaaaaaatatatgaaagcatagataccaccactaagggcaaatatgtagacaaatacagaataatgtaacactgtaataatggtatagaaattacttttaattctaatataatagttaaaagataaaaatttgataatggatacacaatataaaaagaagcaaactgactacaaaagcacaaagtgtgggtgggggaaagtaaaaatgtagaattttaatatgcaattgaagttaagttgttaacataaaatagacaattatatctacaaggtattttatgtaaacctcgagttacccacaaagaaaaaaacctataaaagatacacaaatataaagggaacataaaaattgaagagttaaaggaaatcactacaaaaatcatcaaatgacaaagcaagacagcaaaagaggaagagaggaacaaaacaactgcaaaacaaataacaattattgctatatttgatattattgcaaaagggtcctcagctaccaataattactttaaataaaaatggattaaactacccaatcgaaaggcaaagagtggcaaataaattaaaaacaacaagatccagagatatgctgtctgtaagagatcactttaagacacacgtaagatgaaactgaagggatagaaaagattttcatgcaaatagtaaacaaaagaaatcaggagtagttatacccaacaaaatagaatttaactaaaaaactgtctctagagacaaataagtcattacataataataaaagggccaactcaacaggaagataagacaatgataaaaatatatgtgcccaacttgagaatatataaatatacaaaacaaatattgacagttcagacaatattgacagcaatataataatagtaggagacttcaataactgacttaacataatgaatagaacattcagacaaaaatgaataagcagtttacccgaacaacactgcagactaagtggaccttttcacccaatagcagcagaacacccattcttctcaagggcacatgcaacattctccaggatagatcccgtcctaggtcacaaaataagccttaacacatttaaggagattgaaattattccaactatctggtctgaccacaaaaattaaactagaagtcattaacagtaagacaacaaaaacattcagaaatacatggaaactaaacacattttgaataatcattgaatcaaagaatcaaaaggtaatttgagaaggatttcaagacaaatgaaaacaaaaacactacataccagcacttataggaatgcagtactagagggaaatttgtagtgataaatacattaaaagaagaaagatctcaaataaacaacctaattttacacctcaaggaagtaggaaaagagcataaaacataaaacactgatgaaagaaattgaagaggacacaaataaatggaaagatatcttatgttcatggaatggaaaaataaatattgtcaaaatatccaaattatccaaatctacagatttcatgtaacttctataaaaattccaatgtcactcttcacagaaatagaaagaaaatcctaaaattcatgtggaatcacaaaggaccctgaataactaaagccatcttgaccaaaaagaacacagctgtatgtatcacactactgtatttcaaaatatattacaaaatgatagcaatcaaaacagcatggttctggcaaaaaaacagacacattgaccaatggagtaggattgaaagcccgtgtataaaactacacttctgtggtcaattgatttttgacaaagtgccaagaatacacaatggggaaaagatagtctcctcaataaatgaggttgggaaaactgggtatccacatgcagaagaatgaaatttcatcctcttcttacactacatgcaaagttaaatcaaaatagattaaatatttaaatgcaagacctgaaatcataaaactcttagaaggacacataggaaaagagcttcttgacactggtttgggtaatgacttatagaaaactacacctaaagcacaggcaaaaattcagctaaataaacatagacaaatgggattgcatcaaaataaaaagctgcaaagccaagaaaacaaccagcagaatggaaattgggagaaaatatttgtaaacaacatatctaataggtgttaatttccaaaatatataaggaactttggctgggtgccctggctcacgcctgtaatcttgacattttgggaggccaaggcagaaagattgcatgagcccagtagtttgagactagcctgagcaacatagtgagactctgtctgtacaaaaaataaaaaaaattaaccgggtgtggcagtgcatgcctttagtcccagatacctggaaggctgaggtggggaagattggatcatccttcctaccttgaggctccagtgagctgtaatggtgccactgcgctccagcctgggtggcagagtgagaccccgtctgaaataaataaatacaaataataaaaatacaaggaacttattcaactgtagtgcagaaataaacaaaaaacataaataacctgattttaaaatgggcaaaggacctgaataacatctctcaaaagaagacaaaaatcgttcatgaaaatatgtttaatatcacaaatcacctgagaaatgcaaatcaaaaccacaatgaggtatcatcttacatgtgttagaatggctgttaccaaaaagatgaaggataacaagtgttggcaaaaatacagagaaaagcagctctttcagtctgttgacaggaatataaattatggaaaacactataaagatttctcagaaaattaaaaacagacctaccttatccagtaattccacttttaggtgtatatgcaaaggaaatgaaactagtattttgaagagatatctgcactcccatgttcattgaaaattattcacaatagccaagacatggaaacaatctaaaagcccattaacagatgaatgaacaaagaaaatgtggtgtgcatacacaatggaatatgattcagtcttagaaaaggcgattctgccatttgcaacaacgtagatggaactggaggacattatgctatgtgaaatgctccagagacagaaatacatatattgtacgatctcacttacatgtggaatctgaaaaaacaaacccacagaagtagagagtagattggtggttgccagggttctggaaggggaaatggggagatattggtcaaggggtatgaagtttcagttatgctaagtgaacatgctttggaaacctaaggtatggtagtatgagtatagtaaacaatactgcactgtatacttgaactttcatgagagggtagatcttaagtgttctcactacacatgaagaaattgaaaacaggaattatgtgaggtgatagatatattttaaaagaaaatatttttactttcaacatggtctcatagggacttctttttgatgttggtgttagacaggactcacatatgcctcgggtatctcagggtggcagacagactgtaaagtggccctgcctgtccctcaaccctggtgttgggcctttgtgtaacctccttcttttgagtgttgttggtgacagtgacttgcttctagccaatagactatggcaaaggtgataggctgtcactccaatgattgtgttatgttatttaagaccccatcttgttagcagactccctttagagactgctgacttgacgtgagtggccatgctgaaacagcttacctggcagagactgtgagaggcctctaggaccagagagcagtctcccaccaacacccaggaagaaacaggggctctcagtcctgcttcggaaggcccctcaaccacatgataatgaattctctcactggaaatacaaaacccgtttacaccattatcatttacatctcaggattcatggaggatctaagtagagatctggatggagaggtagacgaagtgtttgattttgaagcgatttgtgggcaaaggcagtaaggtaagcatggatgtgtaacagggaagtactgagacagaattctttgatgtcactatttttcctgtgtatctcctatacttgtctctatatttaaagtcttaagaatgttctgatgggaagaggagtgttcatacggcctgaggatggaactcagtcacagagacccagaaaaatcatagacattgatactaaccatggcagcatgcaggaaaactggacaaggcaaattagggtaatttgcaggcctagtggtaactgacactaggataaatttgcatcctgtctgagccaagagcacacctctcctctttagcctgagcatcctcctctctaagtgagctctggttcagatgcagagcctgaccactctttagcactcctaggaaagattaaaaacaggactgtggctaggggcagggaggaggccagggaccaaggcactcaagtggggactgcaggaggggtcagaatgcaagcagcactgacggccttcttcgtgttgctctttagcctgctgagtcttctggggattgcagcgaatggcttcattgtgctggtgctgggcagggagtggctgcgatatggcaggttgctgcccttggatatgatcctcattagcttgggtgcctcccgcttctgcctgcagttggttgggacggtgcacaacttctactactctgcccagaaggtcgagtactctgggggtctcggccgacagttcttccatctacactggcacttcctgaactcagccaccttctggttttgcagctggctcagtgtcctgttctgtgtgaagattgctaacatcacacactccaccttcctgtggctgaagtggaggttcccagggtgggtgccctggctcctgttgggctctgtcctgatctccttcatcataaccctgctgtttttttgggtgaactaccctgtatatcaagaatttttaattagaaaattttctgggaacatgacctacaagtggaatacaaggatagaaacatactatttcccatccctgaaactggtcatctggtcaattcctttttctgtttttctggtctcaattatgctgttaattaattctctgaggaggcatactcagagaatgcagcacaacgggcacagcctgcaggaccccagcacccaggctcacaccagagctctgaagtccctcatctccttcctcattctttatgctctgtcctttctgtccctgatcattgatgccgcaaaatttatctccatgcagaacgacttttactggccatggcaaattgcagtctacctgtgcatatctgtccatcccttcatcctcatcttcagcaacctcaagcttcgaagcgtgttctcgcagctcctgttgttggcaaggggcttctgggtggcctagatggcatggtttccttatctagacccccggaaaagaaaggtgaggatggcagagctgtggcccactgacatggagg

SEQ ID NO: 11390 - DNA, 6000 bp, Homo sapiens
tttaattgctactttttttgtttctttcagtgtttactctgcctgagaacctgatccgcagaagaatgtggagagttcattaatgttttgctttctcatatttaatcaaattgatatctagttagtcaataaataattattgaatacctaccatattccaggcacaatatatagtcaaatgtatttcacctttttagtcacttactagatcaataaatcaaatgaatgaatgaatgcctaaatatcattttttggttttttttgttgttgtttgtttttttaccatctttggactgaatctggaatttctggcttgcttaaatcttgcctactataatcggtatacttgaaagacactactatttctccacccacccccaccccatagtttctttcattctatgtgatacaaagaaaatctcatttaaatgcaaatggattaaattcatcaaaggattggaaaaagtgaaagaagatactaaaaataaaattaaatataacccagttgcaaacataacgttcaggcattgtgtatgttttaaatgatatatatgtacaagttagccatttaaaaatttggcaaattattttatgactaataaattatccaacatctccatgatttctaagtaaatatgtaagactgaaatcatttctttgcagatgaccaaacctgtctatttcaaaaagtaaaacttaagatctgatgagccaacaaactcctaatgagtcacatcatattctttaaataaaagctatttttaaatcctcaggtcaaataaagtattagatgctttactcccgagtaataagaatatttgaggccaggtgcagtggctcatgtctgtattctcagcactttgggaggctgaggcagaaggactgcttgaggccagtagtttgagaccagcctggacaacacagtgagaccctatctctaaaaaaaagtttttaaaaaaaggtagccagacatggtagagcacacgtgtaatcccagctactggggaggctaggtgggaggatcacctgagcctagggaggttgaggttgcaacgaactatgattgcgccactgcactccagcctaagtgacagaacgagatcctgcctcaaaaagagaaagaaaaaaaaaaagacaaaggagtgttatgagtgtattagttttaacaaatattctttttttccttttctttttgttgagacagggtctcactctattgcccaggctgaagtgcaatggttctatcatagctcaccacaacctcaaactgctgggctcaagcaaccctcctgcctcagcctcccaagcgggtagaactacaggcatgtgccaccacgcccagctactttttttgtttctgttttacttgtttttttgagacagggtttcactatgttgcccaggctggtattaaactactggtgtcaagcaatcctcctgcctcagcctcccaaagtgctgggattacaggcatgagccaccgcatccagcctcaaatatttctgattcttggaaataaatcatctaatactttacttgacctgaggatttaaaaatagctttcattttaagaatgttgtgtgactcattagaaaggagtttgtcagctcatcagatcttaagttttaccttttgaagtagacaggtttcgtcatgtgtaaagaaatgatttcagtcttacatatttacttagaagccatggaaacgttggttaatttattagtcatcaaataatttgccaaatttttaaatggctaacttgtacatatatatcacttaaagcaagcttgtccaaattgcaggtggcccaggacagctttgaatgtggcccaacacaaatatgtaaattttcttaaaatattatgtgattttttttttaagttcgttagccatcgttagtgttagtggattttatgtgtggctcaagacaattcttcttctttcaacatggtccagggaagccaaaagattggacacccctgaaagtatacacaatgcctgaatgttacatttgcaactgggttatatttaatttttttttttagtctctcctttcacttttgccaaccctttggtaaatttaatccattgagttaagtaagatgttctttgtatcatgtagaatgaaagaaactatgggggagaaaaagaaaataaaagtgtctttcaagtattcagattatagtagacattccagattcagtcaaaggatggttaaaaaaactatgcattcattcatttattcatttgtatttattcattaatttgtccacacagtaagtatttactgtcaggattacaaaagtgagagcaccttttccttgttcacaaggagtgtgttaacaacccagtcctgtaaaagaaatcagggtttcaacccatgtggcaactgtccttaaagaatctgagtgtcttcaccaagctctcctttcttcttgactctccatctagctttcaaagaaattcatacttgtgcatagtggattttttttctttgtataatcatttggggagttacaaaaggaaataatgaaggactaaataaagaaattaagttttttataagatgtagactgggtacacggttcatgcctacaatcccagcactttgggaggccgaggtgggaggagcacttgaacccaaaagtttgaaaccagcctgggtgacataataatacattgtctgtacaaaaaatatttatttaaaaaaattagctaggtatggtggcatgcacctgtaatcccagctacttgggaggctgagggggaggatcgcttgaatctgatatgtcaaaactacagtgagccgtaatcacaccaccgcattccagggcaggtttcacagggaaaccgtctcaaaaaaataaataaataaataaagatgtttataaggtgtaaattcaaatgcatttcacaaccaaatatttcatatgctttgcgtgttttccaattaaatgtagaaggttggcctaggagagtatttttttaatagaatcctgaaaaaaaaatataacccttggccatgtgttatgaagttacaatattcactagaatttatttgtgtcttgctgataataatcaacaatttattgataatgcttataagtatacaatcatttgttaccactggaaaaggatccagtgggaacgttctttagggctccaattagattagttttttaactttttcttttctaacttttaagttcaggggtacaaatgcaggtttgttacataggtaaacaaacttgtgtcttgagggttttttgtacaaattatctcatcacccagatattaagcctagtacccattagttattttttgtgatcctcttcctcctcccaccctttaccctgtgataggccccagtactgtgttgttcccctctatgtgtccatgtgttctcatcatttagctcctgcttatatgtgagaacattcggtatttggttttctgttcctgcattagtttgctaaggataatggtctccagctccatccatgtccatcaaaggacaagatctcattctttttttatggctgcatagtattccatggtgtatatgtaccacattttctttatccagtctatcgttggtggacatttagggtggttccatgtctttgctccaatgacagctggaccagggtcttatcaaaagcagcatatttccttaatctggagaagttctccttaatccagagaagctttttcttcagagataagcaggttcaacggctcagccgcaggttatttttgcctagcaaaggcactaacaaaaacatgtgcactggcaaaatactggatttctacatggtatattgaggaaaatgttatctaggacttaaggacaaaaacccaaatattatttggcacatcaccaattcacaaataccaattacctgacaatttattgctataataatctgcaaaataatgaagtcactaaattagctctttgcaaaaaaagttttaattagccacctgtaaagtgtttagcaattcttatgttgctgaagcacaattaattttttatgaatggtcatttctggtgtttttgaaagatacttcatttaaattttttctccatagtttctttcattctacatgtaaaaagaacatcttacttaaacacaaatggattaaatttaccaaagggttggcaaaagtgaaaggagagactagaaaagaaatgatatataacgcagtggcaaacataacattcaggcattgtgaatgttttaaatgatacgtatgtacaaactcgcccagaaaaatctaatttctacaaattgtgtgagttgttattcaaaaccagtttttggtaaatcagtaactgtgcatcaatcagtagattaactgccaaatcaccaattatcggttcctatttatgacccattgtaaaataaagattgcaattagaacccatttgtagcacatccattagttccttctcaggaacccaaacaatcacaatgtcattaaaattgttttttgtctttctacttcttctgttattatataaactgctccagagtgcaaaggttgatttcagatgttgaaagcaaaatagttgatatttctactgagaaactgggattacatcatctttttttctaggactactctaattcccatatttggagttcttccattactgattatttctacacttcaggaattctcttagtaatttttatatgtgcagcttcaagacaatccttattagatggtcattttacttccacttttggtacgacattctttcttcccatgatgtgtcaatggctctatgtatcctatcactggtgacacaatcccttctataacactggatacttacaatcagtaattaacttaatgtgtagctcaatcactaatgttaaaagtttatcttttaaaaatgactaaattcataaaataatgtctaggtgttttttgacaatctggtcctaagtgatctttttctttttcacagggaaatgggggaaaatcagacaatggtcacagagttcctcctactgggatttctcctgggcccaaggattcagatgctcctctttgggctcttctccctgttctatatcttcaccctgctggggaacggggccatcctggggctcatctcactggactccagactccacacccccatgtacttcttcctctcacacctggctgtcgtcgacatcgcctacacccgcaacacggtgccccagatgctggcgaacctcctgcatccagccaagcccatctcctttgctggctgcatgacgcagacctttctctgtttgagttttggacacagcgaatgtctcctgctggtgctgatgtcctacgatcgttacgtggccatctgccaccctctccgatactccgtcatcatgacctggagagtctgcatcaccctggccgtcacttcctggacgtgtggctccctcctggctctggcccatgtggttctcatcctaagactgcccttctctgggcctcatgaaatcaaccacttcttctgtgaaatcctgtctgtcctcaggctggcctgtgctgacacctggctcaaccaggtggtcatctttgcagcctgcgtgttcttcctggtggggccacccagcctggtgcttgtctcctactcgcacatcctggcggccatcctgaggatccagtctggggagggccgcagaaaggccttctccacctgctcctcccacctctgcgtggtgggactcttctttggcagtgccatcatcatgtacatggcccccaagtcccgccatcctgaggagcagcaaaaggtcttttttctattttacagttttttcaacccaacacttaaccccctgatttacagcctgaggaacggagaggtcaagggtgccctgaggagagcactgggcaaggaaagtcattcctaactggtgtgacatttgactctccctcctcagtcatctcctggaatcttggtaccaaataccacctaagttcactactctctttata

SEQ ID NO: 11391 - DNA, 6000 bp, Homo sapiens
taagctttgcaaatcataaagcccaagcagttgggctgctttcactgcagccaggacttctgctagagccatttcctgctcttagccccaaccgaacctggcagcctttccacatcaccaggatgtgaatcagagcagctgcctctggcattcaaagtgctgaccaagtattaggtttcctttccagcgggggaggtaccagatgcaatacgtatatttttataatgaaaggaataccctgttacactccaggccactgaagccctaacatcatcaatgacgttgttggggtccgattcttcaaagacaaaattatttctcacatcttggagcacacgtattttacagaggactctaacaaacttgagacttcttttcttgcttgtcttgtcttattgacatcccacatcaacacagtggagcagcgtgatgttctgatgacagcagttttcaaacactgtggtctcaggaccccttcatattctttaaaattgagtaccccaaagagcttttgtttacatgggttatatatattaatatttactggaaaataaactagagacattttcaacatatttgtgtatttgtttattaaaaataaaataaacccattacatgtctatataagtgatacctcattatgaaaaataattatttttcataaaatatttctgaatagcattaacatttttgcaaatctcttcaagacagctagaacatcatatgtttctacattccatctgttgggatatgttattttagtttaagattgtgaagaacatccactttcatacagatatacagcagacaatagagtactttaatactattttcagataattatggatattttttctgtgatgctatattaaaactcaatgagtggtagcaccttaaagatttgttgtgatgtggaatctgaaattgtatcatgcatgtttattatgctgttacattaaaattcgttggtcttggccgggtgtggtggcttaggcctgtaattccaacaatttgggaggctgatggggatggatcaattgaggtcaggagttcgagaccagcctggacaacatggtaaaatccccatctctactacaaatacaaaaaacttagctgggaatcgcttgaacccggaagatggaagttgcagtgagccaagattgtgccactgcactccagcctggatgacagagtgagactctgtctcaaaaaacagaagcaaaaacaaaccaaaaaatcagctcctacttgaatgaaatagattcataccttcccattatagaaaaatctaaaataagtatttttctataagccagtgacatgacttgattacaaaccgtaagtaacctcaatagacaactgagtctgcactcgaatgattgctagatggctgcaaactaccttttggaaaggttttagtagatgtcccatgatttgtttatatgtctataattccctcttctccagtatagcacctcgttcagttatgtggttgtatcttttgctagtatcttttgtcggatggtatattagcttgctagggctgccataacaaaataccacagactgagtggctcatactagaaatttattttttcctagttctggcagctggaaatccaatcttgatatcttctaatcttccaatactggtatcttctaatgtctctctccttggcttgtagatggccaccttcttgctttattctcacgtggtctatcctatgcacacacacatccttggtgtctctttgcatgtctaaatttcctcttttcataaggatgtcagtcagattgaatgaggccctatcctatggcctcattttaacttaatcatccctttaaagatcttatttctaaatatagtcacactatgaggttctaggggttaggacttccatatataaatctggcagggggtaagggaggggggaaggagagacacagtttaacccataagaggtgacaacccaggaaggtatatttcccaatactgccatttcagaggtaccatatggcagacgggagttttataccttttcagattcttttccttttcagtgtttttcaagataaaattggggctatgctttaagatgaagctgaaatattatgattttttatttgtgtatttttaagagataagccagactttctgaacagggtttgtcccttctggaaatgctccattggatctctcctttgtgggaatattctattcagtccctaaatttatgacactctatttttcacaaattatcctcagtcatccttggctttgtccttattaactattctgctgctcacttagctatcaatacagacagctgtggcctggggaatcagtagggaatataatcacaagcccataatgcctttcaagattcatagagatccattgaggcccgcctgtgggcaacacagttcatccattcctccagataacaggccctgagactagatgcagaactttttccaaagaagaggattcatagtttacatctcattcccattagttccatgacctcaagaaggtgatttgccttaaagaagcacaagcttgcttccagattggggccatgcacagttgctctgcatgcaggcagtcaccatcagctgtttttaagtggtgtttgaaacagccctgtgaataatccggtatttaatgatgttgtcccgtcctctaggttccagtggaggactttctcttttctcagtgcattctcctgatacttgttttactctgcaagaaacaaaatcttatatgaaaacatgttgctaatctttaaatagttaaaactttctgactaaatttacttgtaaatgcacaggatttcacgacactcattttatatacttaaaaacaaagcttattaacaccttacttttttcctgccatttctgtccatcatttttaaaatttcaacttcttttatattgctatatcatgtgcctctttatgaggtgctttcaatcataatttctggttagaagcttctgatattttctcagtttctgtggatgtgtttgtggttgttttgtgtgcatgtgtgaggggagagttaaattacctctttcttttgagtgagatggagctcttataataacttgtatcccaatttttccttctcaggaagcaaatttagtagggaccactggagactacccatctgccttatgactctgaggagataaagcattcttcagccattcctgttggagccaggtgaagcattctagctccaacacctcaaccatctctaggaacagcagcaactgctatctcgcctctcctcctttaaggaaaacaacccttaagggaagcaactgagagctgggtaagaagaaagcaatcacgtgctaaaatcttccggagaacaaaagttagtgaaactatcttagacccctaattcagaactcttgcaggaagagtaaatacttatggaaagctgagaaagcagtgtctagggcctccagtccacccctagagggacgtgtgggggtggctaggggaacgttttgaggaaagttcattggtcaacttgttcaacgtggcaaactcatttcaggcaagagaggcagcaccgtggacagcgccaaccctcctgctcccgggcggggcgaggtggcagcaccgcggacagcaccacatgtggtggcgcacactgggagccgccaggcgcggggagcgcagcagcaccgcggacagccccaaagccgcgcgctctgagccaggaggcggggagagatggccttatcagctgatggcttacgtagggctagatctccacttggataaggcaggtctcggtgggcgcgccagcattcgctctccggagctgcagcctccgaaggggtggcgggggcaacagggacagaaggcaggtcccagaaagcaggttcccccaaaactggcttccctagcacggagttaaggctgcagccggctgcctagagagaagggtgggcagggagacaacgcggtgagagcgactgctctgacgcaccagcccctctcctgcacccacacgctgctggccgcccagcttctccccgatctgggagatgctcggctctgggcggccaaacagcctttccaccaaggcgaggagccctgggctcctgacagcttaggcgggccctggctgcgacacgcagcccctcgcctctgcttccttagcctctgagggcttcagacctgccgcgcttgcagccacaccatctccaacggatgctcactagcaggaaattggggccaaattcacaggcactttccagaaactcccccactggccagaggttgcaaacatccggattggctctgggcacagtggccgccttaagtcctcctgaacaccccttctgcaagtaccccagggcggtctcctgacccagagatggatttacctgtgaacctaacctccttttccctctccaccccctcccctttggagaccaaccacagcctcggcaaagacgacctgcgccccagctcgcccctgctctcggtcttcggagtgcttattctcaccttgctgggctttctggtggcggcgacgttcgcctggaacctgctggtgctggcgaccatcctccgtgtacgcaccttccaccgcgtgccccacaacctggtggcatccatggccgtctcggatgtcctggtggccgcgctggtcatgccgctgagcctggtgcacgagctgtccgggcgccgctggcagctaggtcggaggctgtgccagctttggatcgcgtgcgacgtgctttgctgcacggccagcatctggaacgtgacggccatagccctggaccgctactggtccatcacgcgccacatggaatacacgctccgcacccgcaagtgcgtctccaacgtcatgatcgcgctcacctgggcactctccgctgtcatctctctggccccgctgctttttggctggggagagacgtactctgagggcagcgaggagtgccaggtaagccgcgagccttcctacgccgtgttctccaccgtaggcgccttctacctgccgctctgtgtggtgctcttcgtgtactggaagatctacaaggctgccaagttccgcgtgggctccaggaagaccaatagcgtctcacccatatccgaagctgtggaggtgggtatctcagcaatccttaaaaatactcgacttgcatctgtacaggctatatccccaggccacctgccccacccccacacttgtagaaaatggaactttttgtgtttgggagtggggggagtaaactgggagagtggaagaaagcatcagagatgtactttgctctgacatgttccctctcacagggctaatcatatcatgttccttctctaatgggttgtttgttaaatatacagaacacgaggagttcagactgcgtcattctgcagggtcccctttggcccccaaattctatggatctataacaccctttagaacatctgaataagctggtatctggggtacgctgattcagtacactggaaaaaactagcagcttccagcacttagaatgggggtgttccaggaggaggggaggcagggatgggagcatgatttgataagaagactgccatgagtcaggtgatgcaggttagcatttcatcctagtctattctttttctttgcaaattacagcagccggtttattaaaaatatggtatcacctaggttactgtcattctgtggcatcctcccgtcctgacgtaagactgaagatgttgactgcactagtcccggagcctgcatttgttatctgcttccactgccttagggtgttactttatgggtctatcccccacagccctattaggttgtaggtgtgactgaggaccacttgtctgccttcctgaacatgagtaaagctgcggaaggaaattaaaaatccaggaaagagaattccctagctctctatgagaggtatttactgcatgacaaccactatagcaacagcgagggagcttttctcatcttctcccac

SEQ ID NO: 11392 - DNA, 6000 bp, Homo sapiens
gataagagcactggctggggcatctgtgccactgtgactctccatgcctgacccagctagaaccctgcaggagaactgcctctgcttccttcgtgcctggtgccaccacctgcctagaaacgggcaagggtggcttgggctgtgagctgctgctactctcagctccctgggggagcccgtggccacaggagagggagggacagtatgctgatgcttcttgggcttgcgtggcacctcccgaggcccaggggagggcaggagagcaggaggaggcaggagagagaggcgctgaggaaggaacttgtcgtaaatcagggagtgagtgcacccaacggcttctcccagctgcttcctgtcagggtgtggaaggaggcatgatgtgcagaggaccggggggacttggcacagccacgggaaggcggctgccccaccggcctcacgctggcttcccacatcacgggggcttggcgaggaagggagagagcaggcacgagaggtcagtcgtgccgggcccttggggtacgttcaccctggcactcccgatgccttccctactgcagagctgggcctctgcctggggctctagagagccggtggtcacgaggtgcacgtgctcgccccgtcctgccacagaggaggaggatgtgtgctcgctcaacacaggcagtgctgggatggggagacgtgtgtttctgtcccctcaaacaaaacactcactttgaaaacatccagaggccttcgttctaaagtaggaaggtgggctcctccctgaaggagcttcctctctgctttctcccctcagtctgtctgggacagaggaggaagagatagactgagcaggtgctggccgcctttctccatcccttacaacgccacgagcttcagcgccatcacgtagtccattctgatggccttctctccttaaaattctcctgcgtcagctcgccacatgtgtatgaccttgcccctgtacatttccatgagaacacagaaagtgactgctcttcccacaagccctgatgtcagggcagcctggaagccttgaccccgcctgctggtgtctgtctttagagcagggttcaaagtggaatcttatagaaagtggtataattggtttttaatacgctacctttgaagggactcattgcgtgcctgttcatatgcgggctgctctgtggtcggtggttgcgctctcccggctcctcccgtgccccgtgtgtgcctcgcatttggcggctcagcgcttcctgaaacggggtcctgggtgattccgcagggcccttcgcactatggaacacgtctcagattgtatcgatgattggtccaggcaggagaagactggccatcattccaccacaacaatccaaatggaagattcccctgtgtttgctactataaatcaggtcataaaaatgtgggaaggaataatggactctttctagaaactggaagatgttttgctagatgctccttttcgtcaggatgttttgtctttaaggacaatgtcttgggtcccttaggccatcttcgacagaagcaagactgtacccaggagccaaaatctaaaatcctattctagcctgtcctttgctggccgcatggccaggagtgggccagccttcatgtctggaaagagagtcccccatcagaggggcctgcatcgcaccacacaccaaaacccagcagcgaaaattgaaaaacagccagaatttgaaccttggggttggagctaaagaacctgcattaaacattttctttaatggtagtttttttattttagaaaacacacggacactctctgcctttttcctttgctttcccattcacacggaggcgaaatgccactgctcttaccctgttcagttcttgtatttgccacatcaggattcctcagtccagactgagctgtgaatattcttccttcctgacagggggagtcggtgaagtacttcctggacaacttggaccggatcggccagctggtgagtaagcacgcccgcccgaagaagctgggctccagggttagaaaacgtgtccagagaccaaagcagtccacgttgtgaggactttggctggactgacaggccgagcttgttctgtcacattaccacgaatagtactgtaatggcacgctctcacttggatctgggccccgtctcagtggggaggggaggaaactgcctttgcccagatcaccataaaggagacagacagaggagttcatgagtgaaaggaggacttcctttatctcatggaaaattcaaacatactcaaaaacaaatagtctaatgaaaccccaggcatggcagttatcactgattaccagtcttgtttcagcagccctcccccggcctccgggagcaaatgcagagaatattttagagtgtacctcaaaaagacaagacgaaaaatgacaaccgcagtaccgtatggctcctgaaaaattggcagtaattccgtaatgtcaacctagtcagtttagagattttccctgttgtctcattaatgttttcatgttgattttgctttgttttagcagagtttgaatcaacaacctaataaggtcatgcattgccattggtcaggatcacttaagtgttaatctgtatgtctctcctttttttctttcaacttgtttattggagtaactggattatttatcctgtagggtttcttaccatgtggactttgctcttccacccctgcagtgttattgaagatgtttctctgtcccctgcacaccccgtgggtggtagtcagacctctagatcgaggcatgatcatgtccgtgtttggtgttttggcaagaagctgcctgagtggtgtgtgcactcatcacgggaggtgttttgttggttttttgttctgttttgtttttcgattttttgagacagggtctcactctgtcacccaggctggagtacagtggcacgatcgtaactcattgtagcctcaacctcctaggttcaaatgatcctcctgtctcggcctcccaagtagctgggactatagcatgaggcaccacgcccagctaatgtttttacttcttgtaaatatggggttttactatgttgcccaggctgttcttgaacttctgggctcaaggtattcctcccacttcccaaagcaccaggattataggtgtgagccaccgtgcctggcctggaggattattaatagtgcaaagtcaaagtgagtgaagagtatgcttgcctgtgtgtcgctaaagacttaaagaattgtctaagaataacattaaatgtattgcagattgaatttacatcacattcaaaacctaaattaattcacagtaaggttttggaagctataagctttaggagttagaaaaataaaaaggtatctctggtatggaaacaaaaaagatggtaaatttcctctggagaagaaaatggatgtggttttgcgctgggcctgcccacgagtgttctgagcattcgtcctcagactggtgagcctccgttcgttttgaaatgaagtatttgattctttctgtttcacggccagttgataatgttataaatgaaatttgcttttggtttctggttcaacctgttgcaaaagtcagtctctttccttcttatctttttgccatctttttgtttctattttctctgttctttcttcctccccctaaatttctgcctcatcctgtattttacagaattactttcctagtaagcaagatatcctgctggctaggaaagccaccaagggaattgtggagcatgacttcgttattaagaagatcccctttaagatggtggatgtgggcggccagcggtcccagcgccagaagtggttccagtgcttcgacgggatcacgtccatcctgttcatggtctcctccagcgagtacgaccaggtcctcatggaggacaggcgcaccaaccggctggtggagtccatgaacatcttcgagaccatcgtcaacaacaagctcttcttcaacgtctccatcattctcttcctcaacaagatggacctcctggtggagaaggtgaagaccgtgagcatcaagaagcacttcccggacttcaggggcgacccgcacaggctggaggacgtccagcgctacctggtccagtgcttcgacaggaagagacggaaccgcagcaagccactcttccaccacttcaccaccgccatcgacaccgagaacgtccgcttcgtgttccatgctgtgaaagacaccatcctgcaggagaacctgaaggacatcatgctgcagtgagcgaggaagccccggggtttgtcgtcgttgagcagcccccacggctgtcggtcagactcttgggtgtgtgttgtctgtgtggtccttgagtgggtttctcggatccgtgccctggaatacctggctcaggaatgctgtcagaccagccagccagcgagctctaggcaaaaggacatggaaactgtcacgttagctactgaatcctgggggcgagtgaaactactgaaaatccgagtgatgatgttgtgaatacggaacacctaatcacacagcttgctttgcttttacagaaacgttcctctttttctgacgcagtttaattgaggaccgtgttgtgtgtgtatgtgtgtacacacgctctgtctttaatgacagaaacacaaaaaccagctggccttgcagacggcttttctaactcacaagtcttccctgagacagactaacctgaaagctttgcctaacagtagcttgtagagatccagtgcacgccgatgctgctaaactcagtgcctgagcccggccctgcagccccagccgcagtgtctgaaggccacctcccaaagggagcacgttgccttttcaaactcccgtgccgatttcctaagagcccctagtccaagcctctcagatgaagctgaggagccgtgcctaggatcccttcccagctctgaggacgggctgcagagctctgcaggtgtggattcaccttacgcccctacagcaggctcagcccttcccaccctgccccatgcccagcagcacaacacggagtgagacaggatgcccacggtgactgccgctccgtccgtgcacacacagcggtgctcttctccccttagccacccactgcccaacccaacggcaaagacacagaaaccaggtccccttgcagacggctctcccatcttcctgcaagtcatctgctcacacacagttggcagcacatagcgtttccttctttcagaaacattcctcttctggggcttcagaaagctggcaaggccactagcagagcttttgttaatgccccagctgcttggcgagctaacagctgacctttcgggaagcccacagacgctggaggaatcttgagtttctccaaactgccgctccaccagtgcctttggacagccgtgcctgttcgccgctctccctaagtctgattctcatcgaggcccctcgcttctatgactgtgcttgcagaagagtaaacactctcggatgccgctgtcctgggggagcccgcgggagcctgtgaatgttgatacgagctggccagtcctgggcccagctcacttgtccagctacctgccaggtggctttcactgtgtttaaaatacattgcattccaagctggtcccctctgtgtatcactctactgagaaatcctgcctagtgtgttttgggatgtgtcctagcatttacaagaaaatgaaaagcgtcctcttaattggcacccgaatgttgctgtggctcagtcacatatcccagggccctcgtcccgaggccgtgctgccccgagccccgagcccctctgcagctcacccttggcttgttttccgcaaacccggtaaacgcaagcccttggggcagatgcagaagcagaagagggaggggaaacctgcctctgggtcaccctgttagcacagcgttctcatcgggagacagcatggaactctctctcgcagtgctcgaggctgtgtgtcagtgtttgctgggcttgtggctccttttttggctggataaag

SEQ ID NO: 11393 - DNA, 6000 bp, Homo sapiens
cagaccctcccctacccctcccctgcttggggacacatgtgtccctaagtcctccagcccttcaaagtcaccgtttcctttcacaactacatacaatgaccgagccaccccatcctatcagatttacagaaggtctaggctccctgcaacagtgctggctcccaggcaggtgggtggggtgtcttacattttcctggtcactttttactctaaagtctactcctgttcaattcctgaacacttctgtgttggtcagaattccaggggtagtgagcaacagaaacaaactttaaacataaaggaaggtttattagaaagctcccttactggaggcaggggcaaggctagcctcaggtccaactggagttgaggccttaaaggctaccaggcccttctttcctcctctcttctctgcccatgctcttggcttggctctcaatgaagccgctacacttggcatctctggttcttcatgagaaaggaataggctctctctttggaacaaagtttaaaaattccagctgagcaagatggctcatacctgtaatcccagcactttgggaggccaagatgggaggatcgcttgagcccaggagttcgagaccagcctaggtaacataatgagactctgtgtctacaaaaaccattttaaaaattagctgggcatggtggcccatgcctgtagttccagctactcaggaggctgaggtgtgaagatcacttgatcctggaaggtagaggctatagtgagccatgatcatgccactgtactccagcctaggtgacagcataagacccggtctcaaaaaataaaaataaaaatcccagaggagggctatgattgggtaatttcagatcagctgtccattcctgtaccaaccaaccatggtcagcggggtgagacactctcattgtccagcttggtgaatagcatttggccaatccacagtggctggctgctagcctgatcacgtggctggaaaagagcatgcctgttctttgctcccaagggaacaaaatccgttcttaggaggcagaaccatctgatatgagaatggtctgtggccctccaaagaggcaagtacatgacacatatacagtatgtctgtggtattaaaatttcatggtaggagggaaggcaattaggaaaataaatatctaaaaagcctccttgtaaataataatgggaaaaaaaaggctgagcagcgttggagtagaggatggagcatttctcagaaggacagtaccatcttgggacaaaacaaagaaatgtccagttcagctcccgcttcctgcaacctctcacctctcctaaccctgtatccaacatgccccagcacctcctccttcactgctggcacaggctgttgtgtattgtagacttttctgaagatgaggcataacattcattgacaattcaccaccatagggaagctcctggttcatccatgcttggacctggcctgtgccagtccgtgtctcctcttctttttcctcctcctttctagagcccagctcctagcccttctacactgtctccatcttggaatgccatgctcaatctagtcatttcaatagctttgctttacaaagctagttaggtctctttccacacacttctcttttagatcatgctgagtttgtctttcatcaccaaaaaggcccatgaaggcattttcaaaaacataaagcctcctttccacactgaatctacccttagtaacacaaagcttataaacgagcaggttgttattaacctgctcagatcacgttgctaggcaaggtttattctaccaccagcagcctcagaaagtgaaaggctgtctagaggaaaccctgcaggctcaagttttttgtttttttattgtcgttgtttgttgttaacaccttccatttagagggatcaagtccagacagacttctttgaccatttaggctcccttagatggggttccccaaaggtgaggattcctgtgcagggatgtgtaaagaaaatgttcccaggagcgactggtaagagacgaggcaaggcaggacggagaatggaaaagatcccaggcagagtcccggcctctgcctggttccacaaggagttctagaatgtccattacacttcagagttccttccacctccaggcaaaggaacaccaatcactcaatgctaaggatgcccttagggggttgggaggatataaattcctgggtactttgtgcaaaaagtggttctcattgccccaggagagttctaagaaagttctaggttgtgaaaagggacctatttagaagcacaaggaaagccaggggaatggcactgacatggattgaatctgtgtgcccccaccccccagattcccaagttgaagctttaacccttgatgtgatgctatttgggaggtaattagggtttagggttaggtgaggtcatgagggcagaatccccatgatggaattagtgcctttagaagaagaggaagagacaagagtccaacatctctgccatgtgaggaaacagcaagaaggtgccacctacagacccaagagagggccctcatcagaacctgaccatgctggcaccctgatcttggatatcaccgcctccagaatagagagaaatcaatgtctgttgttaaggccacccagggtatggtactctgctacagcagcccaagctaagacaggcacccagaacacccccccaagagaggaacctgggctaagcaccacagtgcctactgctacccggaccctcctaaagctgcagagaatctggcttccctccagcttgccccacccagccaggctcccagctgcatgagaccttgctccctgcttctgctcaggagacttccccatttgcagtaagggtctcccattcctccatctgcttaaacccttcaaggtgctcctgcagtaccttcccaggaagtgccctctcactcccctgagctggcccagcacctgtgccatgtcccacctcccatcagttatggatgccaggtctcatgggttccccatgcctctccttcccatgtccctgcacactctgaggctggcctctgctcttggtgcctgctattaggctggcccctggagacctacagctgaaggctgctgaagggaactgtcccagccatctttcagagtctgcccagctctcaaagtccttcccagcttatgatgttttgtaggaggtatccaccttctacaaggagccctctctgaccaagcccatctggctgggtccgggaaagccaaatcctgccccaggacttgggatagggttttcaccctgccaccttcaaataaatgaggaatccgatcaattcttcctccatttttcctataaagatttccctgtaccactgagactaagctctgtacaaaataggagggaagggagaagaaaaaacaaggagaggaaggttggggcacatccacattcatccttatcctcccagagcttggagaacagtccacaccagcgaggcagagcttcagactcagacctgtgagatttcacaggagagggaggtgggacctggaacagccaggaaggctgcctggaggaaggggctgagggtggggaggaagcactcaaggacagaaaagtgtcccatgtcttagatagggagaccggaaggagcacagagtgtctgagttacttaaatcgggactgagttttccaaggtctctctccaccatgcctgcatctccaggagaaagtttggtgccccactaatcacattcctcacatgctttcccctcagatcctaacaacaagcaaggtgcaactgtggcttaagcttttaaaccccctgcaccaggcccacctgtcaggaacagctcctaaggaggcttctgaggctctggaagaacagacctcacctcatgagccctgacccagccccaggttgaacctgtccccgccaagaacagcactgctcagccacctgatatcaggatccctaaccatttcctgaaatggaacctgggccccatacagacagacacctgggccccatcccaagctacttcattggaatctctgggtgagccctgccatggctgtatttgctgtcggttgggttttttttttttttttttgaaagcattttattttgatagaatttcaaacgtacagaaaagttggaagaatgatccaaagcatatccatataccccttttccagatttaccaacaatttacattttgccccatctgctctcttgttctatctatgtatctatctgagtttatttctgaaccatttgaaagtatgttggaaacatggtgcccctttaatcctaaatgtgtattttccaagaatgagaacattctcttacctacccacagtacagtatcagaatcagcagatgtagcattgatacagtactatctaacccagcatccacactcccatctcagtcatcccagtaggcattagcacctgttaaaagctcctcagataggtgttaggcagtgctggttcagctgagacccagggcagcccaaccctgtgctgaagcagggaccacagcctaggcccctcctgcctgtctcaattcctctctcccacctggggagctacagccccgggcaatgctggcagccgatagaaggcattaaccccttctctgcaggctggatggagagcatagccccttggctggctgggtagcagcagctgtctgggaccagctataaataacctggaggctgtgggctgtggggcggggtcaccactgccctgtggaagaagtgggtggagaatacctcctcatgcccaaggccttaccttggcctcccctccagggccgggtggggtggggctggccagggtgtgaccaccgtgctgggcagcaggctccagtccctaacccccagccactactggcatgaggggtccctcagggcccccaggcctcctctacgtcccacacctcctcctctgcctgctctgcctcctcccaccgccgctccaatacgtaagtgcagggagtgggagtccacgaggtggggcgccaggagcacggagctcccagctctcatgactaggggcgggggtctcagggcctggtggctgggctggatcggggatccttgtgtctgatgatgaattggagatcccgtgcctgggtgagggggtctcagggcctggtggctgggctggatcggggatccttgtgtctgatgatgaattggagatcccgtgcctgggtgagggggcaggggaagggaagatgaaactgtgaggctggccaggatgagactgggagacccctgtggataagcagagggttctggggtgacatcctagcatccagaacttgactacctcagggtccaagattccctgtctcctatccattctctccccacccccatgacccccctccatctctcctgcaagatccttgacttctttccccagcccacccctagttctgacccttacccccagggacccgcagagagccacctcctgcccctgctgccttgtctccatccttcctctcagtgcctggaatcaggcagcccccagtaccagatgagcgatggggacagagtgggctctgggagaaccagcctctccaagggtttctcaagactcagagcttcatccagccacaccccgtgcctttgtccagagtcaggggccaccgatggaaggtggggagaagggacacagagcgaccatcaaaagagagctgaagaagtaggggagaggctggtgggagtggtccacctccagccttctccccattttacagatggggaaactgaggctcagagtggtagggtgacctgtcctaggcctcacaatctggaaagtagtgcctgtggaagctaagaggcttgtcgctgtcctgactctgccacagaccagctttggggaccattctctggggcttagtgtccctatacgtataaggaggataatacattcaacagtaattcaacagataattgcctacaaaaccaatccagatccctgctttg

SEQ ID NO: 11394 - DNA, 6000 bp, Homo sapiens
agggttctttcctaattcaactttatgtagaccaacacagaagtacagaaaaattatcattacctatctcatgcctctcatctcctagattcctgagcactgactaaataggaataaattacaaagagcgttttacaaagacacacgtgtgcatacacacacacacaatatcacaatcccaaaagagtagattcctgacccaaatgttatttatttttatttaaagggaggtgaaccagcactttatgagaattttactatggaactcatgatgactggcttctcatttacatctcagctcaaatagagcttttcctggctatcctagaatagcattaccccatgcctgcctctcagttccctgttaatgatattttaacattgtcagtatctgaaattaacaatttacttcttattttgtttgttacctatctccctcttcccactagaatataagctttgaggccgcaatttttcattatttgttgaatgaattaatgaatgaatgtctgcgtacatttgcttctgcagtattttttctggctcctgggtttccctttagaattttatttaaaatataagaaatggatatttctgaacttcatcagagatggagcaattagtttccactgctgctttatggtgtaagtccctgccatctcctcctactctgagttatttacacattaagttaacagttaaccaaagtgaagtttatgtaagtacaatctggaaagacacttcctagttcaagtggaatttgttttttccatgccaaaagacacgttctctagagaaacacagccgtgtcacacccttggaaagatgaggagagaagagagacttacaagtaccccagctcctgtttctgaaagacaggtggaaaatcgaagcaggacacttccttcaagagagcatgatttatcaggtcaaagttcgaattgttttcaaaggaaaacatttatttttcactaaggcaaattattatttgccctgtcatggtgaggcctgtaaatctaggaagagtaattatataaagaataattaccagctgttgtctatttggaaggagactacaagaggaagaaacaaatgttcttgaatagactgtgggcttcttgagggtaggagctgcatattgtgctttttgggtcccccataagcggctagccaagggtgttgtgaaattatgtggtgttaaatatgtactaaattaccaacacataagcataacggattgagctggatttcaatgtaaggaaaactttgctgatagggagctattcaagttaaccattggattcctgagagagtccagaaattttttctctaaattcctgttaaaaaaagaataaactctatttaaccttacaacaatttttttccaagaagaactaaatgacttttttcagtctctacaaagtgtgacctccctcacattaaccatatttaacaggaataggtattaatagagctagtctttaataatgggcaatcttccctccattcactgaaattcaaaactttagtgatttttaaggaaaagtcactgaattctcgaaccataagtgtccagaaagtggtatgtatggttcaaactctggcaaaccttgcttggaaagacagagttgagaggtcagataatcctttgctagtggcagaacttcacaccctcagcaatgtagatggagggtttcataattgaagtggagtttgcattgaaaagtctgtagacaagatccacagaatacttctccctaaattagtaactgtccaaaggggaaattttctaaagaggaagagggacagagagaaaggggcaaagtatcataaagacaggggattttaaaataaataatcaataaaagtaccaggaatgtgtgactaccacattttaagatgcttattttatgaatgcccctttgatgaactaatttcatttgaaagcttatttgcaaatataaggtattccacttgaagaatagcttattctaacccagtgtctttaggtatttttgtgatctacagaaagaaatacattttactttgcaatttcatacacagagatagagagagagagagaaataagacaagtttcaagaaaccactcttgtgctttcaaatggcgatgaactctgatattttctatcctattccacttcattttttaaatgttacttatgcccactaacttgatttcaagatccagtaatgggtctcataacattttcaaaacaatgccaattccccttatcagaccatccccatgttaacatccaccctccaaaaacttaccacactgtgtccatgtaggaaatactgtgataatattaagaaagcagtagacttaaatttctgtaaaatccaagtgtttccaacaggtacataacccctttggtgttcaataaatatctgttactgacaaagtcaatttaatcttcttaggggacaagagagcttcatccctgatcttgcttctgctgtgtcaccttccctgaaatattctgcctacagagaactctcattgtttcccccaatattgtatctaacacagttcacactttaatcagctgaggttgcttatgcttagaccacaaacagtttaaagttttatgatacacccatgccatttttctcaataacttttagactttgtttacattatggttaagggctgcatcccacatatattcattagatttatagaatcaagcccatcctgctctcagaatactggttatcaatatcaggtaggctgccctaggatttaacctccagcggaaaaatctccttgtacttgttctatcacacaatgccgagggcggcaacactttctactcagcaatagtctccctgaatcattgttatttcagtgacttgggctacaacctgagaaattctcaatgtttggccccagcagttgaccataggagactctcaaacaactttaatatttctctgctgtttgcaccaaaagaaggtaattaatattccaaaagagaattcttaaaggaggtcatggtcaagtgttggctggtcaggagcagttggaaagcagggagctattgaactcaagacagattgagcccaacccagcacggagtgaagattcctatctaagttctgaattcggaagggtttcttatacaggctttgtttaagttactgtgtctgtgtgtgtgtgtgtgtgtgtgtgtgtgtgtgtgtgtgtgtgtgtgtgtgtgtgtgtgtgtatgttcctttcaaagcctccttgtctcccagttgcccagcctcctttcctagtcacatttcttactgctaacaacatcattctcacttatcctgggaatgaagggactgtacaatcttcctctgcagtgaggcagtgccttagggtttgaatgcacagtgagtcacacacagccctctgggtcaccagactggaggtgacagggaaggggggagtatatagaggagggagcctggaaaaacaaaatccctggaatgttgggtgggagagctgatctgatccttgagtctgtcctccactggatctcctgaaagcctcaaccacacaaattaggggtccctgttgtctctctggggtggggtatgaggattcaaaataaaacaggagcatgcaaaataaaacggggacattttttgcctacagtcactgatgtttccatggaagagctccaaggatggttgggtgagggctgcagttccattcacaggacacctccttctctgtcacccggtgttgtcccgtgtgcttatgagaacctaagatcaccagggaaagtgtgctgtcgccgtctggctttcttcccctcccattaaatgattgctattatttcttttgccaaggagacagtgtttagtaacctcgacggtgcacggccaccttgtggtcccgggacgcaccggatgctgttttcttagtccaacaccgcctaaacagagttagggaaaaaagtgttggctcctgccttgatccacccagttgtgggctaaaagaggttgagggtgactcgtccttggaatcaacttgcctgcctcccagggcgtgcctgccagcctccgctgcgccccgcctggtattggattgtcccggactcctgctgacatcgagggctttagggggaaagaagaggagtcgcagtgtccggcaccaagtcaggcaccccatatccccgtcttccctcgccatcctctctgttttcattcaccctaaaacactgtgcccaccagcagtcccctacacggagggcactctttctccaaatccaagttatgcctccagcctacagccgcccaactccggacgctttcccagggcttgcctgacccccaaggtgtctcttctcatctccttcctctcagcacttttttccttttagcaccccagctcttagccagccgtcttcccacgtcctcaccccactttcactacctagcccactaccgaccctccctccacaggctccctagtgctgtccccggagtggcggctgaagaagccagggtcacaatgtctctgggataaggttcttgtggaaactcacctccctccggaatttgcattctccggggaggggacagggctcccagaaagctgtctcccagtccagactgtcgcccccctctccctccctactcaaggtctaactcgggtccctcgcctgcttcctgtgtttacgcggcgctttagtctcccggactcgcagggtgagccccagccctgactggagcgagacagcagccgcgagcgcagccccactcgcgggccggggcgactggggctggcgcgaggcgcacggagctcaccagctcgcccctccctctcctgggacaggagggggctgactggggtggcggggtccgggaaggggggctggctctcatcaattctgctgccacctcctctgccgcctgtcgggaggcgggcgggggtggggcgggagcgcaggctaggattgagactcttaagtcaggagaagtttgcgcacagcttcacagctgggagagcgcaggaaggcgccgggaaggtgagcctcctggactctggggaggtagaaagcaagccaggggaaagaacagttgtcttttagctgataatacaacctagacttgggtctgaaccacctaagacagatttaaagtgtcagaaaaccaggagaggggcggagagggaggactgagactaacgcagtttgctctcgcatcaaactaggaaagccagcccaccagcgtctgggtgggctgcgccgcgcggctggcggaccttcccgggttggagaagtgcgcacgtccgcacctcaccctgcggctgacatctcctgcccaggagatgggcgctgaagcttgagcgcctgagtccctggagccacacctgcgaacaccctttgcttctattgagctgtgcccagccgcccagtgacagaattccaggtaaggagcgtttggaaatgagcgggacttaacgatttggggtgtccaagggatgtttaacagtgcaggtgctataggcaccttgctttttgattatagaaatgtggtttgattgcggtgcttgtggttctcatgtagggtcagctaggtcttagatgctttactttacccttgtcaaagaaaaaagaaaaataggtgtcctgggaagagccaacaacttatggtttcgtattgaagaatcgtttgatttcttgtgacttttactatgttgttcatatcaattttccctcaaaagttttattctccaacttattgggtaggaaaattacggaggttaaagttgtgaattttcccaaagggtgtttattaactgacaaacatataatatcagcatctataagatgtgtcatggttgttctggatattggaaatgagcacagtagtgaatggagttgcttgttaagtcatgttttacagagaatagttttccaacaatcatttatgcatagcagccattcttcacacctattaggaaaaatatgttgtgtgcatagtttccaaaag

SEQ ID NO: 11395 - DNA, 6000 bp, Homo sapiens
ggtttgttcagatggaggggaatgggcatacttgtttatctatttaacctcaaccttcttctctctcagcaatctctcccttggcaatgccgcccaatagtttctctataagtactttctgaatttgggctcttcacttccaactaagtataacacatcaacatttgaatattccaccagcatttcacattcagcatgtctaaaattaactcactcttttccttaccaaaccagctccttcctttttaacttttgtttcctctggttaatggtgtcttctgcctcccagttcttctccaagttccaaacctgagagtctgttcttaccccttgatctcctttgcttccctgagccaattactccataagaaatatggctcctcttactttgcttctcttcatttttcctgctccacttccatcagttcaggctttccctactgtgacgtgtccacctgtaaactggtcctacctcccgatttcttatttcttgcaaggtctagcacagtgcctcatacagagtaggaggagctcaagaaatatttgttaaataaattgaacaaaggaacaagtcttaaagttttctgagaggaggaaattgtcaacataaagggaagaagaaaaggcaaactgctgagttttcaaaagcctggcagttaactttaaaattaaaaatgaattacattaacactttggaacctgttatggggcagagcagagagaaaagtctaacaaatgaaccttctagcattttggaaagaaacatgccagatttttaatcttttaaaaactcattaacattctgaaaaaatttcactgtttgggatgttcacaattatagttattcccaactcccaagtcatgatttgtctagcatattatttcaccattctgctcctcaaagagatgaatataatgccctaaaaactttcagttacttagatgtcactgtgaaaaaggtcactttctgcagcaattaagatgtgaaaaccattatcaactaagacatgaaaaccattatcaaaaaagggagatgtataatctctctttctattggtcacttattccaggttggtgatttttttttaaataatcaatcagaaagtgtttctgtgcaaaaacccccaatgagagcctttcttaccaagatagctaaagttttttttttcccagtcttttttttttttttaattatactttacgttttagggtacatgtgcacaatgtgcaggttagttacatatgcatacatgtgccatgctggtgtgctgcacccattaactcatcatttagcattaggtatatctcctaaagctatccctcccccctccccccaccccacaacagtccccagagtgtgatgttccccttcctgtgtccatgtgttctcattgttcaattcccacctgtgagtgagaatatgtggtgtttggttttttgttcttgtgatagtttactgagaatgatgatttccaatttcattcatgtccctacaaaggacatgaactcatcattttttatggctgcatagtattccatggtgtatatgtgccacattttctaaatccagtctatcattgttggacatttgggttggttccaagtctttgctattgtgaatagtgccgcaataaacatacatgtgcatgtgtctttatagcagcatgatttatagtcctttgggtatatacccagtaatgggatggctgggtcaaatggtatttctagttctagatccctgaggaatcaccacactgacttgcacaatggttgaactagtttacagtcccaccaacagtgtaaaagtgttcctgtttctccacatcctctccagcacctgttgtttcctgactttttaatgattgccattcgaactggtgtgagatggtatctcattgtggttttgatttgcatttctctgatggccaatgatggtgagcattttttcatgtgttttttggctacataaatgtcttcttttgagaagcgtctgttcatgcaaaaactggaagcattccctttgaaaactggcacaagacagggatgccctctctcaccactcctattcaacatagtgttggaagttctggccagggcaattaggcaggagaaggaaataaagggtattcaattaggaaaagaggaagtcaaattgtccctgtctgcagatgacatgattgtatatctaaaaaaccccactgtcacagcccaaaatctccttaagctgataagcaacttcagcaaagtctcaggatacaaaatcaatgtacaaaaatcacaagcattcttatacataaataacagacaaacagagagccaaatcatgagtgaactcccattcacaattgcttcaaagagaataaaatacctaggaatccaacttacaagggatgtgaaggacctcttcaaggagaagtacaaaccactgttcaatgaaataaaagaggatacaaagaaatggaagagcattccatgctcatgggtaggaagaatcaatatcatgaaaatgaccatactgcccaaggtaatttatagattcaatgccatccccatcaagctaccaatgactttcttcacagaattggaaaaaactactttaaagttcatatggaaccaaaaaagagcccgcatcgccaagtcaatcctaagccgaaagaacaaagttggaggcatcaagctacctgacttcaaactatactacaaggctacagtaaccaaaacagcatggtactggtaccaaaacagagatatagatcaatggaacagaacagacgcctcagaaataacgccgcatatctacaactatctgatctttgacaaacctaagaaaaacaagcaatgggaaaaggattctctatttaataaatggtgctgggaaaactgaccagccatatgtagaaagctgaaactggatcccttccttacaccttatacaaaaattaattcaagatggattaaagacttaaacgttagaccgaaaaccataaaaaccctagaagaaaacctaggcaataccattcaggacataggcatgggcaaggacttcatgtctaaaacaccaaaagcaatggcaacaaaagccaaaattgacaaatgggatctagttaaactaaagagcttctgcacagcaaaagacactaccatcagagtgaacaggcaacctacaaaatgggagaaaattttcgcaacctactcatctgacaaagggctaatatccagaatctacaatgagctcaaacaaatttacaagaaaaaaacaaacaaccccatcaaaaagatagttaaagttttaaagaaaactttaaaaaggctctttttcatatacaactttaaattttggtaacagttgagagcaccaaagacacacgttttatgctttaagcagaagacatgtcatttgaaatgaattactaaaaatcttttatttagaatgtttattctagtctattattctctgcaattaccaagtgttatttcctgacacacactttcatgtaaacaatgcacagaaaaaaacactgtttttgctgatcatgatactatgcatcagttggcaaaaatctgaaatagattaattttgaaagcaaggtcattggtttttaaaataaaatggtatgtactttttataagaaccaaattaagcaaattatatcagttttcctaatacactgatcaatatagtacatgtaatattccaacagtttgtaaatcttcagaacccttcaaacccaaggattagagcatatagttttgttgtatttgctttgttcttttactcttaacctgaaaatcaaattttctgggtttggtgatgtaggggataaaaaaaaaagaaattagttaagaccaactaagcctatgatctaaacaatttgaagcaataactttacatttgagaacttgtagatgatatgaaacttttgtcagctattaaacatattttttaaagccctgctgatgaaagatgtagcttccaatgttttctccagtagagttaatgagctagatagaaaatatctcattaatttcttgagtccccttgtgaggcaagaaaatgacattcttatccaacagctggaaaagctgaagaattagtggatgtaactgtgctcaactgcaaaggaaaaaaatagctttactataccctgagatgtggatatgaaagaatattgcatacacatataccctctcccttatttttaaggaatcaatatctgcttaaagaataagactagttaaaacccttggatcttggccctataacttttggcagagtatattactgcttcatggcctggcagtgcagtgactcttttaatttactttaaaatagcttttccctaatctgtacaacctaacatctgaccaatcatgaatcttcagcaaacttaagcctcttattccatacattttttaaaactgtaaaaattcaggaaataactctttgcaaagtacattgaagcatttattgggaagcaaaaaagcacaagttgaagtgatttgtagtttcataaaaacgaatttgacattttacttagaagttgcaaaccaccacatggttttgagttttgaattcatttgctttgcaaaaagtggaatgttttatttgaatggaaatgccctcaagttacttccagcatggctgtaggattgatttttctaggttaagggaatgccaaagtttagtgccttgtgtatattcttttcgaaaaaaacaaactattatccatgtatttaaatggacgtaggaaattcaagaacaaatcagggaaatttaacatcatttcagtattaccaacatagggctttgtgtaacgactgtgacatcaagataaggctttacctcggctcatccaatagaaatacagtatgtaaattaacccatattatctgtatgctgattggcctgagttcccctgaatgtcacaatctcaccacccagcaatgaggtattttactgctgtctcaagatcagattattactgtagagaagatttttattttttgtttcattaacagattattataaagcaaaaagcatgcagaaaaagaagcagacgttttacattgggaattaatgaaagcgtgtctgctagttttgggtaggagaactgggaagttgttgcttaaaattttatatcacctccacaaacaaaactcttcggaaatggtaaaataagaaaatgcatgattctagaggcattcctaagcacccacgtgtcaggctttgtggtgtctgtggtatcatccgaccgtttggactggtgtaagttttacgtatttgttatatttctagtatttttcatctgtaataacaaaggggaaaaaaggaaactcgtacacataactgctttgacatcacccatcattggtcagcggaacttgtaagaagggaaaaggaatactgttgcttggtggggtggaatgccaggaatagccatttaaacattttataagcctgattctttagtgacatcctttaaggtagactgaatgtaaatcatattgtagttgtcctctgaacttagctttctccctacttttacgcatatttgcgtgcattggagaatagaagatgactaacaaagagagagctgccctaacgtgccttcccttcttccccattgaaaagatttttaactgtgggaaaaagataaataaataaataaataactttttttcttttttcccattcttttcttgtctttttccagctaacctgcaaatttaaaggttagctggagacatcacttaaaaataaatatataaaagaagcctccggtggtttggaccaccctaaaagaaaagggaagaaagtgtctggggaaggttagggttccgggaagctgagggagggggcgggcgtcacgggcactgtgacttcctcgtgcgctgcctttgggaagaggatgggcctgaggtcctgaaagggcctttccagccccccactacaaatgcggggagggaaaagttcagaagcagccacgaagggacaaaagc

SEQ ID NO: 11396 - DNA, 6000 bp, Homo sapiens
acccactttctctcttcttatctgatacatattataaaaagtagcttctcattactttaaatatggtctttttgtgcaatagctgtgttattggaaaaataaaggcacaaattgaattctcctaaatcagatttttttttaaatgcctgggatttagctatttaaaggaaacctgtggtgaattcttctgtaatgcaaataattactttccaatttatctgtttagtaagtcgagcttctcctgtatcagattttttaaaatatgaggctggcttgtgtagaagagctttcacaatcctctcactgatgaaaaaaagtcactcaacttgcaaacaaaatcagttattgtgttcagttggcaaagccttgctctgatgtttgagcataatctcatattcccttattattaagtaatagaatctcagaataggaagctggaagacaccttagagatcacgtggtccatctcactcgtttcacagatgaggaaatggaagcacataggggtgaggggacatgttcagtgttaccagccagtgactgtcagacaaagatccgattccaagcgtctgttgccaagggagagctctgtctgccccatcctcactctgccccaccaagaatccatagacatgcacacatattgcagcatgggagatgatacagaaatacgatgcattttcaaaacaaccaaaagagctgcaagtgtgagcagtcatatgaattgatgagaatattcagcttaacctttttgttaaagagctgaatggaatgcagcataggaatgctgctttggcctttttatgagaaaaaaattacaattcttggataatggtattcctcagtgaggattttaccctatcatattttaatcatacctgctaaatgcccaaggaagatgtgatggcagacccagagagaccctgcatgcgttggtgggtgtgttccacctgacatcaccttgacatcaacctggccaggagacctcatttggagcagaagtgtttggacaaaccgcattggatcttctcagccctttgagagattcagaaatcacctccctggaaatgcccccagattgtcccttcctaattaatatgttagtgttcttccagagctaagcattgaagatgtgcacctttctgaaagattgcagtggaggggcagggccattccctttccttgtgctgccacagtgagtccctgcagcactggggtctttctccaaggacaggacccaccttctgggacagatgactttggtggcactgccacttatcagctcacgctctcaggggttggggccatattcaatccctctgagccttcttttctcatttatacaagagctaatgcctggtgtatgaaaatttatggagatactgtgttagatacttgacactggtacagagaaggtgtgtagaaaataaagcagaattctgggctctggccagtgaggaggtatccttctggccttttaggaaacagagcacatttagggggatacaggctcggggtccagccagggtgcctgcttccaggagtcttaggccaggggactgcccatggagggcccaatgatgtatgatgtgccctgtaagtaagggtgggctggcgggggagtgcacaggaagggctatgagggttcatggttaagcctccccaaagggttccacggcctctccctgtgggcccagacatagtgctgagaggatttgtccccctctgagattggtttcaggagtccagacctcacgcctccttgaaacagtccagcacagtccccgcttctgccacatgtcagaggcaggtcagtttgagagaggagctgtttatactttaaatcaaacacaaaacatacaatagaggtatttggatctatagctctgaaagattgtgatttgtttaaaactcacagactccactaggatgagcttggattaaagctcacaagaattgtacaagagcaagataagtaatttaagattatacaatgaaacctaactgatgtagtttctcacaaactttcaaatatatttttccttaggttttttaaaaggggaaactaaaccttctggcagtggagtctgatttttatgacaatgtatcagattttgaaataaatggaagatttaaatattttataagtagctctgattttattttttaaagtgacaaacgaaattcagtaaaagctcaccaactgggcaaatacagaaagagttgctctgctccagtagaaaatgaattacagactaagttagcaacaataactcctgtttaatgagccagatactatgctttccatgtgtgctgtgtggcaggttctatcacctttacagacaagaaaagcaagcttcagagaggttacatgcaattaattctgtgttccagagacggaaactccagcaaaaattcaagtgagctgtccaataaatgaaactgaaatgaaaccaaaactgaacctctagttttccatttcagtgcattcagccactaaacaaaactgattcctgcctcactgctattcattccccaatctttttttaaaaattaaagctccaaacaaagctatgagatgccaaagagagtaaacaatactgcaattaccaataattttaaaagcgactcaattttattactttctggactgtacagcaagtggaactaggttaatgccacatggataggtaaggatgcattgtgatgaacagatgggctgtttgtatgttcgtctataattgaaagccatttattctcttaagtgttttaagtacttgggggatggcttggtgtaaagaggaaaggtggtcccaagacccatccactccccctagacatttctccttcaccttatttattcatttagtctgtactctgtcagaacaagggtcggctcagccacgtggaattggtctcaaattctcaactagtgatcagagttaatgaggttttactatcatgtgactggttttccttgtgaaactgttaaacacaatcttacttctcttaatgggtggccggtgtaatttatggcctatcacttaaatggtttcatccagaaaatcaggttgactttctgagtgtttccttttgtggaatgcctgaggtcaggctgttattgaatcacagattttctgagggaaaagcagctgctaggagaatccagtgtgagggactaaacagtgaagtggtgagaaaaatcagaaagtattttgggggcagcacagaggaaatctaaggcttaatgtgtgcccggaggcagggaatacttgtcttaggctgcacagaactatctcagccgagtgggccattggctggctaggctgccaggtgtttgctcagaaatatggggcagtgggctgctatgagccctcttttctaatctgcaagtgcaaaaaatgcagctttctttgaaggtgtttgggcatattttcagttatcccccagggaagcaccatctttcctttcggggcaagaaggataaaaagaaaattttatgaactggaacttgaacaagtgaatggaaaatacaagcagatgttggttggctagggtacaggagaactgtccaaatttcaggtttcaaacccatatataaataggttagaaatgagcattagattaaccatcctgccaaagtaaattggtgctgtttattctcttaattagctgtgcattacaaatctcagattccctgtgttaagtcagttctcattttcagtcacatctcttcaaaagtcgtttgaaaaaaatcttacggaattaagggtgaaggccgtaggaaaaaggctttgtctgtagatttgcgtgtagcctttttcacttcaagttatttctagtcttgatgaacttttccccactgagtcaggcaaaattaggcagctcttcaattgattgacaactctgatttgctcctagtgattctgggatcaaggcatgtttccctcagaactgttaatatacccattgctcccacaccgacaaattaattggaaaccctgacaatggtaataggaatatcttcacatgtcaccttacctgtgtgtttcattttcaagtctttgttttcttaccagagaataagacaatttatatgaaatagctgactttctatgttaattttttttcacaagctacaaaacttacacattttttagctctttgggtggatttctttctctctttcactttgtaattgaataatcactttttcctactgggtaatttgaggcactaaaaaaaaagtcattaacagatgactggcttgttgaatacatcacagaaaataatatttattatgattttgttgacaaaattagaatgctaaattcagatagctgcaaaaaaaaaaaacagatttgaaaagaaatggtgccatcagttgcaggatttttaccttcatggaaataaggtttattgaaataagatgataaataaaagtgctttctggtttgggagaatcaacctacttcctgatactgttctgtttctcttgctccaaaaatatgatcaatctccctgtttagatgcagtgcagccaggtgttcagaatcacagggggacaaaaagaattagtttcttactgaataggggattttttttttaagaggctggcgtaaacagggctgcaaaatgtgaaacatgtagacccactgaactgaacccccttttttcccctcttcccaggaataattctgctacaaggctgatttcaaggacatgaattgttgacctcatcccaacatcagaacctcagatgttctaatttttgcaccattccaggcaagttgatcttataaggaaataaaattgaaccttaggggtctgatggaaattcactgtgacattcaaatcaagaaaacttgctaatgcccacagagccttttccccatgggccctgatggtagcctccagaaggtgcagcctcaggtggtgccctttcttctgtggcaagaataaactttgggtcttggattgcaataccacctgtggagaaaatggtatgcgagggaaagcgatcagcctcttgcccttgtttcttcctcttgaccgccaagttctactggatcctcacaatgatgcaaagaactcacagccaggagtatgcccattccatacgggtggatggggacattattttggggggtctcttccctgtccacgcaaagggagagagaggggtgccttgtggggagctgaagaaggaaaaggggattcacagactggaggccatgctttatgcaattgaccagattaacaaggaccctgatctcctttccaacatcactctgggtgtccgcatcctcgacacgtgctctagggacacctatgctttggagcagtctctaacattcgtgcaggcattaatagagaaagatgcttcggatgtgaagtgtgctaatggagatccacccattttcaccaagcccgacaagatttctggcgtcataggtgctgcagcaagctccgtgtccatcatggttgctaacattttaagactttttaaggtaggtaaaggcattgtctttctgaccattgtgaaagaacaatgaaatgctatgactcctactgcaggtttaagaagaaagtgaagatggtgaaggtgctcatagacccttttggtgttaccaggttcctcaaatgggacattctatatggggcattctacatgtattggtttagttccattacttacaattaactggattaattttgactcttttttttttttcctgaacaaagagaaaggtgaaaagttctgtgatatattgggtccttgtcatcttgggataacctctttgttaggctcattttaaattaaacaagcatttttgaagagaataatgaactcagcgcatttatcatggaaaacatttctatggtatttgagctatttaatttactgagtgaaacttctttaaggtgggatgctctgttatgacaaaagtttgttcatgaagaaacagtatttattactaatgtgtagatgggagtgac

SEQ ID NO: 11397 - DNA, 6000 bp, Homo sapiens
actatcacaggaacagttggaaccgcctcgtcggatctcgtgagacccgttcactaccacaggaacagtcgggggaacggccttgtcggatctcgtgagaccagttcactaccacaggaacggtcgggggaatggcctcgtcggatctcgtgagacccgttcactatcacaggaacagtcggaactgcctcgtcggatctcgtgagactcattcactaccacaggaacagtcggaaccacctcgtcggatctcgtgagactcattcactaccacaggaacagttggaaccgcctcgtcggatctcgtgagacccgttcactaccacaggaacagtgggaaccgcctcgtcggatctcgtgagacccgttcactaccacaggaacggtcgggggaacggcctcgtcggatctcgtgagacccgttcactgtcacaggaacagtcggaaccgcctcgtcggatctcgtgagactcattcactaccacaggaacagtcggaaccgcctcgtcggatctcgtgagacccgttcactaccacaggaacagtcgggggaacggcctcgtcggatctcgtgagacccgttcactaccacaggaacggtcggaaccgcctcgtcggatctcgtgagacccgttcactaccacaggaacagtcaggggaaccgcctcgtcggatctcgtgagacccgttcactaccacaggaacggtcgggggaacggccttgtcggatctcgtgagactcattcactaccacaggaacagtcggaaccgcctcgtcggatctcgtgagacccgttcactaccacaggaacggtcggaaccgcctcgtcggatctcgtgagacccgttcactaccacaggaacagtcaggggaaccgcctcgtcggatctcgtgagacccgttcactatcacaggaacagtcgggggaaccgcctcatcggatctcgtgagacccgttcactatcacaggaacagtcgggggaacggcctcgtcggatctcgtgagacccgttcactatcacaggaacagtcgggggaacggcctcgtcggatctcatgagactcattcactaccacaggaacagtcggaaccgcctcgtcggatctcgtgagacccgttcactaccacaggaacagtcgggggaacggccttgtcggatctcgtgagaccagttcactaccacgggaacagtcagaaccgcctcgtcggatctcgtgagacccgttcactatcacaggaacagtcggaaccgcctcatcggatctcgtgagacccgttcactaccacaggaacagtcgggggaacggccttgtcggatctcgtgagacccattcactatcacaggaacagtcgggggaacagcctcgtcagatctcgtgagacccgttcactatcacaggaacagttgggggaaccgcctcgtcggatctgagacccgttcactatcacaggaacagtcggaaccgcctcatcggatctcgtgagacccgttcactaccacaagaacagtcaggggaacggcctgcatgattcagttacctcccactgggtccctcccacatgtcggaattatgggagctacaattcaatatgagatttgggcggggacacaggaaaaccatatcacgtggctagtggataaggtggtgctggctggcattggcaggtgttactgtgaacccactgtcattgtgttcagcagataaggtggtgctggctggcatgggcaggtgttactgtgagcccactgtcactgtgttcagtggataaggtggtgctggctggcattggcgggtgttactgtgaacccactgtcattgtgttcagtggataaggtggtgctggctggcattggcaggtgttactgtgagcccactgtcactgtgttactttagttaggcttgaaaacaactcactgcatggatggagaagctgaggcttaggggagtggtgaggtgtgctccccactggtgagcagccacagccaggccctggtagtctgattcccatgcagtctgcttgttgccatctggtcgggacagctcctggccccaccgccctccctgagtgggttgaaggcacctgcaggagtcgcctggctggggaccacattgacctgtgggcccgtctaagatgcgctgtcccccatggcatccagtggagttgagagaagactgagttgagtgttgggggcccagctccagcacgcatggctgtgagcccttgaggaaggtcctcagggaggatcctggggcgcatggctgcacccagctcagccagggagagggggaacattgcggcctctgtcatcacacaccatggctgacagcggctctggtgtgtgagatcacagcagtgataataccatctgccccaggcttccataggaaagggagcagccaggggtctcaggggcttctgtggcctgggggggatttcaaggtccaggtgggatccccggtgtgttggaggcaccacctctgagtcttcatcttcgtctgcacctagccggcaactgtgcctgggagacattaggacagaggtgctggtgaagagcagagaccaaggcccccagcagcgtcacccagagccccgtatgtgcaggctccgtcgttcattctctccttcctttattcaataagcattccctgggaacctcctttctgagccccagcctgggttataaagagtgatgtggatctgggaggcagtgacagccgccgcctgctgtggcaatgtcagcccacagagtcatgcccaagctccttatctcctgtctcctcctgggcacaccctgtgaggcatcccagggacacgtggcaagctcttctgggtccactggtccttcatcgaggcctgtaagtaaaccctgcctgcgtgagcatagtggctctgtgatcccctgatgctttgctgtttagtctgaagaactatttttcttcttaattaaacatttcagagattctgcaaatattataagtgcatattcactgctaagggattagaaagtcaaaatattttaaagtgagaaagcaaagaaaaggatggcacaaaaccaaaatgaataatttttcttcctgttgcagtttctgctcgttgaatactttgaatacttggttggtttagggactcgcttccaagacgaagcaacagcacatagcacaggcggctctggaggctgcaagcaccagaacaggccccaggcagccacggggtggacatgcacggtcctgggccggctctgcccaccggcgagcgcagggctgcctgggagctgaactgaacagagtttctcctgcccggagctcacgcttcgtcccatcaggcccacttgcttcccagattcacatttttagttgtgtttcctgcttgcacagggccaaagtctgccctgggtgttgtgtgtgcaatcattattgtttattgttttcgaaattaattaaattcgagaaaaaaaattagcctccacagaagccacagacttggctacatgtgtgagggaatcagcagagatgtgggtgtgggagcccctgggaggagaagggctctgcggaccagagggctctagggcagccctgggcactgctgagcagctgcatctcatctggacctggagcccaaggggccgcaccagccgtggccatggtctgggcctttatttggggtctcacctgctgcagtcagatcctgaagcagataagccagccagggatcagtctccctgtccaaggtcttcccgtctgtgtcctcttcctgccaagaccagctttcaggcctgggggagtcttaggtcttcactgagtaaagggtttcatccacagtgtatcaaggagcaatggccccagtccttgccctccacagctgctcctctccgcttgcccacccgcactgtaagccacagttctcgagcaccaccaccagcagactgagggctcgggatcaccaagtgtgggaggctccccgagccgtgtgctggggcccgaccacccggccctgccctgccctgcccttcatcccatcacaactcttctgtgctgatggatgggggccggggttcccactgcgtggaaaacagaacagctcaggcagaggacgggagcggcagtggccgggctggtgtgaggctggggattccgcttgccccggcagggctcaggcttccaagaggccacggaggagctcctgggactgatcgtggtgcgggctctggcccagtgggtctgtgtgggggctgagaccctgcctttccagcacgttcccagctggtgccagttggagtcagagcctggaatccttacacgagaggccagaagccttggcctcagcagtccaggcctgagaacccacccagctgtcactcaccgatggctgagtgactttgcacaaagccctgttgcccgccctatcccactcctgggatcagacccagaaatcttggtctgtgtgtcccaactggctacaattgctgctcagcttctgaaaggtgcctcttcaagcctgtttcttgaaacaaggcactgaaaagcatacgttgtgtcaaaagcccaaaaggagtgggaattctccttggtgatttggatttcatcttgggcactgatgaaagagcacagagtgggggcctccctccttgagtcagggtcaggcaggggcaaggcagtagaatctctaacaccctgggcactcacagccctgccattgcttctgtggtggaggtggccagggcggagtgtggcgttcccgggaatggcctcagcagcacaccgtggtgggcacgcgagggggccggctcccgtaagtcttctgtgttacatactggttaactccgttcttacataaagagcacgtctgctaaatttagccaagagaactgtttggcatttcggcctccccatgcttcaagtgcacacatttcttccgtgttacgccacatccctaaaaataagcctctgccctcctccagcactcaggccaccgcagtgactcgttcccactgatggcaaacttcactccccagggctcccatccctggtgacaaagatcacagcagctggcactgcagatgcctttgtgggaggcaccatctgatcatcccgccaaccctcctgcaaccctgcaaggacacaccagcctcccagggtgccaggaggagcctgccagagacccccagagcggcctgccccaaatcacctctgagagcagcagcttttctgaaggaagcctcccctcatggtcctcaggcccagcaggtgccaagctcaatgccagccacgagggcattggctcatcgagtgatgggaacggggacagcaaggcggccacagagagggtggtctcagccatggacacagtacggcggaagcatcccgaggtgggccgggacaagagctgggcctgtggctgctgcgggggccacgagactgacctcaggcaggggcagaaatctggccacaggcagaaatcattcagctgtcacctggcacaaccagacaggattatgagcacttttctgctgtttagttttaacctgtgcatgtgatgcttaatactttccaaataaatggatgagtcttttcagggccaaaggagatacgggaccagggaaggaggttaagaaggaaatgcacagatacgctggtgcctggggatggcgattgggtctccaagttctttaagttctaaaggaatccgctagggaagattctcctaatgggagggagatgaaggtgaaggaattagaggtccacatgatcaggaaggtggaaggatggaggagcacaccaggatgatgtgcagcacagggcagcggacctgtaggaaacacagcggtgcgccaggcgcttctgggcatggagctggccgatgccggaggaggggaggtacgtgcctgacccaggatggaccatccaaggcagcagggtctgcacaccaggctctgcatgaaggagtgtgtggccccaggcaggggttgaaactctccgggcctcgatggataggaggc

SEQ ID NO: 11398 - DNA, 6000 bp, Homo sapiens
tactgggaagtgaggagcccctctgcccggccactaccccgtctgggaggtgtgcccaacagctcattgagaacgggccaggatgacaatggcggctttgtggaatagaaaggcaggaaaggtggggaaaagattgagaaatcggatggttgccgtgtctgtgtagaaagaagtagacatgggagacttttcattttgttctgcactaagaaaaattcctctgccttgggatcctgttgatctgtgaccttacccccaaccctgtgctctctgaaacatgtgctgtgtccactcagggttaaatggattaagggcggtgcaagatgtgctttgttaaacagatgcttgaaggcagcatgctcgttaagagtcatcaccaatccctaatctcaagtaatcagggacacaaacactgcggaaggctgcagggtcctctgcctaggaaaaccagagacctttgttcacttgtttatctgctgaccttccctccactattgtcccatgacccagccaaatccccctctgtgagaaacacccaagaattatcaataaaaaaataaatttaaaaaaaaaaaaaaaaaaaaatccaggctgggcatgctggcacatacctgtattcccagctgcttgggaggctgaggtgggaggattgcttgaggccaggagtttgagaccagcctgggcaacacagtgagaccccccatctctgcaaaaaaactttaaaaattagacaagcatggtggcacgcacctgtactcccaggtactcaggaggctgaggagtgaggattgcttgagcctgggagttcaaggctacagtgagctatgattgcaccactgcattccagcctgcatgacagagtgagaccctgtctcaaaaacaaaaaacaaaaccaaaacaacaacctaaacctcacaaaaaatgaactcaaatagatcatctatttaaatgtcaaatgtaaaactataaaactttgataagaaaatgtaggagaaaatgtttgggacctgggagtcattgaggaattcttaaccatgacaccaaaagcagatccttaaaattaaaaagaacaaaaaaaaaaaaaaggataaattagacttcaccaaaattaaaaagaaaacagccttttctctgcaaaaccctcattaagaggatgtaagagataagctatggactgggacaaaatatgtacaaaccacacatacacaaaagcctagcgtctagaacacataaacaacgagaaggcgcagctcggagcagggctgggaggatgagcaaaggcagacgtgccggctgcagccgcgctccgtgagtgagtggctgctgcatgccgggcctccagctgacagtgcctcccggggtcaacccgaagccagaggctcggcagtatgctggagacccatcctgggcacctcccacgttccctgtgggaacagctgcttctgcagaacatggaaaaggtccaggctggaagctgtgcagacggaatttaggaagagggaatggagagactgcaggagggagggaggcccctgcacggcaaggtggtggccacatgctccagaataggacttgggctccgcactgcagggaacgggacctgggctccgcgctgcggggaaggggacctgggctccgcgctgcggggaaggggacctgggctccgcgctgcggggaaggggacctggggtccgcgctgcggggaagggggcctggggtccgcgctgcggggaagggggcctggggtccgcgctgcaggggaacgggacctggggtccgcgctgcggggaacgggacctggggtccgcgctgcggggaaggggacctgggctctgcccagggactccacaattccttactaatgttactgccgtttatgggggctctgaacaacaccacgttttactaacacatgcacagagtgtcagatgatgacatgctgtctcacttatgctaaggctcactctcattttatcatctgtaacgtcagggtgcgccttataatcaacaggccacaaagaaagtcacaagccatactcacaagaactaggaagttcgttgcaaaatattccttgtccgtgatcagcacggcacacactatcagactcactctgccaacacaatcactagagaaggttcatctccgaggggaacgccagccagcttttcccaccactccccgcccccccgagaaagcccacgtgcagacagacccaggccagctgggcccctctccagctcctgaccagcagccccggatccctgggtggcgtgcagctgaccttccggaccgccactcagaataagcaagaaagcctgccgacccgcctgaatgcggcaggggaaggggaagggcggccccaacatctccgtgagacacgcggctgcatcacagcagcctcggcagtgcgcggggctgcagaatcaggtgcacaactagggcatcccccacccgcaacacacacggcacacaggagcctcggcagtgtgcggggctgcagaatcaggtgcacaactagggcaccccccacccgcaacacacacggcacacaaccacagaggcacggccccaggccaggagcgcacaactgccctcaaatgccctcagcagccacggcacacagccacaaacacatgaccccaggccaggagcacacaactgccctcaaacaccctcagcagccacacaggggaggccacgtccacgtgacttcaaccatcaacactagactagggtgcaaccgcgaagctgagtcagggccacacgcccccctacgccccaatctgtgcccacccttccccccaccaactgagtcttgtacaggggctggccaggacccttggatacgcagctgcagcctctggagagtgtttacacctccagctacgagtacttattgtggttcaggtggagggtggttccctctgacgatctccccaggacacacacgagctttctgccattctccctggcaggactggcctgcttggcacaggaagtctctgcagataaggcggtctgcagtgacctgaaagctcagtggctcagaggaagctaacctctagcattccccagccacagagcacccctgtgggtaggacccacagagcctggcattacagggaccagacagcacggtgcatactctgaccagggattctgaggtcttgggccatttataccatggagataacgaagcttactcttaggcgggctgctaggagggcccaaagtcccaaaccctgatctaaaaagccagaatacccctgggttcaaatcctggctccacggcctgcagtgtgacctgggctaagttgcttaagttttcacaattaaatttaaaatgcatggccgggcacagtggctcacacctgtaatcccagcactttgggaagcccaggcaggcggatcacttgaggtcaggagttcgagaccagccggaccaacatggtgaaaccccatctctactacaaaaaaaaaaaaaaaaattagctgggcatggtggcacgcacctgtaatcccagctactcaggaggctgaggctgcagtaagccaagatcgtgtcattgcactccagcctgggcaacatgacagaaactctgtctttaaaaaaaaaaaatattaaaatgcacatggtgacctatctcattgacgctaaggcgtactctcactttatcatctctaatgtgaggctgcgccttaaaatcagcagtatgtcggaatgcagtgggcagagggccttctttttagtaatccataaagtaatggcatagctaacactaatcaatcgtgtcttaggtttgatgaaatacggacgtatctacctcaaaacaatggttgaggctcagaacagaacctgacacagaatacgccctcaggtatcggtgttggctgcttgtgactgactttggcaagtaagatcagtacccggcacctctgggcacacagggcccgggctgcatccactgtgccagggacctggtgccgggctgggcagcaagtcagtatcacatcagcaggcgtgggccgtggtgagcctctccctgccctcccgctggaatagaaagctgatcccgacgtcccactccgacccacggtcaggaagccgtcctgtccaggaaggtggctgaggtacatccctgaacacagtaggccacagcatcatgcagcggagggccagtggccgctattcttcctgctggtgttccactcggcccgcagctcacagcaagtctatgcggaactgtgcaacccacatgctttgattttcagaaatgttcttagatcctgaaccagaatgtgctgcaggggggactgtttcacctcaaaaattacagcaaagtaaatgtccttgtttcaacttttccaatgtttaacttgtaacaatagctacaaaagtaatcaggcagcaatgtgtttctttaaacggctttcctgtgagtgttccgtttacaaagaaaatcctaaaaccaggaagtaattggtgactttggaaacagcaagcaaacttcggtgaagaaagaggggcaggtgtacctggaaggactaacttgcagccactcatttcctttggagggcggtggggcctgcaccctgcagattagggtatattctgactcagcaaaataggcaccagcgcctgtaaaaagaaaccgcgctgggcactaagagaattctcaaaaactcccagagccctgggtgtgtgtcctcccacagggaatctcgcacgagttcgtcaaatggctggtctcaggttacacaaccagcactgcctccaccgccaccgccccccaacctcactggtccgagcggttccccgcggtctagccgcgagggcggggccggggggcggaggccagggcgggaccaaggctgggggcggggccaggcatggctgccgctcgccggccgggggcggggccgacggtcacgtgtgtacacagggcccgggcggcgtgcgcgccgtgagccccgccgcctccgccagcccgagctgcccgcccggcggcgactgcgccggccgccgcccagcaagccggtgagtggggcccgggagcctgggtcgggtcggtggggcacaccccagtctccgcctggggagggagccagccccaagctgctgtggctcccacggcgggcgctgcgcttactgggacccgggtcctctggccgctgcccactgcggggctccgtgcccttgccaggaggggaccgctgtcctccggccgcgctccgagctgagccccgggggcgggctttcggtcattaacctggtgatggcagctgaatctgctgctggcgtaggcggcacagcgccgccaccggctctcccatgtccgacagggcaccactgatcctgctctcctgggccactatggtgactgctttcggccccttctgtgattagtattttaaagtgagttttggatctgtgtctacatggaggtgtcggatctgctgtcagttgtcttggacagttggcagggcatgggacggctctttcaaagcttcactggaaggcagtgctctccagccgccaaaccaccactaccagcagcagaaaacccactattaagttagtattacaaacctggcaagtcagttctctaaattaggcataagtctatgaatcttgatgtgactggtcacagtggcttatctctgcatgcatgctacgtggtggaccagaggataattctgtattcgtcgtccacagcctttgatctcttccctgcccatgaagatgtacttgagtcctccattccactttaaatagccagctcctgtccacacggaacagcacgacatcttttatcttttgctacctgcagcacctagcagaggccagcattcaataacagagggccaagaggcttgctttaaaggcctctgcaaacttgtatgagtaaaatggttctgaccatgttcccaggctcctcacgcatagtggtgatgagatagtctaccgtcctaactggggcaccgttgagagtgaacgg

SEQ ID NO: 11399 - DNA, 6000 bp, Homo sapiens
ctgcaccagctctcctgggggggagggggaaggggggagcccacgcaggtctctgaaccacgcctcaggctgcagcagccgcattactcatactcagcggacaaaggatcactcagcattcaatctcaccacttcaaaacattacagagggaaaacgacacctagaagtaggagtgagattcgctgaagttcccttctgaggaagacccacccctccgcctggagagccggggctggcggtgcctgaggaccccttcggcctggacagcccacgcgggcttggggggcctcgctctgccctcatggggcggccatcggttcccgaagcggcgagtgaaaattcaaatggccagtagggggcgcactcggaagtggccgccccgcatgaggcagttcagcggccccgagagtccggggagggaggtttattctccgcctgcacgagactgtgaaatccgcaaccatgagcaggagaggcggccctggtggggaagaggccaccaacatctggacggcaggtaagttccgacgcttctgcagcgagcgcgggaggagggacctgaggcaccgctaacactcagagaaaactaccggctgagggtccctggtctgaatgcttgggaccggaagagtttcggagttcagatttttgcagattttggaatatctgcaggtacagaatgagaaagctaaatacgaaattcatttgtgtttcatacacaccttatacacactgcctgaaggcaactttataaaaacacttttaacaatttcatgcataaaacaaactttgaactgcctggactgcagcccgccacacgaggtcaggtgtggaattttccacttgtgtcacgacgctccaacagtgtcggactgtggggcactctggatttcagatttccagatgcttaaccagtactcagattcctaagttacttgtcagaaatgcctatttcttgggattacacttctctctgcaaatgtctgtgaaattcctgttaaattctttatggatcatgcacatgctactaagttaattatgaaatttagtgtttaacgcaggtcagttgcaaaaacaagaatattgcttgcttcaacccaggaggacaggttattgcctaaaagatacacaacacctagtatgatgccttcaaacttaaagaaaggtttgtatctgtgggtgaagaaaagcagttaaaccagaaacttccacaaaaacaagtctagtagaactgagctgattgccaaagtgtgggagaaaaagggccagcaaaaaaatggttaacactagccttctgaggaggccgcccagagcctggccagagaggagccagagaggagcggggcggagggggcctataaagccctgtgccaaggggcagactcactggctcagagggaggacgcacccgccagccagccgggaaccttccctcgcgggctcccagggcgggtctcttcctctctctagccctgctcaggcattcggcaggtccagcagaggtacacctcctgcagcgggttccaagtgcacctccagcctgatgggcctgaccaaggaggcttccaggagcacagaaggggctgcaacccaggtaggactcagcctcggcctggcggtgccataccactgactaggggagcgggtgggtggtgccacccaggccgctgtcctgttatgggaacagctgaacacagaccagacacctcaccccctggtgagagcagcacccagcttcccaaactcaaggcacagacccctctcccccggagctccggtggtctcagcgtgaccgcagcaggggctttgcctggacggcctttctaactcgtgctgaaagcaggacccagtattccgtcacgttctgtcccagcaagaacgtgtctcacttcaagaaaatgagggtgcccactctgccctgccctgcggtgccccagtcactctcaccaaccctgaagccctgggagggccacacgccttttgacagatgcagacttaatacagctgactaaagtgtggctttatttctctatgacaagcagaggaaatctgaaatgaggtattgcactgtttataactccatggccacctccagtgaggacgtggggccagtggtgaatggcacactaggttcctctcacccaggaccacatcagacactaggacacatcagacaccaggtcccgtatcttctcggtgtctggcaacgatcaaaagactcaatttacatgggaaagaaatgaatgactcgtttttaaactatttttcccttggagttcatttaacaaaattaggaaagaaaataaacgttaagttgagggttctgcccacctttaaacttcctgccacgccacggtctaatacgttccaaaatttctacatttaaagagcaaaacaagtcctctgtgccgtttttaagaaattaaatacagaggcgaaatgcggagtctttcaaccttcccgacagagcctgagagcagaggcatttatgctgttcaatggtattatctactaaagatgaatcaagagtgcaaaataaccaaaatcaaattcaccagccccagctaagtgaaggttattcagtacttttagaataactgacacagaggcagtgattcatcttgtcttccccacccgcctgtttttgagatggggcctcactgcagtagctcaggctcgagtgcagtggtgtgatctcggctgaggctcgagtgcagtggtgtgatctcggctgaggctcgagtgcagtggtgtgatcttggctcactgcaacctctacctgccaggctcaggcgatcctcctgcctcagcctcccgagtagctgggactacaggcgcacaccactatgcccagctactttttttgtctttttttagtagagacagggtttcgccatgttacccaggctggtctcgaactcctgaacttgagcaatcctcccacctcatcttcctgaagtgctgggattataggccagccttttttttttttttttttttaagtaagtattttcaagcaataggtcaacaaatctctagtctggttttgcagcacttcaaaacaataacccctggcccggcgcggtggatcacacctgtaatcccagcaccgtgggaggccaaggcgggcagatcactacaggtcagaagttcgatacaagcctgggcaacatggtaaaaccccatctctactaaaaatataaaacattagccaggcgtggtggtgcacacctataatcccagatactcaggaggctgaggcaggagaaccactctaacccgggaggcggcagttgcagtgagccgagattgtgccactgcactccaacctgggtgaccaaaaaaaaaaaacattcaaaacaataactcctaatgatttcaaaaggtaaaatgaaaattcccaaaggaaaaacaactcaaacccattttgaagtgttagtttactccagggcaccagcaccatctgggccaggtaattctctgctgggcttgggcacctgtcctaggcactgtagggagctgagcggcagccctggccccaccagcacccccctgtgactgcccccgcatccccagagactgccagtgtctgcaggctgagacccccgtggcccgctgcatagagaacttccaggagcacagtgacacggggcaggtgacgggaccctccccactggcggcagagccggggtgacacggggcaggtgacaggacctccccactcgcagcagggccagggtgacacggggtgggtgatgggaccctccccactggcggcagagccggggtgacacagggcaggtgatgggaccctacccactggcggcagagccggggtgacacggggcgggtgacgggacctctccactggcggcagagccagggtgacacggggtgggtgacgggaccctccccactggcggcagagcccgggcaccgccgtgggcggacagcccacttctccctctctgcagaggataagctcgggagggactctctccctggagtttcttcctaggttacaaacagcattgcaaaaacatattaggttttacaataatttgttaaaacatgaaataaaaacgtacatattatttcccaaaacaatgacccctttcactctatattacgaaaataagtttatttttggtacctagaacacagaactagcatgaggaaaccgctgaacttctgttttatcgtaagagaagattctgctctgatgtccagctttctggacccactctctctctctcagaaacactggctttcccttcctatcttacttctccatcagctgctgaaatgcattttcccctctcctcacaaatgccgttgtcctggggcggccgtgcccataccttcattgcttcctgggcctgctctgtggctataaagggaaaaacacccctgcctgtgggagtgactcacgtccagcctccagctgcagctgagcagccgtgggacctgcaggaaagaaggccatgtacttcccacaggcgactcttccacctcagctcaaccacagccacctcccgagctcataaagctgaggttctggccctccccagtgctcctgacacacccagactctacagacacccggccaggggagccaggccttgtcccaaagctggggccactcgatgagacttcatcctctcctgttgcttctccaggtacccagagagtgagcagctccacgcgggactgtgcacggtggccgacacccgcagggacgcccgccggacgagcacgcggagggccctcgcctccacggatgcaccatgccggtgtgaggagcatctgttcttcccactctctgcagttaacaaacccaacccaaaccaccacaggtgctcctcctggggagtttcctgtctgacaaatgccaggctcacttcaaggagaatcacgcttctttctaaagatggattcaccatttaaaacagagctctgggagcctttcggcaaatcttgaaagctgcacggtgcagagacatggatgtgacttcccaagcccggggcgtgggcctggagatgtacccaggcaccgcgcagcctgcggcccccaacaccacctcccccgagctcaacctgtcccacccgctcctgggcaccgccctggccaatgggacaggtgagctctcggagcaccagcagtacgtgatcggcctgttcctctcgtgcctctacaccatcttcctcttccccatcggctttgtgggcaacatcctgatcctggtggtgaacatcagcttccgcgagaagatgaccatccccgacctgtacttcatcaacctggcggtggcggacctcatcctggtggccgactccctcattgaggtgttcaacctgcacgagcggtactacgacatcgccgtcctgtgcaccttcatgtcgctcttcctgcaggtcaacatgtacagcagcgtcttcttcctcacctggatgagcttcgaccgctacatcgccctggccagggccatgcgctgcagcctgttccgcaccaagcaccacgcccggctgagctgtggcctcatctggatggcatccgtgtcagccacgctggtgcccttcaccgccgtgcacctgcagcacaccgacgaggcctgcttctgtttcgcggatgtccgggaggtgcagtggctcgaggtcacgctgggcttcatcgtgcccttcgccatcatcggcctgtgctactccctcattgtccgggtgctggtcagggcgcaccggcaccgtgggctgcggccccggcggcagaaggcgctccgcatgatcctcgcggtggtgctggtcttcttcgtctgctggctgccggagaacgtcttcatcagcgtgcacctcctgcagcggacgcagcctggggccgctccctgcaagcagtctttccgccatgcccaccccctcacgggccacattgtcaacctcgccgccttctccaacagctgcctaaaccccctcatctacagctttctcggggagaccttcaggga

SEQ ID NO: 11400 - DNA, 6000 bp, Homo sapiens
gtggacacgggccccagcttggagggagaataagggactggggctgagttctctgccctccgtggctctggccccgagccctggaagtccccagagcagatgttttgctttcctccgacaggcgactggcccggtccaccctgctgctcatcccactattcggaatccactacacagtatttgccttctccccagagaatgtcagcaaaagggaaagactcgtgtttgagctggggctgggctccttccaggtaggtgtggcacatggggaggacagaactcactgggagccagggcctggttgctcacctgcaagtggtgctggagcctctttaatcttgactgtaaagtgagtgctagagtagaggtgatgagggagccctgtctgctgtctacccttagggctcctgtaagaagacacactggtgtctgcccatcactgcatctgagtatcctgagccagctgcccccactcctggcccccaccctgggtgacctgagatggcatctcccagcagcctggggtgcagggtggagtgtcctcaagagcccagtgtgtccacatcctgccttcagctttttaggccatgtaccccttgagttctgtcttacctacatctagatccccagcacagggcctggccacagagagcccagtgagctgcacaaatgcatgagcaaacagacatgagtgagtggggggatgagagggtgaacagaatgctgccttagtgcctggaggaaggagtggatggactggaaatgagtaaggggctaggtgaatcaccatgaggaaatgagcaggcaggagcagcagtaggtggatgaaggcaggggcagctccctggagtgtctggggatagagcgcctctccctaagccagctgtttgaattagtatttgatcttgatggtcagaaagttactctccatatctgacttgaccttctccaccattttaatccaaggccatttaaccgggcccaggttcttagtctggtgagactgactatgggtctcacctgagactggcctcatgggctcatagacaaagccctggcccaggagtgagagcccagggctcttgtctctgtgcttgctgaccagttctggggtccttgagctatcattcttccaacaccttcaaacgacagcacagggcacagggattgcaaggaactaatttgcagcattcaagaaaatgctcctgcttttttggtgtggatttaaagaatatatagagaatagctaagtgcatacgctgtgccaagtactcgctctgcgtggtgttctgcattgctgtgtatgatagtatctggcccaaggagggcagattggggagatgatggtggacaaggatggcacaggtctgttctgtcctggagggttcctaccctcagaagcctgcaggatggttaggagctaagagaaattctagggcattcagggaaggcttcttataggaagtgggatagagctggcctttgggaatgggaaggatctgaccaagggaatgtgagatccaaagctagaatgtatctgtgggacaggacttgaccaccagccacgtggcctcatgggtgtgcccatcttggtagagtagaactgtcccatcttaccccagatccctgggcaggtgcccccatccaggtcatggtgtatttctgcttcctagagtcatcccctccatgccccacacagcatttcagaaagtcctttgctagcatcctcaggcttattttctctattcccagggctttgtggtggctgttctctactgttttctgaatggtgaggtaagaccttggccctctggcttcttggcagtggaagtggggctttctggggagcagacaggggaaccacctgttggccacatgggactgactcttcagagagggctctgccaggctcccagcactgagaggaggggctggtcatacagctcctggcattgtgtggtgccaggacctcctgatacccacaccctgtgctggaatctgtcccactttgccagctgtgcagctaaggccccacccaaagagcaaagctcctggtaaaagcgtcggctctgctgagcgcagatctccctgggagggtcctctccataagacactccgtggtgaggaggaattgacaataaggaagggtggggcacaggacataggacctacaggccatgaggctgtgctaggcagagctgctgagccaggagctgcctggcactcagggttgcccttaactggccagccagcctggcccaaactgtcccctggtagaagggagactgtgagaatttggaagagaccccagggagagacctggaaccttctattaatactccattgccagagctgtggttcgggggctccctctgtaccctattggggtaaagcgcttgagcacaacccaaaacagaggtgctggggcagcggtggggactgaatggctagggtggatttgagagtaggcgggagtctttgcaccagtgcttgggtcttagctgcatcaccttggcaggctcctccctcttttgcatctgagcaacagagattgggctctgtgatcgcccagacaacctacagaaggatcagattaggacagacaagagaggcagaaagggccctgcaggtagtggccaggagagcttagaagtgggcatgtatgtagcttgttcagagcttgcagtgaaagtaggagctggaactggagagggtgggtgtaggcgctgcttccagttgtgcagtctgtgcactgcacgaaggtgcttgactgagaaggcacatggaggctgagactcagcatggcccccactcaccatgctaagagctacatgggtgtgtgttttcccagaggggtgcattatttaatggttctcaaccctgactgggaagctttaaaaaatatgatgtctgggtcttgtgcagaacttttgatataattgttctggggtatggcctgggcatctggaatttttaaagccccccaggtaattctaatgtgtagcccactcttactggtcagccaagagtggggatcctttcctgatccacctgccctgtgggactgcttgttaaagatttcctgaaggacccaatggactattctctgcctggcctgaaaacaacagggagccattagagggccttgctcagaaagtggcaagggaaggggctgttccggtcagctcctcagaggcttccttgcctacagctgctaaaagcccccactggagaccttgagggccgcaggctgcaactggggagtggggagggtgctgagggtggcactgccagcctgggaagggccccaggccaggacagggcctggaggctgcagaggatgtccatctggaagtgaccgcccagtttgctccctgcaggtacaagcggagatcaagcgaaaatggcgaagctggaaggtgaaccgttacttcgctgtggacttcaagcaccgacacccgtctctggccagcagtggggtgaatgggggcacccagctctccatcctgagcaagagcagctcccaaatccgcatgtctggcctccctgctgacaatctggccacctgagccatgctcccctcctcctcctctcctccatccacaggctgggaccgcaggcaggtgccagcccacgcatgtttgcgcctcttccctccccttgggcaggccctgggctggaagcttggctcctgaggggggagaaggaggcagggcacagactggaattgtcccctccttgttttggtactggtcccacccactgtggtcccctgggccctgaccccagacatgtaaatactcctcaaatttggaaaagttgtcccatcccttccccctttgccccagtgtccctgctcacttccagtcaggtctcagctccaccccactgtttcttggtcagcctcagtgatggcctgaccccagctgtgaggccttgtgagctaaggctgaagagaccttgcctgtgggagctggggtggtacctgccccaacagccccccatcatctgattttgggtgtgacccctcgagtgtgcatgccaccctggggctcttctcagtcctgggcccaagtccctgaagcctagcagagggccagctcgggtggccagaacaccccttggtgcaggcctcctggcactcgcctggcatcttggtgtccgggtgctcagctcctgggtcccagggcagtgggacagctcccaggctcttctcatcagagacttcagtttgggtggggagtctgcaggtcagggaaggttctggtgcttttcgtttgatccaaaaggagctgagagccagaaatgtggctgtgattgcgaaagagacggagtttgggagacccatggaagaaaaccttcgccatctccattgttttacccccagctcaagatggacagggttcttctggtcatctcccttccacctcttccaccctcatggatgccttccagaagctgtctccaaccatgcacaccacagagagcccttaagccctcccctccccatttcccctaagtcaaagccatgactaggatgtaccagccacctgcctctgatgtcggcgaatcctgaagcacctgcacccgaatctggggcccagggctgcccgacccccactcccatggatgatgaggagccccagacaccagctcctctggcctggactcaactattgaaatctctctgagacctctgcaaagatgtcccttttatgcccttgaccttgactcaccatgggctgctggggtgtcgggagaagccacacccaacatgcccattagcagaggctgctgctgatgtggcagctgctccctaccacccgccctggctccccagctgcaggttgcacaccctcagcctgagaatgtaaaatagggcagtgcccagctggggaggtagaggaaagtgctagagtacatggtccgtgtgtggcctagctcattccatgtcagcatttggtgttactcctgtccaaattctgtttgcagacttgtttcatgatgatgctctggaatgcttggggactttgggtggaggaggatgttacttcattttataaagaggaaggggcctgggagacttgggaaaatgtttctggagaggctttcagagtggctggaaaaggctcttgttgctgtaatttagagaggagctctgtgtccttggccagtcaagtaagttcctggatctttggcaaagccagaggaagaaaggagctacctgccctttcctgggcatgcttggtgactcagattgatcttggagtgtgcagtggcccttctaccctgcacctgacctcatgatcccctccacctgcactggtgtgcattactgaagcaagggtcctgtggacatcttgcattttgggcactgctagggggtctgggctgcttggaaggagccatggcctagggttcagggaactagactctatcccagttgggttcagactgctgtgactgtggacacgatgctccttgttctgggctccagttttcccatttgtgagatgaggcaacttccaatgcttctctaggccctgcacgtaagtgatttttccagttcaaagtcaagacaggtaaaagggcattcatcattgtgcctcatatcaggttttgatgaatatatgtgtgtgtgtgtgtgtgtgtgtgtgtgtgtgtgtagagggatggacaggatgctgtttattttccctttcttggaaatggaccttctgtcccttccatttggacaccacagtggaagctggtggcctggaaggaaggattaggtcatggacatttgaacaggtgccttgggcatgatgtatagatgcagtcatatataccttgctggggtggggtgccacctccagtggccagctccagatccaaggagcagccccctggggatggaccccattcattcatcatgactcccaacagttttcattgtggaagaagaaactttggcattatagagacatcatcacaaaacagtaaaaacaaaatcaaccc

SEQ ID NO: 11401 - DNA, 6000 bp, Homo sapiens
atataacagtcatagtgcctgccgtcatgaagcacctatgttatttatagaagacaaatacacaagtacttctattactggtgattcttattatcaagtaatccccaaattatattaatatttatttacatttatttttattcatatttgtttataatcaaaaattaaaatgtcccaaagcagccatttatgggctataggtactttaatatttgaacattcaagtttagaactaaccttaattcaggtgttaactgtacaatatgcagaacagaaaccaaaacaaacagtaaatagacaagggctactccttttattttttccttgtgagaatcagggggaaaaatacaaaagatccaaagcactgatcagagcatttatatacctaacaactgaggctcataaagcaccacaaaacaattttattctttccccccattgcccctgcatatccagcctatagggcttgtccatctctattcccttggatgtaactgaaaatcagtgactcgactttcagattgttcccagataaaacattccttctttcatttcagtagaaaaaaagaaaatgctacagactcaagtaaaatcaggtctaaggcagagtaataattaaaactccagtatccacctgagctaatgcttctcccctcacccagccttggaaggcagccagatggcagcctgcagtaggacctggcaggctcttctttctgcccagccggcttcctcatcctcatcctccctccaccttaatcagcagctggagcttttgatctctctgaattgaagaggtcagagatagaaggtataaggagacatgaaaaatcttatttgtctagcactgatctagcattgcattttcctgggctttgcaggtgttcaaagttgactttcctgatcccaatttcctcagttctttgaagaccctcaggctctggggatctctcactgcagactctgacctgattctggcgaggcattcatgacaggccactgactaccctacccaaagcctctggttgtctgcatttctccttcagccttctactaccaccctttatgtgaattataaaatggtggcacctccaggttgatgaagtatagacaggtgccctcccaccatgttgatacagccctatgcacaagcctgggcaagcagctccttctcacctctcagccaggagcctttgtgcagaccacaacctacaaggtgacattaccacagccctgtgcccttcacagactgtctactggaatcacagattctccaccaagtacttctgggtaggggctaagaaaacacgtctcctgctctgtgctcactctacccaaatagagtacacaggaaacccatcccttttgcctgacataagggcaagtgcagtcacttgccctattttattttagtcctctgaaagacagattcagacacagtgttttatatttctctgctgtgaagcagttcactacatcaccctaactccaacggaacatagcaatggttttcctatagcagcagcacacttcattagagttgaagcaaggagaaagtatataaaccctcaccctgggcttgcatatttaaaagaacaccaaaaactctctatgcttgtattccctacctttcttttaactctcttatattccacatggattagggatactccactcgaatccagcacagggggtgtgacaactcttactttggaatatggagtaattggctcctctttgcatggaggcttcagtcaaaagcaagactagaatacatttatttttatatattgcaacagtaattaaaataagaatttacagatgttctaaggagaaacgtatttttgaaagaagttgaaaagtgaatgagggatgcttattagcaaattaaagagaattttagtattatatatttacaaggacatatgtactttaagtccccagaatagatcagtcaatcctattctttaaaaaattatacagaggaatttacagtcacagggcagatgaagcaagtaaaggctgaagcaagaggtatggccagatgactagaaggtttaggtagccatataatttaatgcccaaacctgacactttgagaaataaaatgaagactatgaatacattcagacaacagatgtaaaccagaactgttctgcataaattggatgcctgattaccctatgtgaccaaaataacagttcattcctgactggtagtagaaggcaacaatgaaattgatctctgaagaaaaacagaggtttgcttcaaagagaacagtgcatttctgactggtagtagaaaccaacaaagaaattgatctctgaagcaaaatggaggtttgcttcaaagagaatgctagtgagagtaaactatggatcagcatggggacatggaagccattttatttgtaattaatgatgacagtacttccattttcaacgtttattctggatgaaagatgggacactttacaggccatatttatttgttttttgtttttgtttgaggtggagtttcactcttattgcccaggctggagtgcagtggtgtgatcttggctcactgcaacctctacctcctgggttcaagtgattctcctgcctcagcctccctagtagctgggattacaggcacccaccacatgttcagctaattttttgtatttttagtagagaggggttttcaccatgtttgccaggctggtctcaacctcctggcctcaggtgatccacccacctcagcttcccaaagtgttgggattacaggcgtaagccaccgcccccagcctacaggccatatttaaaaaatcactgtaaagaagtccaagtgttaatggtaaagactcctaagaaaaaacatcatgatttagttactcaaacaaatatagatgaattagtgaaatttagataaactaataaaaatatgagctacaaggagtgatctagatgcccaaatacatgtgtttcacttgaaaaatatttgagaaacttgatacatcagatgtaattaagaaaaggaactaggattgtttagaaatggagcccagctagaatacttggggagggtgtgaagagagggataatgtaatctcttaattgacatgttacttagtcagaggtttttatttagacctatcccttgaggcttttaaaagtaactcgaaaacacacacacacacacacacacacacacacacacacacacacaccaacaaataaacattaaaagccaatctatattcccgatcaatgacgaatttaaacagtgaagactaattgctttcaattaaatatgctcaacaattaaaataccatcagttaactattatataaaccagggatttttaatagtaactaatatttatatgcttcttacatggatttactaatcctcaaaataattctgaggtatgagcaattgttattcccattttacagatgatgaaactgacatataggcaggttaagaaacttgcccaagttcacgcagctaggaagtgatgaaaattcaggattcacattgaggaattcctttgtgtgtatggcgtaacgtgggagaggaaagaagtgtctcatcaggcaatatctgataacagactgataatttgcctcagcatttcagcctctactcaccacaagccttagttaacagctagatacagactatggagtgcagtttatcagcactttccgttgtgcaaacatcagctacttttgtgtgtgtgagacaaaaacatcagctctcttctacttctctcaatcccagctaattctgataaggtcttggaagcgcaaaatgatgtcttctggaacgttctgaaagagaccaaaatctacccacacagcttcatgaggatctgaagccttgcagtgtataaatctttatctttctcatgttcatgtcattgccccttgatatacagttgtctattgggcagacattgttaaaagtaaataaattcttaaaattaaaattaaattcctataaagatctttttttggtgaacaattcatgctggaaaatactaatgaaacacaaaggaagaggaattttgcttgtacgtggtcaatgctattgcattccagaaagaatacgttgaaagggggacttctaaaattttagcatttcactatataataacactttattttttaatatattcaaatttctggatctagtggagttcacaatgaaatatatatatatatatatatatatatatatatatgcacatgtgtcttttaaatattgctgtccctctaaaagaatcagtaggtaaaattatttctgtagtttaaaagttctggctaggttacaaaagacagcaattgttaaacaacttaacattaaatattaaagactaaatgtagcatttaaagcattaagtttaattgtgtctggcttcatataattcagtccttggttaatacaaagttagtatattagagtacaaaaattaatgaagtttcaatttggaaattaaacagtatgtgtttctagacatagaaagatgcctggaattttacctttaggattttatctgtagctggcagcctattaaagctgtttccgcgtgcctttttctcttttgtgcctacgtcaccgatttaaggttcctatttatttatttatttttaagaagaaagaagaggttctgtaggaaacattgactgtatccgacaaccatagcaggactagagaaggaccaatgagggggtgctgggggtagctttaagaggcgaggtggtagcagaaaaggataagaagaaagataattcagcagtcccctataatcttattccacccaagaaatttgggagaatgcgaaaaagcagcagcccagcattcccggatgggcgtggcttttctccaggggctgtccaattgaattccttcagagggagaagattgataagggttgctaggaaacaggagcgtctgcctcccgcctgacccagagattgttctgcacaaaccctctccaggggctcgcagtgtgcagttgagtcgcgagtacggctgagctgcgtaccggcctccctggctctcacactccctctctgctcccgctctcctaatctcctctggcatgcggtcagccccctgcccagggaccacaggagagttcttgtaaggactgttagtccctgcttacctgaaagccaagcgctctagcagagctttaaagttggagccgccaccctccctaccgccccatgccccttcaccccactccgaaattcaccgacctttgcatgcactgcctaaggatttcagagtgaggcaaagcagtcggcaaatctaccctggcttttcgtataaaaatcctctcgtctaggtaccctggctcactgaagactctgcagatatacccttataagagggagggtgggggagggaaaagaacgagagagggaggaaagaatgaaaaggagaggatgccaggaggtccgtgcttctgccaagagtcccaattagatgcgacggcttcagcctggtcaaggtgaaggaaagttgcttccgcgcctaggaagtgggtttgcctgataagagaaggaggaggggactcggctgggaagagctcccctcccctccgcggaagaccactgggtcccctctttccccaacctcctccctctcttctactccacccctccgttttcccactccccactgactcggatgcctggatgttctgccaccgggcagtggtccagcgtgcagccgggagggggcaggggcagggggcactgtgacaggaagctgcgcgcacaagttggccatttcgagggcaaaataagttctcccttggatttggaaaggacaaagccagtaagctacctcttttgtgtcggatgaggaggaccaaccatgagccagagcccgggtgcaggctcaccgccgccgctgccaccgcggtcagctccagttcctgccaggagttgtcggtgcgaggtaagggtcccagaggaggacgtgtccctctggagggcgccc

SEQ ID NO: 11402 - DNA, 6000 bp, Homo sapiens
gctcctctctttccagactgggcagccaggcagaggggctcctcacgtcccagacgatgggcggccaggcagagacgctcctcacttcccaaacggagtggcggccgggcagaggctgcaatctctgcactttgggaggccaaggcaggcggctgggaggtggaggttgtagcgagccgagatcacgccactgcattccagcctgggcaccattgagcactgagtgaaccagactccatctgcaatcccggcacctcgggaggccgaggctggtggatcactcgtggttaggagctggagaccagcctggccaacacctgaattgatttttgtataaggtgtaaggaagggatccagtttcagctttctacatatggctggccagttttcccagcaccatttattaaacagggaatcctttccccattgcttgtttttctcaggtttgtcaaagatcagatagttgtagatatgcggcgttatttctgagggctctgttctgttccattgatctatatctctgttttggtaccagtaccatgctgttttggttactgtagccttgtagtatagtttgcagtcaggtagtgtgatgcctccagctttgttcttttggcttaggattgacttggcgatgcgggctcatttttggttccatgtgaactttaaagtagttttttccaattctgtgaagaaaggcattggtagcttgatggggatggcattgaatctgtaaattaccttgggcagtatggccattttcacaatattgattcttcctacccatgagcatggaatgttcttccatttgtttgtatcctcttttatttccttgagcagtggtttgtagttctccttgaagagctccttcacatgccttgtaacttggattcctaggtattttattctctttgaagcaattgtgaatgggaattcactcatgatttggctctctgtttgtctgttgttggtgtataagaatgcttgtgatttttgtacattgattttgtatcctgagattttgctgaagttgctcatcagcttaagaagattttgggctgagacaatggggttttctagatatacaatcatgtcgtctgcaaacagggacaatttgacttcctcttttcctaattgaataccctttatttccttctcctgcctaattgccctggccagaacttccaacactatgttgaataggagtggtgagagagggcatccctgtcttgtgccagttttcaaagggaatgcttccagtttttgcccattcagtatgatattggctgtgggtttgtcatcgatagctcttattattttgagatacgtcccatcaatacctaatttattgagagtttttagcatgaagggttgttgaattttgtcaaaggccttttctgcatctattgagggaatcgtgtggtttttgtctttggctctgtttatatgctggattacatttattgatttgcgtatattgaaccagccttgcatcccagggatgaagcccacttgatcatggtggataagctttttgatgtgctgctggattcgttttgccagtattttattgaggatttttgcatcaatgttcatcaaggatattggtctaaaattctctttttttgttgtgtctttgcctggctttggtatcagaatgatgctggcctcataaaaagagttagggaggattccctctttttctattgattggaatagtttcagaaggaatggtaccagttcctccttgtacctctggtagagttcggctgtgaatccatctggtcctagactctttttggttggtaagctattgattattgccacagtttcagagcctgttattggtctattcagagattcaacttcttcctggtttagtcttgggagagtgtatgtgtcgaggaatttatccatttcttctagattttctagtttatttgcgtagaggtgtttgtagtattctctgatggtagtttgtatttctgtgggatcggtggtgatatcccctttatcattttttattgcatctatttgatgcttctctctttttttctttattagtcttgctagcggtctatcaattttgttgatcctttcaaaaaaccagctcctggattcattaattttttgaagggttttttgtgtctctatttccttcagttctcctctgattttagttagttcttgccttctgctagcttttgaatatgtttgctcttgcttttctagttgttttaattgtgatgttagggcatcaattttggatctttcctgctttctcttgtgggcatttagtgctataaatttccctctacacactgctttgaatgcgtaccagagattctggtatgtcgtgtctttgttctcattggtttcaaagaacatctttatttctccctgcatttcgttatgtacccagtagtcattcaggagcaggttgttcagtttccatgtagttgagcggttttgagtgagattcttaatcctgagttctagtttgattgcactgtggtctgagagatagtttgttataatttctgttttttacatttgctgaggagagctttacttccaagtatgtggtcaattttggaataggtgtggtgtggtgctgaaaaaaatgtatattctgttgatttggggtggagagttctgtagatgtctattaggtctgcttggtgcagagctgagttcaattcctgggtatccttgttgactttctgtctcattgatctgtctaatgttgaccgtggggtgttaaagtctcccattattaatgtgtgggagtctaagtctctttgtaggtcactcaggacttgctttatgaatcttggtgctcctgtattgggtgcatatatatttaggatagttagctcttcttgttgaattgatccctttaccattatgtaatggccttctttgtctcttttgatctttgttggtttaaagtctgttttatcagagactaggattgcaacccctgcctttttttgctttccatttgcttggtagatcttcctccatccttttattttgagcctatgtgtgtctctgcccgtgagatgggtttcccgaatacagcacactgatgggtcttgactctttatccaatttgccagtctgtgtcttttaattggagcatttagtccatttacatttaaagttaatattgttatatgtgaattcgatcctgtcattatgatgttggctggttattttgctcgttagttgatgcagtttcttcctagtctggatggtctttacattttggcatgattttgcaggggctggtaccggttgttcctttccatgtttagcacttccttcaggagctcttttagggcaggcctggtggtgtcaaaatctctcagcatttgcttatctgtaaagtattttatttctccttcgcttatgaagcttaatttggctggatatgaaattctgggttgaaaattcttttctttaagaatgttgaatattggcccccactctcttctggcttgtagggtttctgccgagagatccgttgttagtctgatgggcttctctttgagggtaagccgacctttctctctggctgcccttaacattttttccttcatttcaactttggtgaatctgacaattatgtgtcttggtgttgctcttctcgaggagtatctttgtggcgttctctgtatttcctgaatctgaacgttggccagccttgctagattggggaagttctcctggataatatcctgcagagtgttttccaacttggttccattctccccatcgctttcaggtaccccaatcagacgtagatttggtcttttcacatagtcccatatttcttggaggctttgctcatttctttttattcttttttctctaaacttcccttctcccttcatttcattcatttcatcttccatcggtgataccctttcttccagttgatcgcatcggctcctgaggcttctgcattcttcacgtagttctcgagccttggttttcagctccatcagctcctttaagcacttctctgtattggttattctagttatacattcttctaaatttttttcaaagttttcaacttctttgacttttgtttgaatgtcctcccatagctcagagtaatttgatcgtctgaagccttcttctctcagctcgtcaaagtcatgctccatccagctttgttccgttgctggtgaggaactgcgttcctttggaggaggagaggcgctctgctttttagagtttccagtttttctgttctgttttttccccatctttgtggttttatctacttttggtctttgatgatggtgatgtagagatgggtttttggtgtggatgtcctttctgtttgttagttttccttctaacagacaggaccctcagctgcaggtctgttggaataccctgccgtgtgaggtgtcagtgtgcccctgctggggggtgcctcccagttaggctgcttggggatcaggggtctgggacccacttgaggaggcagtctgcctgttctcagatgtccagctgcctgctgggagaaacactgctctcttcaaagctgtcagacagggacatttaagtctgcagaggttactgccgtctttttgtttgtctgtgccctgcccccagaggtggagcctacagaggcaggcaggcctccttgagctgtggtgggctccacccagttggagcttcccggctgctttgtttacctaagcaagcctgggcaatggcgggcgcccctcccccagccttgctgccgccttgcagtttgatctcagactgctgtgctagcaatcagccagactccgtgggcgtaggaccctccgagccaggtgtgggatataatctcgtggtgcgccgtttttcaagcctgtcggaaaagcgcagtatgcgggtgggagtgacccgattttccaggtgccgtccgtcacccctttctttgactcagaaagggaactccctgaccccttgcgcttcccgagtgaggcaatgcctcaccctgcttcggctcgcgcacggtgcgcgcacccactgacctgcgcccactgtctggcactccctagtgagatgaacccggtacctcagatggaaatgcagaaatcaccgtcttctgcgtcgctcgcgctgggagctgtagaccggagctgttcctattcggccatcttggctcctccacaagtaagattttaaaaatcatttaaaaagtattatttctgtttttgttaccttgtcattaaataaggtttctatcttccttgacctctcaagatcagtgatttagctacatgtaaatgccttcttgcattggattcttcccataaaccagactgctcatttctctcgtggattgggccttctatgactcatcattcttaacttgtaagtgtccaacaagtgtggatttggatgtttttcttttgatttagtttatgctttctttttttctggacacattctcatttgctcagaatgagaagtcatagatttcatattgacctttgatggtaaaatgaataaaggcagttcaatcactatcctattttaagatttctttatgtaatttcagccttttagaaattgatacttctagaatttaataatgtattttttttctatccagaaatttcagcaatcccataaactgggaggtcagagacagtgtctttgtaaatgaatgtgggtgactttccctacatttttatattgcctgtgatcctcccacagttccatcttcctcctgctcaccaagtgagtgctcaagaaattcaaaaaagccatgtaaaatcccctccttgaaaactttcagtgactccatagaaaatccagacttgctggctagacattcaagaccttcccaagatgtattctgacaatccctgtagctagtttctgcccagttttctctttatcctaacttatgttttggccaaactaggcttttcccccataagtagaaataactttaatttatgaggtacctaccatgtgcta

SEQ ID NO: 11403 - DNA, 6000 bp, Homo sapiens
atttaattttaaatattcagtacttgtaccattattttcattttgaaaatgtatctatcttataatgatttggctttataacttataaagacatgtaacttactttatcctttaaaataatattttactaacaatattagcgtgtagctacatatcatatttaagaaacagcaatctactaagaaatgtgcccaggtcaaaaatagaataagccaattgaaataaaatattatagcaaatgatcagtatacatctaccaaataaaagggttatgaaaggtgaagaccaagtagtaatctccaaaagtaatacaatgattactgattgaagttttatacccgagactaagctactataatgaaatgtttaaaaaatattttagggtattatcaccttaggtcaatctgattattattttgaatgaatgaatgaatgaaatgaatgaatacccaaatgaatgaatactgaagtcatgacaatgtttaacaccttgagatgctcacaacaatttggaatacccagagaagatgacttgaatacaaacaaactatttaaaattcactgtggctcacagtaaagatgcagtgggtttctatttgtagaacaaagaatctcaatcaaaaacctatatatgactaaaatattctcaaatgcaattatcaaggctttagaaagcatatatactttttactatgtaattctttcctgttcccccacctccctgcatttttttttaatgtttggcataagtgaccaacaaaccagaatagaatacacatttttaaaatactaatttacacatattctatttaagaacaacatacaaccactcataaatttagcctttttaaaagtgtcctttatataaaacagtggggagcgggggaaatccctgctatacatatgaagcacagtttaagcccaatacaactgaccaatcaaaattagtgaatacactgcatctctctgcagtggagagaagcgacaaggtaggctgtcattctgcaaaagctgcccgaacaggctttcctctgaaaagcagtgccgttcctttttagaaagactgaatctaaatgttgtctctggagacaagaagccttcagtatgttaaattactttcattatgtattttcagatgcttattgattccacagtaggaagagtgagagactgcagcagcctctaagcagcactacatgttccatacattagcagtactgctgaaacaatggcacactacagacacatattttcattaaggtcattttcgaagagatgtttatgaccctcttcccccagtcctctactaacaagtgaacaaaatgaatcaatccaaactggaaatgcttcaactacatcaagaatttatcaaatctttagcagaggtaagatttgttcctattatagtatacagctgcttttgaaccggcatagtggggtaaaaattactttgaaaaatttcagcctaaattttaagagtttgtttaattctacttattgctagacatgtattttaagatctatttcttttaagacatgctacattttaaatgtaattttttaggatgcattgttaaatacaaatattctttgtaaattcattatgaagacagcttttgagtcacttcagatatactaaatattcttaatgtaatcagtacagtttttctccagtgtttcaaaaatgcttctgtttcttaaaagaactaggtttactattttgctgttacttattacttaattttatgttaagtttattatttggcatgttcactgaaaattaatttgcagttacaatttttattaccttttgtatttcaaccacatgaacaattcatcaatggaaatttatagtatcttatgaaatctgttttaatgagttaaaattcaaaccatgtgctaataattaggcaagttacaatatttttagagcaaaaaatgttgttaaatttattacaaagaagaaataacagtatgtttagtgtatgctaattgttcatcatctctgaaaatacaggttagcttctaaaatgagagcagaaattagttttaaaaaatatagcttttctctcacaattgtatttgaaatgtgaactctattgttaaataacataatatatacaatctttattaggaaaaaagacttatttaaagaaacaattttatgcatatagctgtggctctaataataacagtttggttattttgataacaaatactggatagtttttaaacaaaactaaagtaacttgcaattaattacaaattattaaaaaccctatttcttaaccaattttcttcttttcacaagggccaatagcagctaattcagtatttacaactgacaatatgaagaatgcaattgactgagcatctccctagctgtctgaactacgaactgcaagatgttcttgtaacacgactttaagacattaaggagttaaaaccagggaataggtctacattactgatggaatataaaaaatcaactgtatcctaagaagatgctacataaaataaccacaaaaagaaaaacaatataactgtaaaagcctgaaaagaatttttaaaaggggaagtttatactttcatataccagaattgtggaagttactgattctggaagacataatgaaacatgaatttccaaaaagaaaagaaaatactttatcagcacacaaaaggaagatttaggaagtgttttctgcactaaatattcagatattcatatcaattggtatgactaatggatttttctatctgacttttatgaccaattatgtatcctcttctaatgaaaacaaacaaaattaaacagcagatggtttttatcaaaaggacatggcctggatttataatataaagcaagttatgtgatcaagaaatcatttcaaaatagtgagcactgctattaaaaacagatttacaatggtaacaaaaggatgtctaaatatattttagaagctacaaacgttatgtttccttttttgttttcacatattctggaaaataaagaaatattatcatgtactccatcaaagggaaacataattcctatcatctgaggaaattcctcttggccgtgactttttaaagcaaaacaaatacaaatattatgtactgttctttagaaatccatcagccaactaaatctcataatgcatgcagttgaagtattggagagaaaacgaaagaattcctacaagacatgaaataaaacacagctacttcactgttgtcaggtaaaaattcatgtcaaaatctgtcaatgatatcatgtatcaatttgccaaaaactgtcatagtgaaccaaaaggcccataaggcaacagcaaacaggtaggtcagaagatgcatgcaccccaccacactgtttaacatttacgaaagaacagaatcttgctctagagaaaatgtatttttcttaatcatcatttaacttgacatttctgctttatttaattataaatctaactgatgtgacaaagacctgatgtttaatctgtcagttcagaaaatttggcacacttaaaattttccatttttataggatttcaatgttagctaagaccttaacttactcgaataaatatacctctagtaatacttcatactaattcaaaagaaataatgttaccatttgtgtttctgcaatattattcccaaaaaagttcataaataaaactgtattctaaaacttgtcaaatataacattaagtgaaagttaacatgaattttgaaaattattagcttttataatttatgttgaatatgattttgcagttgaaatgctgtatttgaaatgtgaaatatagttggttgtatgagttcatattttaaaatgaatatactgattaactgacattttagcccagaacattagacattattttttacaaattattctaaacccctatatattaaaatatagatttgcatgaattagcaaaagcgtttgtatttttttttaatttttcttcaaaattagacaatgggtgatatatacaaaaggcttcacaggtaatgtgtaactttaaaagcttcctcaaaaaacgggcttcacatactccttttccctaaaatttcatcttttactttaaaaactcagtttaaacaatgtcaactgatatattcctttaaactacttcaaaaatggctatttcttaatgtgatattaaatttcaattttctgtttccacaagatacaagagggtgtggtcacaaaataaatcatttcataggagtgattaatgctcttttaccaagctttgtagctttttattttagcataatgtcccacttcttctaatttttaagtttgccaactgcaaagttcagtgagcattgtaactgtgatatgtaaaatattaatcactggcctatttctgtgggaaataaccccaaatatcaccaagcacattgttgacttctgaatatgaattcaatcaacatggataaagcatcttaaactagtgctctgtaccatttgtcattttaaatgaacacttgtcctgttcatttgaaatctcacaggaataattacacctacactcattatgctagagcatattaaaatagcattcatttggtacctactcacaacatttaaatgaaattttaagacactgggctgaaattaattttgtatgctaggaagttttatcatacaaaaatacactttatctcaaataataagcttgaaatactcaaatgagaaaagccctttagcatattaactttgcactacagaggaacaatttccatagttatttcttcaaaaggaaaacacaattttcttttatatcaaaacaatgcaaacttgatggttcttaattctacattttctattaatagtttacaaacttaaaaattaaactaagtacacaattgaaagattttttttcttacaaagaacacgttatacgtcatttaaattgccaaatatcaaatagtttattctatttcactttctagggaaaaaaaccaactgctccaaaagaatgtgtttttctcccattctggaaatcaacatgcagtctgaatctaacattacagtgcgagatgacattgatgacatcaacaccaatatgtaccaaccactatcatatccgttaagctttcaagtgtctctcaccggatttcttatgttagaaattgtgttgggacttggcagcaacctcactgtattggtactttactgcatgaaatccaacttaatcaactctgtcagtaacattattacaatgaatcttcatgtacttgatgtaataatttgtgtgggatgtattcctctaactatagttatccttctgctttcactggagagtaacactgctctcatttgctgtttccatgaggcttgtgtatcttttgcaagtgtctcaacagcaatcaacgtttttgctatcactttggacagatatgacatctctgtaaaacctgcaaaccgaattctgacaatgggcagagctgtaatgttaatgatatccatttggattttttcttttttctctttcctgattccttttattgaggtaaattttttcagtcttcaaagtggaaatacctgggaaaacaagacacttttatgtgtcagtacaaatgaatactacactgaactgggaatgtattatcacctgttagtacagatcccaatattctttttcactgttgtagtaatgttaatcacatacaccaaaatacttcaggctcttaatattcgaataggcacaagattttcaacagggcagaagaagaaagcaagaaagaaaaagacaatttctctaaccacacaacatgaggctacagacatgtcacaaagcagtggtgggagaaatgtagtctttggtgtaagaacttcagtttctgtaataattgccctccggcgagctgtgaaacgacaccgtgaacgacgagaaagacaaaagagagtcttcaggatgtctttattgattatttctacatttcttctctgctggacaccaatttctgttttaaata

SEQ ID NO: 11404 - DNA, 6000 bp, Homo sapiens
ctaggtgacagagtgagactctgtctctaaataaattaattaattaattaaaataaaataaaattcttgtttccctcctggcccagattccccatatctaatcaatcaccatgtgctattgacctcgtctgctaaatatcccttaagactgtccacttctatcccatccctctccactggtgcatgctgctaccgtctcgcccgggccactgcacccggccacagcttgggcactggcctccacccatttcacgttattccagtcctttctccatacagcacctaagtgagcttcaaaagcaccagttctagcttagattcttcagcagcctctgaatgctcttgagatgaaatctaaatcttcagcatgggttatactccctgcacaacctggctctgccttcttctctagcagcctattcacctgtcaccatctgtccctgcccccatcccccccctctcccactggctttcagtgtctttagctcacttctctctgtgtctctcacctgtaggcctttgtagacactgctcctctgcctggaatcctcttttgcaacagagaatcctttgcttctcctcaaacacaccttgcacttgtcatgtcatatttaatgtctattttccaggctagattatgagcaccatgaagggacaaacactgccatataaccccctctgcctgaagcctagttggccctcaacaaagatgtattgtatgaatgaatgacggaagaatatagagttagaagagtatggatcagtgtttggttgtgcctctctggtatctttgctggttttaagacaattgtagaaaccattaaatttatttgaacatccattttcttatctttaaaaaggagataaaaggattccttcacagttctagtaaagattaaataaggtaacataaaaatgtacactgctatctttaagggtcatagaaatggtggctgtggtaaatactgttgacctgagagacagagaataagtgtaagagagaaacacaggattcataaagccggaaggaccttcagagacacacagaaactgctcaatttacagatgaagaaactaaaggtcaaagaccctagacccttgctcaaatctcctaagcaaatggtatgggcaaacctgaagcaaagtcgcttgacttaagtctcctgtaagcacttagaggtcctactgaaagaaagctggcaggccatcagtccagagaagaccccagaattctatggacccaatgctgcacctgaccgtgcacctttcttgtctggtccaggcttaaactgaaaactcacctgctcagaatactgtcctgcttagccactgtgtacacacacacacacacacacacacacacacacacacacacacactgagccatccttacaaactcttgcaatagagcctgacataaccaaacaggcaggtccctagcacactgcagagtagtatgtgacaagattctggccatcccagagacagagataccatctatatggggcaaagagatatgtctgacataattgtacacaggcagaaggacttttatgtccttttccagttaactgacaccatatgcgattggctccctatgtctagcccttaagtacaaaatactataatccctatgggtgattctgtgatgtggccctgttctctcaaccacacatcgaataatatacttgcttactttaagacactttctgaaacttggcctaaggagaccatgggactaaacctgtagtctctcctcacttacatctgcatggttcaggccctctcctccatatacaccatcacgtcttcaaaacaagtagcctctaaataaaagtgtgtttctgccatatctagggtatatctataaataccatgtgctacctggacattttctgttccaatctagtggcacagtgcatgcctgcctctgcaagcccattgacaccgtttctaactgtcttttttcatttggaaatatcagtggtcacctgctcagccaccagttaccgcaaagggagaacataccccacgttccctatacttgatcctatctcagtgatcccgttgcaatcaggcatgacaaagctaaaatgtgacaaagtgaaaggaaatctgtaaatcatggtcttactcacgtaaaggcatcaggagagagttttttgcaatgctcattacgttagagtgcaaacatcctcatctccttctccactgagggtgaataatcactgtttatctgtgtacaggcaaagccagggcatgggattatggggatacggccttgcttcagaccacagacattttgcatccacataacctcacccacgtgtgacttcttgagaggcaaagcttcaagtcatccctttaacataatgtgtgacagagctcactatcttccctagagccccccccccaacaccttagctcttgtctatttctagtcactagaaacaacactgtatttcaaggatacaacccctccccaatcaaactgccaaatctttgaactgagactcagtgccatatatatatttttgaggaccatgcttcctggattttctagcaaggttgatttcaaatattctgacttacaaatcactaaaataatattgaggttaaaataagatcaccacatagatatataactttattcactgtttgacatcactgccctcaatactacaaagatatcaaaacaggggtagctttctggaccactgactactacaatgtgtgttctatccattgcgggaaagtcccaccatgccagtgaaagctgtaatacacatttatctattctctaatgtctgaaaatgtcacaccaactgccttatagaccagatagtttatataagaacattattagtgtcaatgctgacttacactctacaatctcatctgtggtcctggtggcatccacacagataacattagtgtgagtgacgtgtttgtgtattaacatagaccttgagggtgactttgttccagtctaccttgcaggcactataagtgatcaactcctgcttactccacagacactgtgagtgacccagcccctgtctacactagagctgttggtcacctgtttgtctacaccactgacacttgagtaatgctgctcccgttgaacccaagaccctacgagtgactccattcctgtccataccacatagcgactgacctctccagacaccacaaatgacgtattcctgtctatcccacagacaccacgtgtaacgtggccacggaacctcagacagaccgcgttaagggcactgatacactctcaggacctctaatatatgaacactcttctctctattgagaatcactatattctgttgacgagagggattcctttgcactcctcctgatttctctctcctccccactaggaccatgacatacattcctcctgcatatcagtctcacccagaactgacacgccctcatcccatcttcccagctccccaggactccttcactagccacggcttcacttttaggcccacagattggttaacaaatgacacccattttgctaaggcctatgccaggaacttcttcatgctccaaatgtggataaaacaagacgtctgagacagaggccacatcaagagctttttagctggagctgggacctctggattaggcccaagatgcaaggccagacagtggagtgcagtaggggagcaagctagggaggaacctcgaaaggaaaaccaccctctctcatctgtttgacacacccttctctctcaaccagacaagagtcctggccagagttcacttctaggtagacaggagggcaaatctgtctttggaacccaagatccaggaagggaagaaagggactgagatctggaaatgacgtagtatcacaactggctctcctccggtagtcttgccggaaggcaactgcaaaagatgctcaggggttctagagctctgcgtccgcattctagcaccccaacgcctacctcagcccccaactctaaataacttctttccaccttgctaagaatgcaacgttgtgattcacatcaagctttaggaggctccccatatgtagggaactggggtgaggggcagggcaggattcactgttccaggttacggagctttggttaacacggagagaagctacacatagactcacacagtatgcaaatacctatggagatacataaggaaaggccccggcctggttaaggaaaaggagccgataaaacctctccaggtaaggaacagcctagaaagggaatctcagttattccttctgatatggcttagctttccccagggcgcctactttgaagaaagagccctgattattggcccggggaacgtctgggggcagggtgcccatttcctaggcgggacccgaccggaagcaaacttgtaggcaacaacatttcctctagttcctctcctcttccccaccagggtcctcagccacacaccccgagccctgcctgcgggcccagcccccccatttccggagcctgcgccccggacccagcgggggctgatccctgggaaaggcctggcttcctcttccttcctgtccctgccccacctccgccgggctccacagccgccgggagcccagggccgagacgggaggagggcacccacctggtcggtgtcacatgctgcttcggccccagcgtcccctccaggtcccggcgccggccgcagtccccagagccgtccccagcgcaggcccggccgccccacccgcgacccgcccctggccgcccgacgggagggagggatcgggttctcctaggaagtttcaggtgaggaaacagggacacaccttcccggaggaggggcagggcccctccgcgcgcgagccccattggtgtgaaagaagctcccgcgtcagagctgggaagtgccgggccggcggggaggggagcccgggcgcacgggccaggccgcgggctgtcccagggagccccgagggcgcggtgcgcgggcgcaggtcgggcgcaggcggggtgacccggggaaggggcgcgcacagagacagagggagccagccgggccccacggtgtcctcggacgcctccgaaatctccctgcgtgtttgtttcttcggagcttcaccggagcctgactctggaaccggcctgtctgcctgctgcagtctgtatgtgtttgtcttttgccttggccgtgcctctggaagtctgacatccgtggttgtacatgtgtctttatcttcaggcctcattggtttttggtttgttcgttgttgttgttgttgttgttttttctgagacggagtctcgccctgttgcccaggctggagtgcaatggcgcgatctcggctcactgcaacctccgtctccgggttcaagagattctcctgcctcagcctcccgagtagctgggattacaggtccgcgccaccatgcccggctaatttttgtattttttagtagaggccgggtttcgccatgttggccaggctggtctggaaactcctgacctcaggtgatgcacccgcctcggcctcccaaagtgctgggattacaggcgtgagccaccgcgcccggccaaggcctcagtgttgatttctcttccgtgatgtctcctcctatagaataaagagtgtctcctccatctcctcctccgcccccttcttcgtttctctctctctctccctccctcctcccccctccctgtccctctccctgcctcttcctctcccctcttccttctcctacttagggcctagaagtgtgcctctctgaaaggacatgcccgtgtccttctgtattcccgagtttattttagaatgagtgcatatctcagggtgtatgttccttctagggcctgtgtgtgtgtgtgtgtgtgtgtgtgtatttaaatctctaagcccatgtttgtgtgttttcttatgcctgtattttttttttattctttcagggaaacgtgttcgttagtcttggaggccaaggctgagtgggtttatctctgtgcccctcc

SEQ ID NO: 11405 - DNA, 6000 bp, Homo sapiens
tgatgggacccgaggccatgtgctcattgctgtaaagtggggccattggttcacaaggatgctaaatgcaatcctgtatcagaggatggaaacttacaaaggtccttggacagtgacctggctgagaccctgcaggcaggagaggcaaatccatccctgctgatgaatagccgctcttcaaggtggctggtgatccccttccagtgctctatgctgcagtgtatgctttctggaggatgttaaaagtgataaaaacatatccacactttgtccttattccctgtggttcatctacaagcctctttcacagacatccttccttccagtcattcaccttccagacctttagccactgttcatgagtctgtatcatcttctttcaggctgctcccctttccaaacaaaatggaagatcaagtgcagcacctagagctctgccccttggaagggtctcccctgactgctgtctcccaaggccacccagagtagacatgagacagcagcagtcttcttgctgacttgcaccaacacatcaggctgacccacctgtgaattccccttggccctgctggtgccgcatcagctggacatgtggccagggctttgagctgaggggtaggtgcttgtacagtgatgacagacagcagggtggtctgggccacctcttgtggagctggcttgcaccctccagctctgctctgcaccacttctgttttatgctgttttgctgctgagcccacccaatcttgtaggtgggtctgcaaaattccacatcttgatggttatattttgttccagtgtcacttaatgtctcatgctcagatgctctatttctgccagagccctggctcacacaaactgcttttccaacagtgtaatgtttcctgttgtagacggagtgactttcctccagaaccctcagggtctatactgtgactcttttactggtgtttatcataaaatcctcatggagttttttcccattacaggtactcctagtaacataagctttgcaaatcataaagcccaagcagttgggctgctttcactgcagccaggacttctgctagagccatttcctgctcttagccccaaccgaacctggcagcctttccacatcaccaggatgtgaatcagagcagctgcctctggcattcaaagtgctgaccaagtattaggtttcctttccagcgggggaggtaccagatgcaatacgtatatttttataatgaaaggaataccctgttacactccaggccactgaagccctaacatcatcaatgacgttgttggggtccgattcttcaaagacaaaattatttctcacatcttggagcacacgtattttacagaggactctaacaaacttgagacttcttttcttgcttgtcttgtcttattgacatcccacatcaacacagtggagcagcgtgatgttctgatgacagcagttttcaaacactgtggtctcaggaccccttcatattctttaaaattgagtaccccaaagagcttttgtttacatgggttatatatattaatatttactggaaaataaactagagacattttcaacatatttgtgtatttgtttattaaaaataaaataaacccattacatgtctatataagtgatacctcattatgaaaaataattatttttcataaaatatttctgaatagcattaacatttttgcaaatctcttcaagacagctagaacatcatatgtttctacattccatctgttgggatatgttattttagtttaagattgtgaagaacatccactttcatacagatatacagcagacaatagagtactttaatactattttcagataattatggatattttttctgtgatgctatattaaaactcaatgagtggtagcaccttaaagatttgttgtgatgtggaatctgaaattgtatcatgcatgtttattatgctgttacattaaaattcgttggtcttggccgggtgtggtggcttaggcctgtaattccaacaatttgggaggctgatggggatggatcaattgaggtcaggagttcgagaccagcctggacaacatggtaaaatccccatctctactacaaatacaaaaaacttagctgggaatcgcttgaacccggaagatggaagttgcagtgagccaagattgtgccactgcactccagcctggatgacagagtgagactctgtctcaaaaaacagaagcaaaaacaaaccaaaaaatcagctcctacttgaatgaaatagattcataccttcccattatagaaaaatctaaaataagtatttttctataagccagtgacatgacttgattacaaaccgtaagtaacctcaatagacaactgagtctgcactcgaatgattgctagatggctgcaaactaccttttggaaaggttttagtagatgtcccatgatttgtttatatgtctataattccctcttctccagtatagcacctcgttcagttatgtggttgtatcttttgctagtatcttttgtcggatggtatattagcttgctagggctgccataacaaaataccacagactgagtggctcatactagaaatttattttttcctagttctggcagctggaaatccaatcttgatatcttctaatcttccaatactggtatcttctaatgtctctctccttggcttgtagatggccaccttcttgctttattctcacgtggtctatcctatgcacacacacatccttggtgtctctttgcatgtctaaatttcctcttttcataaggatgtcagtcagattgaatgaggccctatcctatggcctcattttaacttaatcatccctttaaagatcttatttctaaatatagtcacactatgaggttctaggggttaggacttccatatataaatctggcagggggtaagggaggggggaaggagagacacagtttaacccataagaggtgacaacccaggaaggtatatttcccaatactgccatttcagaggtaccatatggcagacgggagttttataccttttcagattcttttccttttcagtgtttttcaagataaaattggggctatgctttaagatgaagctgaaatattatgattttttatttgtgtatttttaagagataagccagactttctgaacagggtttgtcccttctggaaatgctccattggatctctcctttgtgggaatattctattcagtccctaaatttatgacactctatttttcacaaattatcctcagtcatccttggctttgtccttattaactattctgctgctcacttagctatcaatacagacagctgtggcctggggaatcagtagggaatataatcacaagcccataatgcctttcaagattcatagagatccattgaggcccgcctgtgggcaacacagttcatccattcctccagataacaggccctgagactagatgcagaactttttccaaagaagaggattcatagtttacatctcattcccattagttccatgacctcaagaaggtgatttgccttaaagaagcacaagcttgcttccagattggggccatgcacagttgctctgcatgcaggcagtcaccatcagctgtttttaagtggtgtttgaaacagccctgtgaataatccggtatttaatgatgttgtcccgtcctctaggttccagtggaggactttctcttttctcagtgcattctcctgatacttgttttactctgcaagaaacaaaatcttatatgaaaacatgttgctaatctttaaatagttaaaactttctgactaaatttacttgtaaatgcacaggatttcacgacactcattttatatacttaaaaacaaagcttattaacaccttacttttttcctgccatttctgtccatcatttttaaaatttcaacttcttttatattgctatatcatgtgcctctttatgaggtgctttcaatcataatttctggttagaagcttctgatattttctcagtttctgtggatgtgtttgtggttgttttgtgtgcatgtgtgaggggagagttaaattacctctttcttttgagtgagatggagctcttataataacttgtatcccaatttttccttctcaggaagcaaatttagtagggaccactggagactacccatctgccttatgactctgaggagataaagcattcttcagccattcctgttggagccaggtgaagcattctagctccaacacctcaaccatctctaggaacagcagcaactgctatctcgcctctcctcctttaaggaaaacaacccttaagggaagcaactgagagctgggtaagaagaaagcaatcacgtgctaaaatcttccggagaacaaaagttagtgaaactatcttagacccctaattcagaactcttgcaggaagagtaaatacttatggaaagctgagaaagcagtgtctagggcctccagtccacccctagagggacgtgtgggggtggctaggggaacgttttgaggaaagttcattggtcaacttgttcaacgtggcaaactcatttcaggcaagagaggcagcaccgtggacagcgccaaccctcctgctcccgggcggggcgaggtggcagcaccgcggacagcaccacatgtggtggcgcacactgggagccgccaggcgcggggagcgcagcagcaccgcggacagccccaaagccgcgcgctctgagccaggaggcggggagagatggccttatcagctgatggcttacgtagggctagatctccacttggataaggcaggtctcggtgggcgcgccagcattcgctctccggagctgcagcctccgaaggggtggcgggggcaacagggacagaaggcaggtcccagaaagcaggttcccccaaaactggcttccctagcacggagttaaggctgcagccggctgcctagagagaagggtgggcagggagacaacgcggtgagagcgactgctctgacgcaccagcccctctcctgcacccacacgctgctggccgcccagcttctccccgatctgggagatgctcggctctgggcggccaaacagcctttccaccaaggcgaggagccctgggctcctgacagcttaggcgggccctggctgcgacacgcagcccctcgcctctgcttccttagcctctgagggcttcagacctgccgcgcttgcagccacaccatctccaacggatgctcactagcaggaaattggggccaaattcacaggcactttccagaaactcccccactggccagaggttgcaaacatccggattggctctgggcacagtggccgccttaagtcctcctgaacaccccttctgcaagtaccccagggcggtctcctgacccagagatggatttacctgtgaacctaacctccttttccctctccaccccctcccctttggagaccaaccacagcctcggcaaagacgacctgcgccccagctcgcccctgctctcggtcttcggagtgcttattctcaccttgctgggctttctggtggcggcgacgttcgcctggaacctgctggtgctggcgaccatcctccgtgtacgcaccttccaccgcgtgccccacaacctggtggcatccatggccgtctcggatgtcctggtggccgcgctggtcatgccgctgagcctggtgcacgagctgtccgggcgccgctggcagctaggtcggaggctgtgccagctttggatcgcgtgcgacgtgctttgctgcacggccagcatctggaacgtgacggccatagccctggaccgctactggtccatcacgcgccacatggaatacacgctccgcacccgcaagtgcgtctccaacgtcatgatcgcgctcacctgggcactctccgctgtcatctctctggccccgctgctttttggctggggagagacgtactctgagggcagcgaggagtgccaggtaagccgcgagccttccta

SEQ ID NO: 11406 - DNA, 6000 bp, Homo sapiens
gctcatgcctgtaatcccaacactttgggaggccaaggcaggtggataacctgaggtcaggagttcgagaccagcctgaccaatatggtgaaaccctgtctctactaaaaataaaaaaattagccaggcatggtggcatgtgcccgtagtcccagctacacaagaggctgagacaggagaattgcttgaacccaggaggcggaggttgcagtgagccgagattgtaccactgcactccagcccgggtgacagagtgactccgtctcaaaaactaaaataaaataaaatatagtctccattagtacaactgttcacacacacaaatctatgttattgtagaaatattctcagattttatttacgatgaggatttggtaatgcatagcatatgtaccatgttatctttccaaaatctgaaagtttctgaattccaaaatatatctggtgctaagggtttaaaggttaggagttacaatacaaatgaagaagtaaaaaacttgaaacgcgccagccaagagttgattttaaataagaagacagggaaacagttgttcttgtgtgtgagagagggtactataaagggtattcatgtcacagttgttgatggcagcaaaacactggaaatgcccccaggtggctatcgaaagggtcacataagtgattgtacatttattcagtggaatgcagcatagctatttttttttaagtaccacaactcttatactgtatacaaaaaataactcaaaatggcttaaagacttaaacataatcacgaaaactaaaactcctagaagaaaacatagagggaaagcttcaagatactggatttagcagtgatttcttgggtatgataccaaaagcctaggcaacaaaagaaaacatagaccaatgggagcacatcaaatgtaaacatttttgtgggtacagggacacaatcaacagagtgagaaggcagcctataaaacgggaaaaatatttgcaaatcatatatgtgaaaagagttaacattcagaatgtatgaagactcctacaactcaacaagaagcaaagttaaataacccaattaaaaaatgggcaaagggcttgaatggacagttctccagtgaggataagcaagtggccatctagcctatgcaaagtatctcagtatccctgatggtcagagaaatgcaaatcaaaatcacaatgagatactaccacacatccattagaatggctactatcagaagaaaaacaaaataacaagtgttggtgaggaatggagaaactggaacccttgtgcactgttggtgggaatgtaaaatggcacagccatatagtaggaagagacccagatgcaatccaatagtgcctcctcggggtatttatccagaagaatggaaagcagggtctcagagatatttgcacacccatgtttatagcaactttattcacaatgcctaagaggtggaagctggccaggtgcggtggctcacacctgtaatcccagcactttgggagaccgaggtgggtggattgcttgaggtcaggagttcaggaccagcctggccaacatggtgaaaccctgtctctatttaaaatacaaaaattagctgggcatggtggtgggtgcctgtaatcctagctactcaggaggctgaggcaggaaaatcgcttgaacctgggaagcggaggttgcagtgagccaagatggcaccactgcactccagcctggcgacagagcaagactccgtctcaaaaaaaaaaaaaaaaaggcggaagcaacccaaatgttcatcaatggatgaacaggtaaacagcatgtagtacatacacacaatggaattttagccagccttaaaaaggaaagactgcagctaacatactagctacaacagagatgaaccttgaggatattatgctaagtgaaataagccagtcgcagaagtatgattctgcttatgtgataacctgaagtagtcaaatgcatagaaacaaaaagtagaatgctggttaccaggggctgggcagatggggggaaatgggagttgtttaattagtgcaaagtttcacatttgcaagatgaaaaagttttggagatcggtttcacaacaacgttaatatgcttaacaccactgaactgtgcattttaaaatgattaagatggtaaattttatgtcaatatgttttttactacactttttaaaaaagtggatgtggagccgggcgcagtggctcgcgcctgtaatcccagcactttggaaacttggggggaggggaggggggccctggatcacgaggtcaggagttcgagaccagcctggccaacatggtgaaatccccatctctactaaaaaacaaaaattagctgggtgtattggcacacgcctatagtcccagctactcaggaggctaagacaggagaatcgcttgaacccaggaggcggaggttgtggtgagccaagatcatgccatcgcactccagcctgggtgacagagtgagactctgtctcaaaagcaaaaaataaaaagaagaaaaaaaaaaacaaacacaggatacagaactccctacctcgtcttgctggttttctttacctttaattgaatgttggagtcacaggattaggaagtgaagctctcaagttcacaaagcacctgctcttccctgcgcgctcattcatttaacaaagtcttcctgttgtaggctgggcgcggtggctcaggcctgtaatcccagcattttaggaggccgaggcgggcggatcacgaggtcaggagatctagaccatcctggctaacaccatctctactaaatgaaaccccatctctactaaaaatacaaaaaaattaggcgggcgcagtggcgggtgcctgtggtcccagctactcgggaggctgaggcaggagaatggcgtgaacccgggaggcggagcttgcagtgagccgagattgcgccaccacactccagcctgggcgacagagcgagactccgtctcaaaaaaaaaaaaaaagtcagcctgtgattctttttttcccttagattttaatccaagtgattatgaatgtcaaggattaaaatttgggggggttatttgggattccctggattcagatttctgagattatgcttcctttcctttaaggaaaggttttcattttcattataatacaaaaagcaaactgcttattacttttccaccgtacaaaatgcagttgacctacctcaacgctttgtgcattcacctgaacagaagcattttggataactaacgcgtgcttaagcctctgaggacctcattcactaagaggacgaggcggcgcaagtccagctgtggtcagtctcagtgttcccttcagggtccgccggctcacgctgggagaatgagagggacttcagatgctgcttcagttcccagctgtggctgaagctactgggttcacccagctcacctacagtttacagagaaataaagcaaaactcagatgcattcagacagaaccccacctcgagggcagcctcagctctgatgagaccagctgacaggccctggctccctaagccatggcagaggagatcattcattcacatgtcagagacaaagcccaggagtctggattgtgaagtaaacgctgagcccgaccacaaccactgtgaatactgggcaactggggcgtctcagaggattcaggtaattgaacaaatagacttcatacggaatctcaactctcctctggtcagcaatatcagatgtacttctgtgtgaataataaaccagactgcctggatgcgggagcacacgcctggaatcctggcactttgggaggctgagatgggaggatcactccagcctaggagtttgagacctgcctgggcaacatagtgagatcccatctttattaaaaaaaaaaaaaaaaaagaaattagctggggataggtggcacgtgcccgtggtcccagctactcaggaggctgaggcaggaggatcacttgagcccacttcagtttgaggctgcagtgagccatgattgcaccacggccccctaacctgggcaacagagtgagaccctgtctcaaaaccaaaatgataaaaaatactcaaccaatcagaggacaccagcacagcagccttaggaagacttctagaaagtataggcaagcctcactttaggtgcgtaccctgttctcatgcccctgtagtgttgctataggaaagaagggtgcataattggattcactttaaccaagactctaaagcaacagctcagctgagctccttctctctccgtctccctcgctctctgccagccatggaggccactgagtggggatctcagtgcagaggtcccggcctcgcctgcccagggagctttcttgttccaggcgacaggaaaagcagagcctgtgggggaggcattttgtgcagggaaggcacatttagaagaagctttggtttcctggacaagcccaggctttctcattcttaccagggatcttccttagatgcttgtccttgggaagtgtaaatgtgttcactgcagctctttctgcatattttagaccttaaaataattgttttttgtttcgagctagccttagattacaggaccattgagaattgagacactgcttgggacatggactggagcttcatcctcagccatagagcagcactgctgccggggttgagggagctcggggagcttttccagacaaaacctttgctccaggcgtttggcagggccataggaagagctcctttgtgggctccctgagctggaactcggccttctccgcccgatgaagcaaacaaactgtgccgagggcgcaccggcatttgtgccgtcagcaagccgggctgtgtctcagcctcacagcactcctcccacgggcctgggaaggcaaatgtgttttctgaactgtgttgagaccgtgtgtgtgtgtgtgtgtgtgtgtgtgtgtgtgtgtgtgttggggtgtcttgtgaagtcctgctaacctcttgtcagcagaatattcgagaaatgcttctgagaagagagaggaagatgacttcagaggctgcttgtggtctctcactcaaggctggtagggagccccggtctgcgtcctggaggaacggcacgctgagtcctgggccagtggccggcggggctgttggcgaccacagtagcacacaagggctctttctgaggagcaggagaccctggcacgggccccacgggagtgtctggggcgtccccgcctgtggcctcttctccccgccgcagcaccaatggctccacgagcagggctcggagctggccctctcctgcttcggagccgcgctgactgggtgtgtggcggatgggaggccgccctgagtgctcctcctcccttttgtacagcctgggtggaaaggacgggcctggtgcacttcctgcgggagggaggacatggggcctgcttccctctggcgctcctccacccgggcagcgtggtttctttccaaatgatttatcctctcatcgtcctgccgctctgtgcttcatggcattggggtcttatccggaaggggattgtccttttttgggtttgtaaatgtaattttcaggaaatgtcattggatctaactccagaatagaaggcgtggtggaactgcttttgtagtccacagttaggctactcacacctcaggccccgcacacgggtgggttcagaggctggactttggagttaagtagcgtttttgcccttggccaagttaacgtctaagctttggtttcctcagtgaggaaagtgggaaccgccataccgtgtctggattcggtgggatcgtgtgtgtccagcagcagtcgcgcagcgcctggcgtgagtggtgggtgcacgccggccccgccatgtgcaccttctgtgacgaccctaagtcagggtggtgtttcctagcagtgcagaacacgaagcccttacaacttctcctagaaacgaagcctgggttgacccctccacctcagggtgagagcttttggtattttgagtcagta

SEQ ID NO: 11407 - DNA, 6000 bp, Homo sapiens
agttccctgttaatgatattttaacattgtcagtatctgaaattaacaatttacttcttattttgtttgttacctatctccctcttcccactagaatataagctttgaggccgcaatttttcattatttgttgaatgaattaatgaatgaatgtctgcgtacatttgcttctgcagtattttttctggctcctgggtttccctttagaattttatttaaaatataagaaatggatatttctgaacttcatcagagatggagcaattagtttccactgctgctttatggtgtaagtccctgccatctcctcctactctgagttatttacacattaagttaacagttaaccaaagtgaagtttatgtaagtacaatctggaaagacacttcctagttcaagtggaatttgttttttccatgccaaaagacacgttctctagagaaacacagccgtgtcacacccttggaaagatgaggagagaagagagacttacaagtaccccagctcctgtttctgaaagacaggtggaaaatcgaagcaggacacttccttcaagagagcatgatttatcaggtcaaagttcgaattgttttcaaaggaaaacatttatttttcactaaggcaaattattatttgccctgtcatggtgaggcctgtaaatctaggaagagtaattatataaagaataattaccagctgttgtctatttggaaggagactacaagaggaagaaacaaatgttcttgaatagactgtgggcttcttgagggtaggagctgcatattgtgctttttgggtcccccataagcggctagccaagggtgttgtgaaattatgtggtgttaaatatgtactaaattaccaacacataagcataacggattgagctggatttcaatgtaaggaaaactttgctgatagggagctattcaagttaaccattggattcctgagagagtccagaaattttttctctaaattcctgttaaaaaaagaataaactctatttaaccttacaacaatttttttccaagaagaactaaatgacttttttcagtctctacaaagtgtgacctccctcacattaaccatatttaacaggaataggtattaatagagctagtctttaataatgggcaatcttccctccattcactgaaattcaaaactttagtgatttttaaggaaaagtcactgaattctcgaaccataagtgtccagaaagtggtatgtatggttcaaactctggcaaaccttgcttggaaagacagagttgagaggtcagataatcctttgctagtggcagaacttcacaccctcagcaatgtagatggagggtttcataattgaagtggagtttgcattgaaaagtctgtagacaagatccacagaatacttctccctaaattagtaactgtccaaaggggaaattttctaaagaggaagagggacagagagaaaggggcaaagtatcataaagacaggggattttaaaataaataatcaataaaagtaccaggaatgtgtgactaccacattttaagatgcttattttatgaatgcccctttgatgaactaatttcatttgaaagcttatttgcaaatataaggtattccacttgaagaatagcttattctaacccagtgtctttaggtatttttgtgatctacagaaagaaatacattttactttgcaatttcatacacagagatagagagagagagagaaataagacaagtttcaagaaaccactcttgtgctttcaaatggcgatgaactctgatattttctatcctattccacttcattttttaaatgttacttatgcccactaacttgatttcaagatccagtaatgggtctcataacattttcaaaacaatgccaattccccttatcagaccatccccatgttaacatccaccctccaaaaacttaccacactgtgtccatgtaggaaatactgtgataatattaagaaagcagtagacttaaatttctgtaaaatccaagtgtttccaacaggtacataacccctttggtgttcaataaatatctgttactgacaaagtcaatttaatcttcttaggggacaagagagcttcatccctgatcttgcttctgctgtgtcaccttccctgaaatattctgcctacagagaactctcattgtttcccccaatattgtatctaacacagttcacactttaatcagctgaggttgcttatgcttagaccacaaacagtttaaagttttatgatacacccatgccatttttctcaataacttttagactttgtttacattatggttaagggctgcatcccacatatattcattagatttatagaatcaagcccatcctgctctcagaatactggttatcaatatcaggtaggctgccctaggatttaacctccagcggaaaaatctccttgtacttgttctatcacacaatgccgagggcggcaacactttctactcagcaatagtctccctgaatcattgttatttcagtgacttgggctacaacctgagaaattctcaatgtttggccccagcagttgaccataggagactctcaaacaactttaatatttctctgctgtttgcaccaaaagaaggtaattaatattccaaaagagaattcttaaaggaggtcatggtcaagtgttggctggtcaggagcagttggaaagcagggagctattgaactcaagacagattgagcccaacccagcacggagtgaagattcctatctaagttctgaattcggaagggtttcttatacaggctttgtttaagttactgtgtctgtgtgtgtgtgtgtgtgtgtgtgtgtgtgtgtgtgtgtgtgtgtgtgtgtgtgtgtgtgtatgttcctttcaaagcctccttgtctcccagttgcccagcctcctttcctagtcacatttcttactgctaacaacatcattctcacttatcctgggaatgaagggactgtacaatcttcctctgcagtgaggcagtgccttagggtttgaatgcacagtgagtcacacacagccctctgggtcaccagactggaggtgacagggaaggggggagtatatagaggagggagcctggaaaaacaaaatccctggaatgttgggtgggagagctgatctgatccttgagtctgtcctccactggatctcctgaaagcctcaaccacacaaattaggggtccctgttgtctctctggggtggggtatgaggattcaaaataaaacaggagcatgcaaaataaaacggggacattttttgcctacagtcactgatgtttccatggaagagctccaaggatggttgggtgagggctgcagttccattcacaggacacctccttctctgtcacccggtgttgtcccgtgtgcttatgagaacctaagatcaccagggaaagtgtgctgtcgccgtctggctttcttcccctcccattaaatgattgctattatttcttttgccaaggagacagtgtttagtaacctcgacggtgcacggccaccttgtggtcccgggacgcaccggatgctgttttcttagtccaacaccgcctaaacagagttagggaaaaaagtgttggctcctgccttgatccacccagttgtgggctaaaagaggttgagggtgactcgtccttggaatcaacttgcctgcctcccagggcgtgcctgccagcctccgctgcgccccgcctggtattggattgtcccggactcctgctgacatcgagggctttagggggaaagaagaggagtcgcagtgtccggcaccaagtcaggcaccccatatccccgtcttccctcgccatcctctctgttttcattcaccctaaaacactgtgcccaccagcagtcccctacacggagggcactctttctccaaatccaagttatgcctccagcctacagccgcccaactccggacgctttcccagggcttgcctgacccccaaggtgtctcttctcatctccttcctctcagcacttttttccttttagcaccccagctcttagccagccgtcttcccacgtcctcaccccactttcactacctagcccactaccgaccctccctccacaggctccctagtgctgtccccggagtggcggctgaagaagccagggtcacaatgtctctgggataaggttcttgtggaaactcacctccctccggaatttgcattctccggggaggggacagggctcccagaaagctgtctcccagtccagactgtcgcccccctctccctccctactcaaggtctaactcgggtccctcgcctgcttcctgtgtttacgcggcgctttagtctcccggactcgcagggtgagccccagccctgactggagcgagacagcagccgcgagcgcagccccactcgcgggccggggcgactggggctggcgcgaggcgcacggagctcaccagctcgcccctccctctcctgggacaggagggggctgactggggtggcggggtccgggaaggggggctggctctcatcaattctgctgccacctcctctgccgcctgtcgggaggcgggcgggggtggggcgggagcgcaggctaggattgagactcttaagtcaggagaagtttgcgcacagcttcacagctgggagagcgcaggaaggcgccgggaaggtgagcctcctggactctggggaggtagaaagcaagccaggggaaagaacagttgtcttttagctgataatacaacctagacttgggtctgaaccacctaagacagatttaaagtgtcagaaaaccaggagaggggcggagagggaggactgagactaacgcagtttgctctcgcatcaaactaggaaagccagcccaccagcgtctgggtgggctgcgccgcgcggctggcggaccttcccgggttggagaagtgcgcacgtccgcacctcaccctgcggctgacatctcctgcccaggagatgggcgctgaagcttgagcgcctgagtccctggagccacacctgcgaacaccctttgcttctattgagctgtgcccagccgcccagtgacagaattccaggtaaggagcgtttggaaatgagcgggacttaacgatttggggtgtccaagggatgtttaacagtgcaggtgctataggcaccttgctttttgattatagaaatgtggtttgattgcggtgcttgtggttctcatgtagggtcagctaggtcttagatgctttactttacccttgtcaaagaaaaaagaaaaataggtgtcctgggaagagccaacaacttatggtttcgtattgaagaatcgtttgatttcttgtgacttttactatgttgttcatatcaattttccctcaaaagttttattctccaacttattgggtaggaaaattacggaggttaaagttgtgaattttcccaaagggtgtttattaactgacaaacatataatatcagcatctataagatgtgtcatggttgttctggatattggaaatgagcacagtagtgaatggagttgcttgttaagtcatgttttacagagaatagttttccaacaatcatttatgcatagcagccattcttcacacctattaggaaaaatatgttgtgtgcatagtttccaaaagagtactctttttcatgatgctcttcccaagcctgggtgaaagacatcaagaaaagctgtaacaaattaattccttttctcaaaacattcattttccttgaggtccaagtcaaaaatcaacaatacaattgagattagtaaactatcatacagactttatttggcaaatctacctaagaaaagtttcatatgaaagctttaacctaatactatgtgacatatgcaagaagagaacgcagggtttcacttgccgatcttaaggagaccctgactatttccaggctgtggttaaccggaatcaagttatctatgtaaggctatttgttgaaattattcggtgattgaaggtgaaatgt

SEQ ID NO: 11408 - DNA, 6000 bp, Homo sapiens
tgattagtacaagttttatgaggtttgcctaaacaggtgttgcagaggctaactgtgacctgcccttattgtcttgtccttgacccctgattacatatcacctgcctactaactgccagcccctgcattttttttccagaggtctttacatgatctctggaggctgctttgccatccatgtgataggctagaattgccagagaataaacatcatctggtagcagttcttaactaacatcttataagtgttggtgtatagataccccagctccctcatccctcagttggacccactctctgctgtgtgttttacactgacttccagagttccccactgggattaggtaccaggtgcctacagtgatacctagcttgataatgcaccctttattggctcacttccccacctgagtactgggattcccttcacctcttaaactacctgctcttgaatccttgtttcaggttgtgcttctaggggaacccaaatgaagccagtagagatgcccatataccatatgtcagaaattcttaaagaatctttcccatgactcctgtatgcaggtatgagttgactgtggaagtgcagaacacactcattcatgacattggtgtcatgaatctcattggctctatctgactgtcagtctaacatgtctgatcttgcttctagcagccagtgtctaataaactgagcaaaacccacatggtacactcactgccatgtgcagatggtctagcaagaaaaatattgtcttcgtttccaaaagaaacaaatcccattcccactttcccctgtcagctttgctccatgtgggagcatcatgctgtcgatatttctcttgggtgagtagcctgcaaaggttctcagccttaatgattactccaaagcaggaattgtggcataaatctccatgtgtggaatatgtatcacagcttgagttaaatggaccccaaacatatggcattgttttttgcattttctaacacatgggcagtttctcacattttaaatcaactgaaaatgagaagattataggcaaatcttcctggaggattaactactaggaaatatacttggtttgaataaacatttggggtgggatggaggatgaggtcagacactttccaaagacacagtgtgtattgcagagggtgggatcccaaggggaggcaaggtggatgactctagaataagctgcatgtctggacggcctggtcttcagacactctcccctgactcagattgcagcaatgagcaagcagcatcatggtgtttggccctgacgaatagaggttgtacagccaataactttttcctgtgaatgttactgataaggaccagtccctcctggagacaatctttcttcctgtgtcccagtgttgctatcagtctgggcgaattataacctgtacatgggcaaattataacctgtacagaaggctgtgtcacttgctcaggggctactagataaagccattggaaacactgaagaatatatagaagggctctatttcttattgaccagattccatgtaggatttgagtgatggttctattttgagtatcaagagttaaagatgatgcaaaacgaagcatcggacttgcactttccttaggagagatcaagtctagttttctcgcagaaggctgcaccaaaaagggcagcgatgtgcctgtaagacatcagttctctgcaggtaatgatcaatagggaaaggagaaaggcagctcattaggcatttcttccccaagaggctcactcggcctccttaggcttccaaagccacagccagccttattgcccttattattaaaatgggcccactagagcaccaggctgctgccctcttggctcatgccaggcaacgacccaactggccctgcagctggcctctagcctaccctgaagacgatgtgtggtcagcagttgtcgatgcccaacgtatttgcgggcctcctctgcctttcccctccgtcgtgtctcttttcccctcaaatttatcaatgcacacgtagtaaatggtctaaaacggacttattcatacctctacgttatctgtgatatcattgctcagaccgggatcatgggtctggagtttggggtggagtgggcttcctgctatagaaatcaggccactgcacttactttacacttctgggggaggagggatctcttccagtccctaagaaaagaaaatctttaaagcgtcttacacgcaggcgtgcaaccaggaagtccacccagccccatctccgcataaattaggagctcttccctcttcccaccttccttgtcccaagtggcaccggacactgatcaccctcttcagagctgcactagacattcacagggaattgaggttccctatgcagaaaggttttcagacagaggacccagcccattttctctctccaaatcctcctccctccctcttttgtggttgcagctataaaataatgattcaacaatcaaagagcctctcatgagatgggagaaggaagggaacgaaaggggaagaggtgccctgggctgaaaacctgtagattttttctaagtgacaaagggcaagggtccttttttgaaattaggagagagacagctgtttcctcaatcgaaacttcgcacattacaaccagccttgggaaaagccaacaccaccagggaggaagtgctatggggttttgaagccagacactgatttctggctgtaatactttccagccgtgtctctaagcctcggcttctgcctccatctgtagagtgggcttaataattttgaccatctcacagagttgatgtgaaaattaaaataacccgaacagaacaggcgatatatacaggaattaatgaaagattcctgacataatgcttataagttcatgatgcttaggaagataaaattcattgtagagatgccgaacgggggtctagagcttgccttttcggggtctctcccgtccttctccatcctccttatctcctgggctgccccctctccccccgcgccccgctctccctggctcgcccgggcctagggcgccgcctgcagttgcgcgcggccgcctctagatggaactttctcaccaacgcaaggcccggccggagcagctacccgggagctgggcggcgaggggctactttctctcattccggcgggtgcaggatcggggggcctgggcagtaactagtggggaggagcgctggactgtgcacgtcgagcccggcaggtttccgcatgcggcatgcgaagggaatcccgaggtttccctgcagaacccgagcacggctcccccggagtttcctgccccgcgtctgcggctccttgaatcatctcaataaaatgaccgtcccggtagccacccatgccccttcctgcgcagtgcccgcagcggaccgcgctgtgtggtacctcgagccctggggactctgttgcacgcgtccctcagaccctcgggggcggggagtggggagacaatcgccagagccgcggggcgggacaaatggcggaaccgccgcgcggcgccaggcaaactttgcaagggaaccgcgcggcttgccggctctactttaagcattcccgaaaagaaagcatgtggcgggacacttgtcatctaccatgtgttattctcggtgacgctttctggagctgtgttcaccggggacccgggctcgcgggtgctgcccgctgtgctcgggcgggcgtcgcgcctccccgcgccggtcccgggctcgccaggcagccggagccgctgggctcctccacaaccatattccttcttctaccgctcccgcttcttcccaccctctcactctgtagttgggtcctcccctttttcttgggggcggggaaggggggatgatttttaaaaatcagaactattgacatttctggtctcctcgtcgcttcaggctgaagagcggagggggatccgcgggccgagggtccccctccctgcccgcgccagggccgctgggtgacaccgaaatccagaggctcccgcccctcgggggttcctcctcccgcttcccgaggtgactggttggcgcgaagcgattggcgatcccgggcgcgatcctggccgcggctccccgcgccgcgccgggtgaatggccgcgggcggaggatcgggaggcgccgggcgcagaccaatcgcggccgccggtgggagtatttgttattcacatggaagagacttggcgcctgctaggccagctcagccccctcagcccagagatcagccacaagtgcggccgctgtgctcgcctcacgcggcggcggcggcggcggcggcggcgctgacatggagctgcgggcccccggcgggcttcctcaccgcgccctctgcggggagcagggtaagactcgccgcccggcagcagaaagcggctccgaggaaagcaagtgccgaaccacgggacaaaaagcccctggcccccaaacttccccaaaacgccctgcttgttggaaaaggagaatccccccgttttattcccctttccgttttcttctctaaaacctttcagcggacagccaggtgcaccattccttctcatatcactctagtgatttgtttttcctgagcacaagtagatggccctgcatgtccgtagtctgtgagagaaatagcgggcggaggtgacgggaatggggggagaaggagagtgggcaccagggggcgaggggctggccgggcattggagcttgattgggtgtctgttgattttacgttgcaaagaacaaggcagccacccctcttgtctgcccatgattacattacagtaaagaggttcagaaaagagggagactttacccggaactcccaaggcttggagatgtgatcccccaaaagtttagtcggcgaatgggagactgaagggtgacgggaagggggcaggcgcgctcggcgctctgactgggcgtgcggcggcaggattttaaagcgctctgcctcggatcgtctgccctgggtgacctcccggacctgccctggtggaatccggacttgccccgccgagatgacgaggtaccttcgtttcgcgaacctaacaggagggatttctgaagttagcggcttccgggatgagtcggggtaacccccgccctctgagcgtgggctggatggatgtctaaccaggatctagggaggatgggggtcgcgggggaagccgggcgcttcggggtcctcgacacccacatccccgcacggcgcacgctctgcctcgagtttgcgttctccgagttagcacggcgagcttgggatttccgtgcccctcttttgtggctttcgagaaacgccggagttccgtgtcctgctgggggttggggggatggagaaaaggtctcggggatcttgtttaaaaagcaaaggcaaacgcaccccaacagctcctcggtagctcccgcggctggcgcggccccagtttcgggcggccccgcgcggggcgtgggcgcgggcgctcgggcggccaggtgcggcgggggcggaggctgcatccccagcgcgccggaatgccccggggcgcgggaaaggcaaaagcagcctggcgctctccccacggccccagtctctatctacccagaacccggcttcaacagcccaaggaactgagaagaaaaaggaacctgcgctgggaaacaggggctcctggcgggctgagtggtcgctgttatggtagagatagaaacggagaggtagagatggaccgctcagccatgccaagcgcgaagcccatccgcccagccagaaagctcggatatcccttgagcttcgtacagttggtgaaaaaataacagaatcaccaaaaaagaaaaaaaaattcccttcgtctgacacgcgctcccttggtgcaaatgaaatgcggagggacacgcgagtcacccagttgcgcaaaaccgcacccccgcggttccctggggaattacttcccccgtggcccaaactgtgaagcctggtgtcagagagtgtctgcgcacccaagatagcgggggtgaaaa

SEQ ID NO: 11409 - DNA, 6000 bp, Homo sapiens
gtcaagctggtggtctctcagtgcaagggtggggctggcctggaggagaggcccacagggtccctgctggctgagggtgcagtggcgggccccggaagctgaatatcacccccgccaccgggcaggcagtgctcagagtgaaacgggtgactggagggcatgtgccagctctgttcctcaagcctggcccaagagggacctgcagcatggggttggggggcaggcggcccttctctgtggtctctcctgccttctgagggagcctccagaatctttcatcgccgccacaacaaactcaggctttcgtgtaggaaaagagcccacttctgaagaggctcatctgggctttctctcccagcctctaagtctcccatcacctggctccccgttcctctttcccttgaaggaagtcagcagagtgcatggctgacgggaaagaaggcacagcgggcctgcccagtggggggagaagccaggccattgttctccagttccaggatgccctgcttccccagacagcccggcagccaggaaaaggaagtctctgggcacagaggcaagcgggagaccacggacaggcaaggagtcgaaggctccacccgcctgggccaggccaggctcccacagaacccctctgcgtccaggcaggcacatggggcccaggccatccccctcactcggacgcaggtgtggcgacggcgggggaggggcgtccacagtagagcccagaaccttgcgcaggacaggaccccggctaatgtgcccggaacagctcagtgacagggagctgggttggctgtgagggtcgggcacgcgtcacgagtctcctgtgaccaggagaggtgggaacactggctcacatgactcgccaggccctggcacgctgtggttctgtgggtgccccctgcagctcccagccttcaaaatgtacacctcgctgggcatggtggctcacgtctgtaatcccagcactttgggaggccgaggtgggcggatcacctgaggtcgggagttcgagatcagcctggccaacatggagaaaccttgtctctactgaaaatacaaaattagctgggtgtggtggcagtcgcctgtaatcccagctattcgggaggctgaggcaggagaatcgcttgaacccgggaggcggaggttgcagtgagctgagatcgtgccactgcactccagcctgggcaacagagcgagactccatctcaaaaaaacaaaaacaaaaccaaaaaaccatacacttcatgctcacttctctgggagccatggctaacagcctgcaggcaggagactctcaaaccagctcctggagggcactcccagggaccctgttcctaccacgagccagagaggaggcgggtcaaggagacttgtccacccaggcgtggccgaggaaggggtttcctcacgctctgctgacctgccttccttccatgcctctcagcccagctcctgacaaaggcgggaacctgagctcctcggctttaggaacgtcccccagagcccacggagcagcccgccccagctgccttccctcccaagatctccaggtaatgcctggtaaaaggagggctccagggagaatgttggggccaacacgcaaagcgcgtcaccttccaaccggcggagagtgaaggaaaacaggtacggctcggcttgtaaccttcactggaaacagaaaccatcctcatcattgatacctggtgaactgcacagagagcaacctgcagctttggaagtttataaatccttcagtatttgtcagctgccagtaaacaaaaatgcacacaggagaactttccacctgaaccccacctggaggccggcgttcccaggtcccggctggggtgacagcacgcactcgagagccggttcagggcgagtgggacgcacgtgagcgcagggaggaaatgccagcagatcccactccacgtgaccgcctcccaagaatcgagccattcttagccctgcagacgctggctgcctccctctgacttggcctcacggcggggcaggcattagcagtccaggcagcttctctctgactccctgcaaggaggggtgcggcgggcaagaggctggccccacgcggttccacctgcaggagagccctcgcaggaggctccgtgtgtggggccggctcagcttttctctggccatgcccatgtcccttctgtgcacggagacaccagatgcacgtgctcccctctctgcttccgacctgaacctgccctcggcctccgctgtgcctctgaggactcctgtgtcctgtgggctgagtgagcatggccaggccttcgctcgacagtagacccttctgttgatttcctcacggaaaaaagggttcgtaaccaacatctcaagcacactgaacaccaggggcggctgcatggacctggacacgtgtctgcctgacctgcccccaggctctcggtgggatgccccgcagcgatgcagacaggggcctgcgggcagaggccacggcctccatgagccaggctatcagaaaggtgggacaagaggccagctgtgctcagtttgcagtgcggtcccgtccaagcacggcccctcgtttctggaacccggctgtaaacagcaggagggaggggcggtggcgcctgccaagggaggcagaggccctgcggggaacttaccagaggaaaacaagtgcttgcatcctggggccctcacacgcacgcgcaggcggccaggcgcgctgctgataagagcctgcgggtttgcagagaagcgcagcagcgcgcaggtcctcaccagagctctggtggccacctctgtcccgccatgctgctcaccgacagtggccagggcccacagcaccaagaggcttgggccacaaagtaaaggtgagagcctgtggtgcccgcaggtgggagaggggacgtggggggctctgtgcagtacaggcaggagaggggacgtgggggactctgtgcagcacaggtgggagagaggacgcagggggttctgtacagtgccaccggtggacatctctaagtagggaatgaaggggtgccgagacagagcacactgaggggtcccggcccttggcaagctctgtggggtgaaggtggccggccgggtgtgccctcctgtcagtgactggaggcagcacacaaggcacacagtgagacagccctcccgctccgatcttctaatcacagaccctggacagatccgggggccctgggcgccccgtgaggccaggccaggctgctgactgacacccagtcacagtggcctgtgtttcctggggactcaagtggagtctggggggtgacgtccccaaactgggctgccactctgtgacagccaaagccacgcagcctcgcaggcagaagctggggtgtggaggaccacgatcctgaagaaccccgtcctctggaccctggcgcagcaggaggggagaagcccgcagaggcccggacgcccccctcaccggcccccgccactgtgcttggagcaggtgcatcctgtctggagcttgtgctggcccggcgagtggagcccagagcccatcccccactaccaacatcccccagattgctgcctgcctggccgaggaggtgctggtcaagatgtgttagtgaggagctagacaagatgagcacgtgagaagcaggggccagggagcctggacccaggacctgggggtgctgtggcagcgctgtggcggcactgtggctgggcacacccagcagcggcctagctctgcatgcctgtcaccacctgaccctcactgcggctgctgggcggcattcaccaggattgcacaatgacccacacctcccgtcctgcccaccagcctctggatgggaattcccacatctacccacccgcccatctgccagctgcctgcatgcctagccacagggccgtgtctcctgctgtggggcgcacactgctattggcactggggacctcgggccctggcccctccgtgctctccacctcccgagcctcctcttcccgccctgctgtggccctgtgtgtggtgtgggtcttgcagtggcaggactccagtggcgggtgaggacccactcccgcagccggcctcctcactgctcttgcctccgggcatgggaacgatgccgtctgctcgtctgcctgagacgctttctactccactccgagagtaggaggtcagccggggccaaatgacatggtggacatcaggcttcccgagatagctgtaggtccctgaggaatgcctgtgctttggcggggtgggggggtgggggtggcgaaattcttactctaggatggctccagccgccaggttctcattcagtgacgtcaagactggctatgtccccatgtccccagagcctcctgtgggctgcgacccacaggtcaccctccctggagcccaggctctgcaaggactccaaggcaccgggtcctgagctgccgggagggagggagggaggctcagggctgaccgtccacattgcctgtccctcccggcgctggcaagatgcgaacaccacagacatctagtaaacttcgggaatcactgtgcggggcccgtccaaccaactcaggacgaccacccaggcctcgcagcagcccgtgaagagtgggctctgagaatgtggggcacaccaggctccctctctggtccccaaccccagccgctgaaataagtgcagccacagcagcccccggtcacgacccgagacggccatttttcaacgctcaacttcactttcacagaaatgcaccaaaggcagcctcgctctgtggtctgcagcgattactgcaccaggagaaggcacccctgtacctgcagcacttctgggccagggctttgggacgggacgcgagctgaccacctgttccttctttccgcagggtcgcggagcctcgccggccgccatgtggagctgcagctggttcaacggcacagggctggtggaggagctgcctgcctgccaggacctgcagctggggctgtcactgttgtcgctgctgggcctggtggtgggcgtgccagtgggcctgtgctacaacgccctgctggtgctggccaacctacacagcaaggccagcatgaccatgccggacgtgtactttgtcaacatggcagtggcaggcctggtgctcagcgccctggcccctgtgcacctgctcggccccccgagctcccggtgggcgctgtggagtgtgggcggcgaagtccacgtggcactgcagatccccttcaatgtgtcctcactggtggccatgtactccaccgccctgctgagcctcgaccactacatcgagcgtgcactgccgcggacctacatggccagcgtgtacaacacgcggcacgtgtgcggcttcgtgtggggtggcgcgctgctgaccagcttctcctcgctgctcttctacatctgcagccatgtgtccacccgcgcgctagagtgcgccaagatgcagaacgcagaagctgccgacgccacgctggtgttcatcggctacgtggtgccagcactggccaccctctacgcgctggtgctactctcccgcgtccgcagggaggacacgcccctggaccgggacacgggccggctggagccctcggcacacaggctgctggtggccaccgtgtgcacgcagtttgggctctggacgccacactatctgatcctgctggggcacacggtcatcatctcgcgagggaagcccgtggacgcacactacctggggctactgcactttgtgaaggatttctccaaactcctggccttctccagcagctttgtgacaccacttctctaccgctacatgaaccagagcttccccagcaagctccaacggctgatgaaaaagctgccctgcggggaccggcactgctccccggaccacatgggggtgcagcaggtgctggcgtaggcggcccagccctcctggggagacgtgactctggtggacgcagagcacttagttaccctggacgctccccacatccttccagaaggagacgag

SEQ ID NO: 11410 - DNA, 6000 bp, Homo sapiens
atgcgcccagaatgctcccagcaaccactgagggggccctgctgggagacccgcaaaactgccaatgccttgtaggccagcagccgcacgcgccttcagtgctggagtcacgcccaggggctgacgggccagatggtctctgagtgcagcaaattccgtcttgtgagggaaagtgatagaagatgagagtgtgggccgggcgcggtggctcaagcctgtaatcccagcactttgggagggtgaggcgggtggatcacgaggtcaggagatcgagaccatcctggctaacacagtaaaaccccatctctactaaaaaaaaatacaaaaaattagccgggcctggtggcagacgcctgtagtcccagctactcgggaggctgaggcaggagaacggtgtgaacccgggaggtggagcttgcagtgagtggagttcgcaccactgcactccagcctgggcgacagagcaagactccatctcaaaaaaaaaacaaaaaaaacaaaaaaaaacacgagagtgtggaggcgcagacgacgggagcacctgagcttccgtgctcagcatgctgtggtcaactgtggtctgcacacacccaccgttaactgggccctccagctgcagacaccaaacagggacaggacggcggcaccgacgcgcccacgtccaccagtgccaggcgacacagcagaaaaccaggatgccctgcccctcaccgcactgtttccgggctcggcaggcacacaccctgaatgaaaggctccaacctggcgcggagccacggcctgcgtgcttctgaaggaacaagagagacgaagtcactgtgggccgcaccacgtcctgacagcagctaacctccccaggccggaatggaacagatggaagacatggcaagtctgtctgaggggaggtcacaggatgtccctaaagtcaggatatggcacggaatgcagaaattggagcagagttccaaccccgcctgccactggtgcggcaaaacccgcacaccccacacacagcttccttgggacctgggctctttctataaaggggctgctggtgcatgtctccttaatgctccaggcctgtgaggatcggatgcccgagggtgctcctgcatgtcacgcggaggcgggggacgccagcgatgccctcccgggggcgtgggaaggggctctcggcctcccttgactctccatcatcagagaatgtgtccgcctggcatgtgagacacggcgcacttctccgaacctcgggctgtcttccagcatgtgttagctctagaattccttctgcacacagcttgatgtctcccctgtaaggtggatccggcgcgtggtactgtgagcacctccaaccaactgctccctcccttgtgcctatgggggagaagcgaatgagccaggactgggctaatctcaggcagtgccgccccacccttgcccctggtggaccgctccccttgaaaaggagcagcagttggtgggaagggaagcctcactccgcccagcagagacaaggggtgtgtgggatctcacagaaccgtgtagacccacgcacccccactgtacagatgggcactgaggctcaggaaggttagagacgttgcccggtatcacacagcacgtggggtgaggaagtggaacccgggctggagccggcaacgctgaaaaccagggttgtttggacggcgacatgcaactccctgagggctctgctcctgcagaatcagggggacccatgctgctgcctaccatggagggcatgggagaggactggggatgggacagggagcaggaaggggttgctcagtcagtcagtgctggcagagggaggggcgctgggaaggcactgcaggccctgtgtctggggcctctcagcacaaggactgggctttgcacgcgaggactgaagggtcaaaggcgagggccaaggtttcctacgtggcattcactcgggagggctcctgaagctggagacacactgccttactttgtgcgtgtttttctctatgcattatccagtatttggctatgtgtgcatttagctcaataagcaatgatcagatgaaattccccttgaagttctttccttttattctatcctggggatgaacagaaaaatattttcacttcttaaaaattcataacgacatcagatccaacaaggaaatcagtgcctgaaaagatgactattgacccaggacgcctctggtgtacaggccgagaccatgtgctcagagtcagccggcccctcccagatctgctcctggccagctgtgaggccgcggtgacaccacctccctgcagtcagtttctgcaaccatgagacggggagaaggacagccctgcctcacaggctctgaaggagggtgacctaagatcaagcacgcagagcaccgcacagcgcccagcatgcatgtgtacaatgtcacattctacactgaaggaggctgagacaggaggatctcttgagcccaggagttcaagaccagccttggcaatacagtgagaccttatctctacaaaaaaattaaaaaaaaaaaaaaaattagcggctcgcatctgtagtcccagctactcaggggccggggtgggaggatggcttgagcctgggaggtggaggctgcagtgagctgagatcaggccactgcacactggcctgggcaacagagcaaaatcctgtctcaaaaaaaaaaaaagatttaaaaatcggcaaaaggtctctatgccttacaaatagtccacgagattcctgccatgccgtcacacatcaagtattaagtaggtcttggagacggaagttcctgcagtccgggccctgtctcttacatcagtagctgtacagtacaagttacttacccgcccagtgcccacaggagaaggctgcgctccaagacccagatgccccgatccgctgactctatgctgcaagcaggaaatctaggagtatcggccactcgcccgcccagggcaggctccccaggaaacccagggcacgtgagtggagagcttgggagctgagctcttcctcagccgctgggatgggcagagagaccagaagccatgggtttgcactagcagggtgcagctatttttaagtgacatgtctcagctatttcaaggtttgaatttttattttacttatttttttctgtactttctcatgactcacatctttcaaaattgtgtctcaggcatttttaatgctgaaatcatctcaacttcacagctggtcaaaaaatgtctaagagcaaatcagctctttatcatccaaatacaaaaaggtacatattagagttgtcaactttctactgctggaagaaaactccacgttagtatttttccattaaaaaattaacacagcattctgtttaggaaatgtgtgtatatttcctaaaatacacatctgaaagactttaaattgctattgcacagatgccttgagccccagcaggtcccgaggggccgagtgcccctggaggcccagcaccccactcttgcacctgcaccagctctcctggcggggagcaggtcccgaggggccgagtgcacctggaggcccagcaccccagtcctctgcctgcaccagctctcctgggggggagggggaaggggggagcccacgcaggtctctgaaccacgcctcaggctgcagcagccgcattactcatactcagcggacaaaggatcactcagcattcaatctcaccacttcaaaacattacagagggaaaacgacacctagaagtaggagtgagattcgctgaagttcccttctgaggaagacccacccctccgcctggagagccggggctggcggtgcctgaggaccccttcggcctggacagcccacgcgggcttggggggcctcgctctgccctcatggggcggccatcggttcccgaagcggcgagtgaaaattcaaatggccagtagggggcgcactcggaagtggccgccccgcatgaggcagttcagcggccccgagagtccggggagggaggtttattctccgcctgcacgagactgtgaaatccgcaaccatgagcaggagaggcggccctggtggggaagaggccaccaacatctggacggcaggtaagttccgacgcttctgcagcgagcgcgggaggagggacctgaggcaccgctaacactcagagaaaactaccggctgagggtccctggtctgaatgcttgggaccggaagagtttcggagttcagatttttgcagattttggaatatctgcaggtacagaatgagaaagctaaatacgaaattcatttgtgtttcatacacaccttatacacactgcctgaaggcaactttataaaaacacttttaacaatttcatgcataaaacaaactttgaactgcctggactgcagcccgccacacgaggtcaggtgtggaattttccacttgtgtcacgacgctccaacagtgtcggactgtggggcactctggatttcagatttccagatgcttaaccagtactcagattcctaagttacttgtcagaaatgcctatttcttgggattacacttctctctgcaaatgtctgtgaaattcctgttaaattctttatggatcatgcacatgctactaagttaattatgaaatttagtgtttaacgcaggtcagttgcaaaaacaagaatattgcttgcttcaacccaggaggacaggttattgcctaaaagatacacaacacctagtatgatgccttcaaacttaaagaaaggtttgtatctgtgggtgaagaaaagcagttaaaccagaaacttccacaaaaacaagtctagtagaactgagctgattgccaaagtgtgggagaaaaagggccagcaaaaaaatggttaacactagccttctgaggaggccgcccagagcctggccagagaggagccagagaggagcggggcggagggggcctataaagccctgtgccaaggggcagactcactggctcagagggaggacgcacccgccagccagccgggaaccttccctcgcgggctcccagggcgggtctcttcctctctctagccctgctcaggcattcggcaggtccagcagaggtacacctcctgcagcgggttccaagtgcacctccagcctgatgggcctgaccaaggaggcttccaggagcacagaaggggctgcaacccaggtaggactcagcctcggcctggcggtgccataccactgactaggggagcgggtgggtggtgccacccaggccgctgtcctgttatgggaacagctgaacacagaccagacacctcaccccctggtgagagcagcacccagcttcccaaactcaaggcacagacccctctcccccggagctccggtggtctcagcgtgaccgcagcaggggctttgcctggacggcctttctaactcgtgctgaaagcaggacccagtattccgtcacgttctgtcccagcaagaacgtgtctcacttcaagaaaatgagggtgcccactctgccctgccctgcggtgccccagtcactctcaccaaccctgaagccctgggagggccacacgccttttgacagatgcagacttaatacagctgactaaagtgtggctttatttctctatgacaagcagaggaaatctgaaatgaggtattgcactgtttataactccatggccacctccagtgaggacgtggggccagtggtgaatggcacactaggttcctctcacccaggaccacatcagacactaggacacatcagacaccaggtcccgtatcttctcggtgtctggcaacgatcaaaagactcaatttacatgggaaagaaatgaatgactcgtttttaaactatttttcccttggagttcatttaacaaaattaggaaagaaaataaacgttaagttgagggttctgcccacctttaaacttcctgccacgccacggtctaatacgttccaaaatttctacatttaaagagcaaaacaagtcctctgtgccgtttttaagaaa

SEQ ID NO: 11411 - DNA, 6000 bp, Homo sapiens
ctgcagccactgcacattttcctcctgccccagccccagccccgggcggccaccagcccactttcgacaccgtggatttctctcgacgctgttgatttgccttttctgaacattttatgtaaatggaatcatacagtatgttgtcttctgcgacggacttcttagcatcgtttcttcaaagttcatccatgctgtagcgtggcatcgtcatccctctaagcggccgaatagcattcccttttgctacgccccgttttgtttatccgtgcctcagtcagtggcatctaggttctttccatcttttgtgtgttatgaatgatgttgctataaacatccatgtgcgggttttggtgtgaacatgttttctcttgggtgtattcctaggagtggaattgctgagtcaaatggttgctttatgtttaacattttgacgagctacccgagtgtttctgaattggccgcaacatttctgttcccaccaatataacgtctttggggtctaaccgtgcttgtgtttatctgtcctttgaattccagccatcccgttttcggtttgcctttcctcgatggtgaatgaggtatagcatcttttcatgtgcttatgggccatttgcgtatcttctttggagatatggctatacagatcctttgcccatttttttaatttggattatttgtcttttatgcagactagggaatttcttaaggggactgcttttggttattgtgtttctcacttataaactcacctttcagtaatgagtcacatacacctccacagctgttttggttttctgttgccactgtaacaaattaccacaggcttcgggacttaaaacatttatttgttagctcctagttgcttgggtcagaggtctgggcacagtgtggctcagttggttgccctgagtgtcatgagactaacaggaaggttccagccggactgtgttcctttttggaggctctgggaatgcatcggcatccaagttcattcaggttgtggcaagggttcaggtccttgcagctgtaggactgaggtccggtttcttttctgacctccctcggctcctggaggcctccctccagtcttgcttgcagcccctgcaactcagaaccagcagcgagcggctcacaaggaacctgccagacttttccaccttccacatctgcttgtaaggactggtgactccatcaggctcgcagggtaatccagaataatcgccctattttaagctcagctgattggtagccttaattacctctgcaaagacctttcacctaggttcccaattgatgaatacccccggccatctttagaattctgcccgtgccacgggcttgtggcctgccttacagccttctagttacaggggaccatgaaagggttgtgaggctggtcagagagagtaagtgaaaacggcaagcgaaacctgtgggagaggccactttgagtcgcctccctcccttgttcgtttgtcctttgcttttttttttttttttcaagttagggtctctgtcacccacgctggagtgtagtggcgcgatctcggctcactgcaacctccacctcctgggctcaggcaattctcatgcctcagccacttgaggagctgggactacagggctacgccaccatgcccaaatattgtttgtatttttattagagtcggggtttcaccatgttgcccaggctggtctcgaactcctgacctcaggcaatctgtgtgccttggcctcccaaagtgctgggattacaggcatgagccaccgcaccaggcttcctgttctttattataagttgtattttctttattacaagctgtagtttgtctagcctctaatcagtggttctccgttggagagactatgctccccagggggacatttggcagcgtctgcaggcgtgtttggttgtgacactgatgggtgccgccggcatctgatggttggagatgctgctgactgtcctgcagtgtgtgaggcgctccaaaacagaattccccagcccccagatgtcagtactgatgtggtaaacaaactttgttctatgtcagatggccagttttttaatggcagaattacactattatgtaaataattgatgttcttaatgatgactccccccagaacctacaaaaccctgacatgcctgttagctgtgtagggagtcattccgtgttcattgaattaattttaatacgttatagtgaactacagtcccacttgaaacattaagagcaatcttacagtgtgctagtactttttcttctttttttgtttagtttcctaactatgaaagcaggtgttctaatacatttggaactaataattcatgtgtagtgtacttatggagacttaaaaataaaactaaagggagggaaggaggaatggaaggaggagatgataattaacaaagaattccttattcacaattaatagatgacaacatttgtcataactttagatgtttcttctatgttccgttctcctccccagtcctaatactggaaccaaactgcttagaccagaatcctgagtgaccttggatcagctgcattcattcatttgttccacaaacatctgagtgccaggggctgttttcagcattgggaataacagcagtggccaaaagtcagagtccatgttgtctgcgtaatgggcaggttagggacaaataatgagtaagtgaagaaatatataatgtctccacagagagagctgaggggctggtgtgggcagagcagagtgagtgagggcgagagagcaggtggacatggggtggctggggtaagggaggatatacagtcttgcaggctgtgtaaggattctcatttaaagtggagtatgggccgggtgtggtggctcatgcctgtaatcccagcactttgggaggccgaggcaggggtgggaggaatcacctgaagtcaggagttcgagaccagcctggccaatgtggtgaaaccccgtttctactaaaaatacaaaaaatgagctgggcatggtggcgcgtgcctgtaatttcagctatcaggaggctgagacaggagaatcgcttgaaccctggaggtggaggttgcggtgagccgaggtcgcgccattgcgctacagcctgggcaatagagcgagactctgtctcaaaaataaataaataaaaataaagtggagtatgatgggaagccattggaaagtttaagtagagagttgaactgacccaactgtgtttttaaaagggtcattgtttgttaagtggggagtgtagacctcctccaggggtaggaggtggaagtgggcaagaatgagagcaggggcatcagtgaagagcagcagagacccagactgacttgatgggagcagaggaggcggtaagaagtcaccggagtgcattgcacattcctgatcatttctctagcctgagttttctcatctgtgaaatggggacagtaatcatggatgtctcctggccgctcttaagaattgaatgagttaatgtgtgctagacctgtgcctggacagagtaggtgttcagtgaatgttagcttcaatatcattctcactgtcactgctgctactgcccttcccaccgaggaaaccctggcatgagctggataattattcaatttgtgttctgtacatgttttgagtccataatcaatatgtatattacttgtttttaagaatttatggaaatggcattattttgaatatatcatttaaaaaatggatttgctaggctgggagcagtggctcacgcctgtaatcccagcactttgggaggccaagacaggtggatcacctgaggtcaggagtttgagaccagcctggtcaacatggtgaaacccatctctactaaaaaatacaaaaattagctgggcatagtggcaggcacctgtaatcccagctacttgggaggctgaggcagaagaatcgcttgaactagggaggtggtggtcgcagtgagccaagaccgtgccattgcactccagcctgggcggcgagatcaagactatctcaaaaaaaaaggatttggtgagcagcacatgtgcgtgctgtccatgggggtgcgtgaagatctggtttacttctttccaccgtcacattacttaccataattgctgatccgttccctgtgaatgcgtattcaggttgtttaccgttttccctgcgaccaacagtgctgcactgtgtgtccgtgtccacgcctccgtgcgcggcggccagggtctctccgggatgtgtacttagacgcagagttgctgggtcagttccacgcaggcccagctttgccaggggctgtcaaccattgcttctcatggaaagtctcagcaaggctattaaatgaactcaaaaactatctcccttattttcagatgaatgaaaaattcagtgtttgtgtagatggagaggagcagaggagtgatgggaaatgtctctgggattggacgtcatcaggtgtgctaagacacagacgggactgttgtgaggaaggagcttgtgctcacagatttgtagaaacaggaggcacagcacacggggccacacggggagcaccaggctccagggagcaccacgctgggtcaggaggcggaggggtacttgtgggcaagagcctcgattgtggtttctgaaaagaaatgggcaaggcagcatccgcggtttaggattggctggtttgagtaatttccccagcctctgtgctatcagggtggtccctggttgtccagtgcttggccctggggtggttggcagaggcatatggctgcctgcagtgtggagcctgggccgccaatatagccctgcactccaacctgcgctgagtcatctctcctacacgctccagcctccctcatgttttctttagtgtttcaaaaatgcgaagctcagggtcttcgtgcgtgagattccttccaccaggaaagctcctcctgcccctgctgcgcagccggcccctccttaaggtcttgtaaatgcctcctcctgagccgccttccccaacagccctcatttaagcagcctccttgactgtaggtccgctgactggcttcctccttgagagcacactcacagtgccggaccgcaggcacctcgccgatgttcctgtccacttgctttttgtattgctccttctccagtgagcttggaagcctcatgcgggcaaggccttgtctgtctggttctctgttgtgtcctcggagcctgccacagtggcggcgcttggtggctttgacaggggactggattgggtggaaggggcgagattagacctggatacagtgacgtccttgtcagccatgccgagtgcagagcgcctactgtattgtaggcatttgaaatgaaacggagaatgtttcccaggccgtgcctagcaaggatgcctggcagtcgtgtgagtgagtgctgtggaggggagcagtgcacacccggtgctgtcgggagcacaggaagggtgcttgggagcagtgcggggcaggtcagggaaccctttctaggatgtgtgttggacaggctgataaacttctgtggaaggccgttatatgcaaggagttcacatctggacggtgactggtccagccttttagagctccttccagctctgagattctatgccacgaaaaaaaaaaaaaaaaggcaggaaaaggaaataaggaattttttggtgggagttgcggctttaaataggatggtccagtaaggccgcactgagaaggccttcccagtaaagacttcatgggtgcagaagaaatttcctcaaagtcttggtttgtgtctttgattttatttgtgagcttggagaagcttgagcagggctttattctgatgtctctaattgtctttaattcagattataggaattcttaaatgttgacttgcagggttcgggaagcacaccagatggaaaccgaaagtgctgccgttttgagcacctactcattgcacaccctgggtccagggtgagtctcactccgttcaactcctcggccacagatctccctgatctcagtc

SEQ ID NO: 11412 - DNA, 6000 bp, Homo sapiens
gcagaaaatatatattaccttgtaaagaaacaaaccaaagcaaagcaaagcaaagccaggttcttttagaattagttctaacctgcttctcatatagcttgaagtcctatcccaaagccttcactgcctgagtacaaagaagagagtttcctcctacttttcaatcacttattttttactttcctaaggaaggaaacaaatattagagcttataagtaatataagtatacatttattttttttctggactcttgacttaaagttgcttcttagtgtcttcagttttcattcatctgtttacctttcatctatccattcatttattcatgccttacccttacaagcctcaggactcagagatctgtgagaatgtaatgcaagtccctgctgataaattacgtagcattttcttgatagtcctggcataagaaccccagttttgcatatagtatttgaaaacattatttgtaatatgcatgggagacggtggtctatggtttaatatttttcagcctgtggcaagttttctaaaattaagtacctgtcagtagactgcctgtcctcttcatttctgcaaattgggtagtatacacatctgaaggagatctcaagtgagaggcaatctgtggctggtgttcagtgttcattcctttttcttcttcatttttcaatgtgtcaacttaatgtcacttcatcagggaagcttgccctgtcccttgcggaccaggtgagtggccctgtaactcttagcggcaggttcatagctttcacaacaaccattacaattgccgttaaatgtttatttggttgattatttattgaatgcctgctttttccatttggtcatatgttccatggggctgggaggaccatgtgttgtttacagtcctgtctccagggcctgtcaccgtgtctggcatgtagtgggagctaatttgttgaatgaattaataaaaaagtaaccattaaagaacatttaactattagaagaagtgtatgtattggtttagccttctaaatttctgtgtaattttgcatatgcactgattataattttttagaatcacagagtactgaaatatatggaaatttaaataaaactgttcaattttttaaaaaggcaaaattgaagataaggagatgctataaactagagaaactataaaattagttggaatattaaagtcctctttttaattttttgagtggcagtgtctttctctgtcacccaggctggaatacagtggtgcaattatagctcattgtcacctagaattcctgggctcaagtgatcttgcagcctcggcctgccaagtagctggggctacaggtgcaccaccatgcctggcaaattttttaatgttttatagagatggaggtctcactgtgttgcccaggatggtctcaaactcctggccttaagggatcctacagcctcagcctctcaaaaggctgtgattacagatgaaagccactgggcccagcctaaagtccctttctttgaaagtgaaggttttaaatccaacttgctagtaaaacttttagggtagttaggcttaaaaatccccacactactagtgacttgatggattagaacaattcttttcctaaggagctgttgtgctttcttattgtaaaatgtaattagcagatgtaaaaaaaaaaggtttattaatcttatggggtaaaattatggttgcttatatgtaaattatttcatgttcatagattgcttctcttttattttaagtaaacaggttagaagtcaaaatgccattaccaatttgattaaaatcattacatttctttctaaaacatgatattagttattttattttccataagaaatccagacttcattagtctaatcttaggattgggattttcagtagccaaatcaaaatgtcttagtgtagattttctgtcaaaaatatttgaaagcatcaaattatgaaagagtaatataatgtagaaaactgaaaatctgcacagctctccatacatttagttcacatgtccagtgagcaatgattaatggtgcctgggctagatagcttctgcttggcctgccacaaccactttcttttgctgtctgctggctgccgtggaaggttcctttgtgcaggcaaagtcaagttctcttgctctctggcttccaatagatttggtcagagggagacccagcaggaggtgtgtatgagggagaggtcagaatgcaatttccttttgaggttgccaggggctggctgtgtccttttagagagattactgcacccctcaaggtggcttccgttcatgactctgtaactgctctctctcttagggctcatgggtaacaactgccaacctcgacctctgactccttctaggttgtggctttccactgccttctctatatgctgctcctgccttgaaaatagtccctttatttagtctccttgagtcatttgttttctttccctctatgactcatacaatacccatgaaaaggaggtgagaaaatgtacccttttacaattcaatggtctattcaaatgaattatctgaaatcaacatatgactttgtaagtgtaatatatatttatactttcaggcagatatagatacaaaaacactatgttttgaagaaagtgtgtctcatgatttgctgctaaaattttaggttcaccattagtagcaaaccatctttgaattattcatctagcagtgagaatggattgatcttgtctctcctctctctggttgactttgttatgtgctctgtgtttgtgagaggaagattctggtgaggggtgtggtcttcatcctggcccataatggaattcaactcatgaccttaaacctactaactgtgttacactcagctgtgttaactaaccacaggccccttttgtgcaggtgtgtatgtaaagctttgcttggtcttactgagctcatgttggggagatagataaaaatatggtgcaatatagtgtactcctggctctccttgaccccatgatttccccatttcaataggcttcctctcctttgcttttgttaaactccattgtgcatcaaaacccaaaggctcacatcctgctctgaatcaactatgggaactcaactgagaagaaaaggtcagagactgaatttcctatttgacaccaacttgtacaaacaggaatcttaataactgtcgactatgaggacaggattattctgagccagtcctgatttggggaaggaatactactacttcatgtttttggatgcaaacttggggtagtcatccatcttcttttttgtttcacactctggctttacatttcctttcttcttttccctctccttagcctgttttcatgaaggtgggaggagcatgaaagctcagggcagtgtcgggagagttgggccagtgctggacattgacttctagccctaactcctcatttatatctaatttctgattatatactgatgttttgccacaagcaactagtagttttaatactagagagcagtcaagtatataaaaagacaaagttaatggctataataattatgcttttttttgacctgagttttgcagcaaaaacaaatctaccccaaggccaggtggtaggaagctatcatcctgatggccgctgttgctaaccaccatcactggaaaagtgcttggtcaagcactaccccctaagggaagaatgtggcttcaagctgatctttcactggaaaaaaccaatgatgttattgagtagcacaaagaacccaccccgccaacctacttcaccaattaagttccatgatcaatggacaaggttgtttgcagagaacaaaaaccttttttggcaggggggaaaaaaacaaaaaaaaaccctttttcatggtgaaaatatacgtgattcaggtcttaaattgtcttctgtctgcaaatctgtactcagatgtatgcaagtttcttgcagaaagattgaaatttcctagaatttggaggagcttcctctaagctgtgctttaggtggctttttgctagccttgtcaggggtgtcttggcttccttgggatatttagcaaaccagtaactgtggtgaacagatgaaaaacttatggcattctgaatagacaaggcaagtttcaagcttattgcaatgttttgatgtgcaagcagtgggaaaccttgaggcagctgaagttgttcttccttgggccacaaaaagtatttctggtatctaaaagtctctgatccccttggagcctcagagaccctttatttcatcactcagtcatgtacaggaaggctcagtgaaggcaacatggagagacacagttggtttgggggagatgtaagcacttttttccctgtctggaatatctatcttacagataaagataagaaagaaggggtaaatgattaaataatctatgatgttgacctttgattagaaatgtaatttttattctttaatgacacattgaagtccgtgggctgtcaaggtgtttgccaaggtagttatgaagttttcatggccatttttggcatttcaaaaagcaaagtggcagttgtaagcttccctacgagaagactgcacaggctacaactgaagcggcacttcggtgatttgaactggaattccatcacttcagcttggtaaaaacagatgccttgtgctgatcagaagttttgcagctgaacagatctttgattaaaagagaatattggaaatgggtggtgttttaacttaaatagttttatagaaaaatatttcaaagttaggatacatggaagaaaataacaaaaggggttcttgattaatggatggatgggctcattttactttcaatgaatatttattgaacacctactatctcatgggagctcatgttacatctgtgaacaatgcagaaaataaccctgtggaatctacatgttagtaggggaaacagaatacacaaattaatgcaggtggtgaaagaggaaggaaataagtagagtgatgaggtcataatggaaggtgaggagacaacactagatggggtggtcagggaaggtctgttgagctgaggctgaaggatgagaaaggccaggaaggacttacttgggaaaatgtttgtggtgatatgtatgagtgctgcaggtgaaacaaaaaggaagccagtgtagttggatcaggtgagtgagagggataggtggtcagttgccagttcaaaggatcctgtgacaggaggtctgggctatattctaagggcaatggggaaatgattgaaggactctaaacaagatttttctaagatctattttgtgttttttttttttgagacagagttttgctcttggtgcccaggattgcaatggtgtgatttcggctccctgcaacctctgcctctcgggttcaagtgattctcttgtctcagcctcctgagtagctgggattacaggtgcccaccactatgcctggctaagttttggtatttttagtagtgatggggcttcaccgtgttgaccaggctggtctcgaactcctgacctcaggtgatctgcccacctcagcctcccaaactgctgggattacaggcgtgagacaccgcacccagcctttaagatctgtttttgtaaaataccagttttcttgctggtgtggcatagatttgagaagagcatgaatggaagcatgaagaaaagtcaagtggctttaggaatccagatatcacagtggcttggactagggtgtggctttttgctccaccattgctaggtcatagcctaagatggctaatggagttccaggcattatgtccaaattctagccagcaagaaagagggaggatcatgaaaaaggcatgccttctccctttaaggatccttttcagaagcttcacttaccatttcaaggaaggccaggaaatgtagtcacgttctgggtggttaggtaaaaactggaggtttcatctagaaggagaacagacactagaagacaataatctctgctaactcctattaataatatatgtaaatgaatt

SEQ ID NO: 11413 - DNA, 6000 bp, Homo sapiens
ctcaacacaggcagtgctgggatggggagacgtgtgtttctgtcccctcaaacaaaacactcactttgaaaacatccagaggccttcgttctaaagtaggaaggtgggctcctccctgaaggagcttcctctctgctttctcccctcagtctgtctgggacagaggaggaagagatagactgagcaggtgctggccgcctttctccatcccttacaacgccacgagcttcagcgccatcacgtagtccattctgatggccttctctccttaaaattctcctgcgtcagctcgccacatgtgtatgaccttgcccctgtacatttccatgagaacacagaaagtgactgctcttcccacaagccctgatgtcagggcagcctggaagccttgaccccgcctgctggtgtctgtctttagagcagggttcaaagtggaatcttatagaaagtggtataattggtttttaatacgctacctttgaagggactcattgcgtgcctgttcatatgcgggctgctctgtggtcggtggttgcgctctcccggctcctcccgtgccccgtgtgtgcctcgcatttggcggctcagcgcttcctgaaacggggtcctgggtgattccgcagggcccttcgcactatggaacacgtctcagattgtatcgatgattggtccaggcaggagaagactggccatcattccaccacaacaatccaaatggaagattcccctgtgtttgctactataaatcaggtcataaaaatgtgggaaggaataatggactctttctagaaactggaagatgttttgctagatgctccttttcgtcaggatgttttgtctttaaggacaatgtcttgggtcccttaggccatcttcgacagaagcaagactgtacccaggagccaaaatctaaaatcctattctagcctgtcctttgctggccgcatggccaggagtgggccagccttcatgtctggaaagagagtcccccatcagaggggcctgcatcgcaccacacaccaaaacccagcagcgaaaattgaaaaacagccagaatttgaaccttggggttggagctaaagaacctgcattaaacattttctttaatggtagtttttttattttagaaaacacacggacactctctgcctttttcctttgctttcccattcacacggaggcgaaatgccactgctcttaccctgttcagttcttgtatttgccacatcaggattcctcagtccagactgagctgtgaatattcttccttcctgacagggggagtcggtgaagtacttcctggacaacttggaccggatcggccagctggtgagtaagcacgcccgcccgaagaagctgggctccagggttagaaaacgtgtccagagaccaaagcagtccacgttgtgaggactttggctggactgacaggccgagcttgttctgtcacattaccacgaatagtactgtaatggcacgctctcacttggatctgggccccgtctcagtggggaggggaggaaactgcctttgcccagatcaccataaaggagacagacagaggagttcatgagtgaaaggaggacttcctttatctcatggaaaattcaaacatactcaaaaacaaatagtctaatgaaaccccaggcatggcagttatcactgattaccagtcttgtttcagcagccctcccccggcctccgggagcaaatgcagagaatattttagagtgtacctcaaaaagacaagacgaaaaatgacaaccgcagtaccgtatggctcctgaaaaattggcagtaattccgtaatgtcaacctagtcagtttagagattttccctgttgtctcattaatgttttcatgttgattttgctttgttttagcagagtttgaatcaacaacctaataaggtcatgcattgccattggtcaggatcacttaagtgttaatctgtatgtctctcctttttttctttcaacttgtttattggagtaactggattatttatcctgtagggtttcttaccatgtggactttgctcttccacccctgcagtgttattgaagatgtttctctgtcccctgcacaccccgtgggtggtagtcagacctctagatcgaggcatgatcatgtccgtgtttggtgttttggcaagaagctgcctgagtggtgtgtgcactcatcacgggaggtgttttgttggttttttgttctgttttgtttttcgattttttgagacagggtctcactctgtcacccaggctggagtacagtggcacgatcgtaactcattgtagcctcaacctcctaggttcaaatgatcctcctgtctcggcctcccaagtagctgggactatagcatgaggcaccacgcccagctaatgtttttacttcttgtaaatatggggttttactatgttgcccaggctgttcttgaacttctgggctcaaggtattcctcccacttcccaaagcaccaggattataggtgtgagccaccgtgcctggcctggaggattattaatagtgcaaagtcaaagtgagtgaagagtatgcttgcctgtgtgtcgctaaagacttaaagaattgtctaagaataacattaaatgtattgcagattgaatttacatcacattcaaaacctaaattaattcacagtaaggttttggaagctataagctttaggagttagaaaaataaaaaggtatctctggtatggaaacaaaaaagatggtaaatttcctctggagaagaaaatggatgtggttttgcgctgggcctgcccacgagtgttctgagcattcgtcctcagactggtgagcctccgttcgttttgaaatgaagtatttgattctttctgtttcacggccagttgataatgttataaatgaaatttgcttttggtttctggttcaacctgttgcaaaagtcagtctctttccttcttatctttttgccatctttttgtttctattttctctgttctttcttcctccccctaaatttctgcctcatcctgtattttacagaattactttcctagtaagcaagatatcctgctggctaggaaagccaccaagggaattgtggagcatgacttcgttattaagaagatcccctttaagatggtggatgtgggcggccagcggtcccagcgccagaagtggttccagtgcttcgacgggatcacgtccatcctgttcatggtctcctccagcgagtacgaccaggtcctcatggaggacaggcgcaccaaccggctggtggagtccatgaacatcttcgagaccatcgtcaacaacaagctcttcttcaacgtctccatcattctcttcctcaacaagatggacctcctggtggagaaggtgaagaccgtgagcatcaagaagcacttcccggacttcaggggcgacccgcacaggctggaggacgtccagcgctacctggtccagtgcttcgacaggaagagacggaaccgcagcaagccactcttccaccacttcaccaccgccatcgacaccgagaacgtccgcttcgtgttccatgctgtgaaagacaccatcctgcaggagaacctgaaggacatcatgctgcagtgagcgaggaagccccggggtttgtcgtcgttgagcagcccccacggctgtcggtcagactcttgggtgtgtgttgtctgtgtggtccttgagtgggtttctcggatccgtgccctggaatacctggctcaggaatgctgtcagaccagccagccagcgagctctaggcaaaaggacatggaaactgtcacgttagctactgaatcctgggggcgagtgaaactactgaaaatccgagtgatgatgttgtgaatacggaacacctaatcacacagcttgctttgcttttacagaaacgttcctctttttctgacgcagtttaattgaggaccgtgttgtgtgtgtatgtgtgtacacacgctctgtctttaatgacagaaacacaaaaaccagctggccttgcagacggcttttctaactcacaagtcttccctgagacagactaacctgaaagctttgcctaacagtagcttgtagagatccagtgcacgccgatgctgctaaactcagtgcctgagcccggccctgcagccccagccgcagtgtctgaaggccacctcccaaagggagcacgttgccttttcaaactcccgtgccgatttcctaagagcccctagtccaagcctctcagatgaagctgaggagccgtgcctaggatcccttcccagctctgaggacgggctgcagagctctgcaggtgtggattcaccttacgcccctacagcaggctcagcccttcccaccctgccccatgcccagcagcacaacacggagtgagacaggatgcccacggtgactgccgctccgtccgtgcacacacagcggtgctcttctccccttagccacccactgcccaacccaacggcaaagacacagaaaccaggtccccttgcagacggctctcccatcttcctgcaagtcatctgctcacacacagttggcagcacatagcgtttccttctttcagaaacattcctcttctggggcttcagaaagctggcaaggccactagcagagcttttgttaatgccccagctgcttggcgagctaacagctgacctttcgggaagcccacagacgctggaggaatcttgagtttctccaaactgccgctccaccagtgcctttggacagccgtgcctgttcgccgctctccctaagtctgattctcatcgaggcccctcgcttctatgactgtgcttgcagaagagtaaacactctcggatgccgctgtcctgggggagcccgcgggagcctgtgaatgttgatacgagctggccagtcctgggcccagctcacttgtccagctacctgccaggtggctttcactgtgtttaaaatacattgcattccaagctggtcccctctgtgtatcactctactgagaaatcctgcctagtgtgttttgggatgtgtcctagcatttacaagaaaatgaaaagcgtcctcttaattggcacccgaatgttgctgtggctcagtcacatatcccagggccctcgtcccgaggccgtgctgccccgagccccgagcccctctgcagctcacccttggcttgttttccgcaaacccggtaaacgcaagcccttggggcagatgcagaagcagaagagggaggggaaacctgcctctgggtcaccctgttagcacagcgttctcatcgggagacagcatggaactctctctcgcagtgctcgaggctgtgtgtcagtgtttgctgggcttgtggctccttttttggctggataaagaagtcgctgtttttgtactgcttctgtggctcttcacagacctcacggatgtgaccggagatgagtgccgatgaccacgttttaaaggagaaagagagctcctggtggggccctcggggtggtctcaggtcccatttgcagtctgcaacagtgacgcgcagcccggtccggagcgtggtgagctttgtttgccttctgggtcagctttcgctgtgtctcctgtgtgtgttagaatccagagcccagaggaagtgcaagcgggtcctccgccaacggggagagcctcttcgcggcgctgttggcgacagcagcgctgtgattcgcgtagcaggggagttgtttgaaacaccttcctgagtagtccggccttgtcaatgagtgcttgttttcctttaaacagtctgacatatttactcgtcactttcaaaccagaagcatgagaggaaggagatattgtggggtccgtttaactcgatagaaagcgcagggggatggcccccggcgcgggctcttgacccgctcagcgctgaccccaccgccctggccgaggcacttggccttgctgagctggacttcctcctcctcctcctcatgaccggggtgaattagaacgtttttaaagacacccccttccaaattctgtaacacattgt

SEQ ID NO: 11414 - DNA, 6000 bp, Homo sapiens
gatttgttatggcagcctcaagaaacaaatttagtcactcattagtagtcagttctgtgatcctgagaacacttcttaaattcatctgcaaaatggggaaatctgatggtacccatctcacagagctgttgtgaggagtaaatatgtgtaacttaacacagtaccaagtacctatcaacgctgcagtaaatgttgctattaaaaccattattactgctatacacaggcaattaaagaggaaaagccacaagggcctggaatgggccagtgtattttcatgcagaagtgcattttcagggctcctggctgaacctctcttttcaatttgaacatgtaagtgactgtggctagaccacatgcaaactattccaaaagaggaggcagagtgctagctgggaggttttccccatcactcgagcctgacagcccacaaagaaactgtaagccctagaaacttagtcttagaggagagggaaaggcctctccattctatctctttaccgtttgtactaagcactgtgtcttttcttagccaaggtttttaaaaattgctcttgatgggacctggagggagaatgcttttttatcctttattgtccactcccttctgacttccttaaagagctgagtccttgggggaaaagaacagtggattcaaagcacactcagaagagtgggtaactctaaaacagctgtcttgccttgaatcatcaggctccaggaataaaatccattccctttatgactgtgggtagtaatggcacagccagcctcactatgggatcacaggcaagaaaaataaccttccctttgcaattctgattttacttattaaacagaaaattcatggctagttgtccctgataggtgtttgcacacgtgggtggaactaagacacacacacacacacacaaatgtgttcattaccttggaaagaaggcagtgactatttccatgtagaccattcctactttttattattactgattcaccaattgatatctttccttccctttgtggagggcaatttccatactacttttttctttctagtttcccaaattccttttatgtctttgctcctgttctgttcctgccactgatggacctacccttaaaagagtccgcaaagcctatttggtggcaaaacgatacccagctcactcctggaacaccctatgaggcattatggacatctagtggctgctcaggataatgcctcagggatgcatatcaggttagggagtggtctagccttgggctttactaaggaacccaattatcctggctgggtgggagagtcctgggtcctctagatgaccatttctgtcattttctattggcgacccaaagtcactaggaagtgcagactggtgctattgaagactcttctttatcccaatccagcaaagtatagttgcactggcatacaagcccacattagacaggcatttggaaatatcttcaaggcccaggtttaaatgccaattagccatacattgttacttagaggaactgaggtcaaaaaggacagactctgatactaatcagtcatgtagctttaggtaagtcactgtgcctctctgagcttcatcagtgacatctgtaaagtgagaggttaaatccagataatctccaaggtccactttagtttaacattctgtgatctatgtgtctttttagtagctgggaaaacacagtccgatttgctctgctccagcactgtggatctctagattaaatgaagaaagcattctcacttaactttgtggcccatttccaagacttggctacaattccaaaggatcaaccttcacagagctacatatctgagatgggacaggaatcatggactaagagagcggtaagaaactttctaatccatttccttgattttataaatggaaaaactgatgtttagagctattttaagatttgtcacatgtctaaaggggactagaactcaggtatcccaatcttagcacagggctcattctataataccaggctgctgacacaggccttccccaatcactgctggcttttttagctctctctggcgttatcacagcagtctccctgtgtgaaactgcaagtgaaaacaatctgaatccactgtctcttcctcttagggtgtaagtagccttctttccttcttattctttggtggcaccattccaaatccaagaagcagtcagagccacgggctgtgaggagcaagatgccatagctagatggtacttgggttaccaaaatgagaggctgcaatcccactttcagctcagaagggctgtgtgcaacgacggccccacagcctcctctgtagtccagttagtaggttcagtggtgctttcctggcccagctggcttacagggggcaaagcagcctgatgtagagctcgacagagcttgggcatagtcaccttcatggatggcagtcacaaatacttactgagagacaacctcattactaagtactggtctgacccaactcggcccccactttcatctacctttatagtgcggggcagcagctttcatttgtggagcctggagctgaacagacagggtttgagtttgcctacagtagcagaggaccagcccaggcagagaccctgttgcctgaggagggaaggatagtcatacttaatcgctgccatccagaccctggccaggggtctcctcaggcaatagatgactctactaggtcggtgccagctataaaggagcagaacctctcaccagaaagtctgagtgcccagatggaactaaaccccagtatcagggtttgacttacctccatgtctccctcattctttttcttgatgagagttcattttctcagcccgtctcctacccttcatcttacttctctgacacatccttcactgaactttcctacagtctctctctcctcccccctccacttgcctccaccatttactctatgaagagtagacacagcgggcattcctgttagtgatgaaaacatcggactcagggtttgaaggctggatggaaaggctggctctgttactttctagtgtgtgaccttgggcaagttatttgcctgcctaagctaagtgccttcatctgtgaaatggagacaagtgtggcaattactttcactgggtaaatgaagattaaacaagaacagatataagttcttggtatggtggatagtacatagtagataagcatcccagtaaatgactattgaagtggatgaatgaaacctgagttctcatcccactaggagaatactttggggaatcacttccacacccaagtttcttgacatctgagacgtgctgaggctcaaatccactatcacttactagtgaccctaggcaacgtttgactcatataaaatgaataatagggttgcagtggaatacagagtaagggttcaataaacagaaactaacaaggttattatttgacagcaaatgataacagaaaggtcttggcaaagaatggggactccaacttgcctacaaaggaaccgtttccaggacttcaagtattccatggcgtatttaaagaggttcaggttactgggcaaaagacaatactcagaaataggtgtggtagaaaccagagagctgagaaatctgggacctcctcgttcttaagcaacagcccacgcgcaggtgatgagggtttatcaagcgagcctgccagaaatcacacggggagaggggtgggttgaggagtctggaggcagctcttgaagggaagggatattaaaccatgctatattctactggaccggcttcccagggctcagctagattgcctcacccacagtcggcagagaaaggggcagtcttttttcaggggggtgggaaaaagctgacctagtccccttctcctacactagtctgtcaaatgccttagggtctcctaccagaaataggagcaagaattccacccccactcccaatcgctacccctggctgctacgcagttcttctcagagtcctagccaaggaagggctggcgagctcacagggcagggggctcagccgcccgcctcccttcccccagttctctgggggcagcggggagcaaggggcgactccggccagcgaagactgagaagccgcggctgcagctccatgaatgaacgggctgtgtcgtgggctccgggagttcacctcaatccttcctgccggcctctgtgctgtcccaggttgccattccccagctcatcacacttggtcattcctgccactgtttcccgcccccgcaaccctcattaaggaaaccctcatttaaagccccagtgagagcacaggaggggtgaggcaaagcgaaggaggggctggcggcagtgcagcagcgaagcccgggctctcggtcctgggagcctcgtggccccggccgccgtcccccgagtccccaccacgcagttccgaactccgaacgcgagtccgcgccccgtcagcagtcagcgggggtgaggatgacgcgggccgggcgagaggcaggccaaatgcagcagccccgccgcgggccgccgggcccctgagccccgctcttcagagccagggggccccgggtgcgggccggagggcgggggccggcgcgggctctcccgccgcagccccgcgccgctccagcctatcagcggccacccaactgctccctccgaccggcccaaaatagctgcgaacgcctgcgacttgcgcgcggcccctcacttgacgctcactccggctcgctcgcccgctcgccctggccccgctccgctcgtctagagggggcggggaggaagcggcccggggaggggggaggggggagggggagagaggaagagaggaggaaggaaggaggaaagaggaagacgggcggccggaggcgcggggctgcgcggcgccggccggcgcggcgctggaaggcgccggcgttaaccccgcgaggcaggcgacggagggggagcggcgctaatacataagagcactgcatcacgctaatcttctcccagaacagtatgcgtcagcagtacattcacgttctgactgaaggacaaaaggatgagagagcagtctgcgtggctgccgcctgcaacaccgcgagcccggcgcgaggaggagacggtgggcgccgcgcgcaggggccccgctgctgctgctgccgccgctagccagcggggactatgttcctgggctccggagcgtttcccgcagccgcgacccccgctgctcacgccgctgcagcagtccgctggcggcgcggccactgagggcgccgggagccgaagccgcgaactcgctccctccgcacaaagccggagccggcggcgcgccgggggccgggcagcggcgggcggcgacgggcggttgcgcgccgccgggggctgcggccgccgccgccgccggacccgcgcccgcccccggactctctgaaggggcctgcggtgcgggcgcgaccgcgggcgccgcgcgctcctccggccggcggaccgggtccgagcgcagccgccacgccgctggtcctcgggggccggacggagcgccgccccgcgtgccggcagccggcggactggagaactgaccccccgtttttgtctcttccaccctccgagaagaggcgaggagaaagggggtgtgtgtctggggagggcgaaggcgccgcgaacacctcctcttaactctcgccgctccgcgagctcacgaccgcaatcagctgccgccggcccggagcggccgacgccgggagagggagcgcagcatccagcgagtgcggcctgggcggcttcggggcgcccccgcactccctccggcggcggcccgcagagcgggccggggccgccggagcgcactttggcgatgaagcgccttcccccgcggctggagcgagccggtgccagggtccaaggacaaagccgggaagcgctggtggcgccgctccttgggcggaggggggggcatgcacctgcatagcccgccgggccttggctctcccaggcgcgcctcaactccgcggcttcgccgg

SEQ ID NO: 11415 - DNA, 6000 bp, Homo sapiens
caagaccagcctgggcaatatagtgaaatcctatctctacaaaaaatttaaaaattagccaagtgtggtggcaaatgcctgtagtcccagctacttgggaggctgagatggggggatcgctggagcccaggagttccaggctgcagtgactggtgatcacaccactgcactccagcctgggcgacagagcgaaaccctgactcaaaaaaaaaaaggaaaaaaaagaaagaaaggaaaacaaattggatcatcaaattgtctgagtcacctgagaaaccacaatttaatgccacctttcgatacccagagttcctatctttgaatcaaattaagtagaaaaacaagttaaaaaaaaaatccttaaataattatggaggtgggcagagggtttttttttttttgtgatcgaaatggttgataatgcttgtagaagaaaggaaaaacatctcatataaaaatttaatctgaatgtttttgttgttaaaagtctcctgtgaatcatgaattatgaaaaacatgacccaggaaagctgtgaacaagttgattcaagtatctcaggcatgtgatgatctcacgccccagtccagcttggcttctgggacggttaggattttatcaggttcagggaacactgatggcctaattctggctccaggcctcacccggctcttttcacactggcgccagatgtttgggaagttttcaggaaattgtggaaaaccagacctcaggctggtcaccttccagcaaggtaggaggtggctggtatggttttcccattatttttttcttttcccttttttttttttttgagacagggtcttgctctgtcactgaggctggagtgcagtggtgtgatttaagctgactgcaaccttgacctcccaggctctagcgattctccttaaggattgcaacctcagcctcccaagtaccagggactacaagcccacaccaccacacctggctaatttttttattttttgtagagacggtgtcttgctatgttgctcaggctggtctcaaactcctgggctcaagcaatcctcccacctcagcctcctaaagtgctgggattacaggcgtgagccaccgtccacagctgctcacccattcttaaatacaaaaggagaccctgaaaataaactgtacagagggatagattagacctcatgacccttgacctttaactcttcactgaggaaggagcccggctccttttttcctacctgcactcatcagacatttattacacgtggtggggcgtggtggctcacagctgtaatcccggcattttgggaggctgaggcgggtgggtcacctgaggtcaggagttcgagaccagcctggccaacctgacgaaaccccgtctctactaaaattacaaaaaattagctgggtgtggtggcgcgtacctgtgatcccagctactcgggaggctgacacaagagaatagcttgaacccgggaggtggaggttgtagtgagcctagatcgcgccactgcactccagcttgggcgaaagagcgagagtccgcctcaaaacaaacaaacaaaaagacatttattagatgcctactatgtgccaggcctgtagagaaatatgacaaggtctccgccctgaggtggagctcaggtcagtggaagaaattggaaaataactgaaacacagtgagaccaacagactgcaggcaacatccgattctgagatgaaatccatgtgacgtgctctgagggccaaaggatagccttggcctggagagttgggcacccttacaaagtgggacagaagacatgcccgtcccttgcatggagtgattaaaccccgggcaaagaaaggaatcagtgatgactctggtgcctgggacgttcagatgcgggtggatgttagaaaacgctttaacaactgtccaatcagaagggaggggccctgaccagtcatggtggacgctggccattaaaggactgtggggccctattggtgtacatggtgtctggggagcagggaggagggaggattctggagggctggagcactgatggaaggatagaggctgagactggaagtaggggcttagagcttaactccagggaaaatagcgaggagcgtgaaagacttgccggagagaggccaggcggggcacagtggctcacgcctataatcccaccactctgggaggctgagtcaggtggatcacatgaggccaggagtttgagaccagcctggccaacatggcaagaccctgtctctactaaaaatacaaaaattagctgggtatggtggtgcacacctgtaatcccagctactcgggaggctgaggccggagaatcgctcgaacctgggaggcggaggttgcagtgagttgagattgcaccactgcactccagcctgggcaacagagggagactgtcttcaaaaaagggaaaaaaggagagatgccagaggtaagcatttcaggaggctcacccaggtggccctggagaatggccactgggtgacttggtccctagatcctgtgaacttgagagtatagaacccaagggggagggaatgaagggaaatgaaaagcagaagcaggttgggagcggtggctcacacccataatcctagtgctctgggaggccgcagatcacttgaggccaggagtttgaaacaagcccaggcaacatagtgagacctcatctctattaaaaaaaaaaaaatttatccaggagtggtggcatgtgcctgtagtcccagctacttgggaggctgagatgggaggatcccttgagcccaggagtttgagggtacagtgagttatggtcgcaccactgcactccagcctgggcaacaaagcaagacctttttctctaaaaaagaaaaagaaggccaggtgcagtggctcacgcctgtaatcccagcactttgggaggctgaggtgggcggatcatgaggtcaggagattgagaccatcctggctaacacagcgaaaccccgtctctactaaaaatacaaaaaattagccgggcgtggtggcgggtgcctgtagtcccagctactcaggagactgaggcaggagaatggtgtgaacccgggaggtggagcttgcagtgagccgagattgcgccactgcactccagcctgggcgacagagcaagactccatctaaaaaaagaaaaaaagaaaagcagaagggtctgggctgtcgttcccaatctttccctctttctgatgcacagtgagggtccagtcacgtggtgtccacttctatcatctctccaccatccatgacctagaagctgcccaaggcagaaactgggctttacggacctgatttctgtatcatcattttttgtttttttttgagacggagtctcactctgtcacccaggctggaatgcaatggcgtgatctcagctcactgcaacctccacctcccaagttcaagcaattctcctgcctcagcctcccgagtagctgggactacaggcacatgccaccacacccagctaatttttgtatttttagtagacatggggtttcaccatgttggccaggatggtctcgatctcttgaccctgtgatccttctgcctcggcctcccaaagtgctgggattacattgcacccagccctgcatcaccttcttaagccccttttttccggccccacctaataccacgcatgtcagggttgcctggcctagcacagcacagcctagcctggaggagaagtccatacttacctatgcctggtgggggatgccgccttcaccaaggtgtgagcccatggaggctggcctcctttaagagtctggccagaggacttgaggtggcctaaacacaccatgagcagactaatgataccaaagtggaaccagaatgataagtcctagctccccaaaatttgagcatctattctgtgccaaacactatagcagacattttattatttatatgtttatttattttgagacagagttttgctcttgtcacccaggttggagtgcaatggcgtgatctcggctcactgcaacctctacctcccagttcaagcaatacctcaacctcctacgtagctgggattacgggtgcccgccaccatgcccagctaatttttgtatttttagtagagatggggtttcatcatgttgcccaggttgctcttgaactcctgacctcaggtgatccaccagccttggcctcccaaagtgctgggattacaggcattagtcaccccatctggcctatgctacttacttccaataccctaccattgtccttttagtgatgaccatacccaggcgatctcgatgcccaagatttaaggtgcaggaaatcccactggagttcagagctgctgctttttttttttcctccaagagaaattgttgaagtcaaacttgaccaagttctttctgcaaactggatgccttcacatgcctgtctccagatccatgcttcaaggctaagtgttattaataaaagtaatgcagattgggaggccgaggcaggcggattatgagatcaggagttcgagaccaccctggccaacatggtgaaacccctctctactaaaaatagaaaaattggccgggcgtggtggcgggcatctgtaatcccagctacttgggaggctgaggcaggagaatctcttgaacccaggaggcggaggttgcagtgagctgagattgtgccactgcactccagcctggtgacagagcgagactccatctcaaaaaaaaaaaaaaaaaaaaaagccatcctggctaacacggtgaaaccccgtctctaccaaaaatacacaaaaattagccaggtgtgtggcagacacttgtagtcccagctgctcaggaggccgaggcaggagaatggcgtgaacccgagaggtggagctcgcagtgagccgagatcgcgccactgcactccagcctgggtgacagagcgagactctgtctcaaagaaaaaaaaaaaaagtaatggagaagctgaaggttacccaactcgtttcctgggcttgcttctctctgtcacagttccctgacaatgatgaaagcctgttctttccagccctcggcctctgttggtcctcactttgcaaatgtctttcccaatcttcacccacaccagaaactccacgtctccccatgagagttcccaggacaccccgtgagccgtttgcaagagagtgtatcacctttaactcgcccctgtctgttgcaggaaacaggggtcagactgttctacgctttgagcacatggcctttgaggcttctcacttgatcctcagagctaaatgctctcagatcagaacagcaaaggacttcggcctcagacccagcaagagatgttgtcattgcatacaatcagccaggaatgccttcattcattctacacatctttattgacacagcctggccctgaagtcaaaagaatgagaaaggaggaagacaggcttggtgcctgcctccctgtgtttagaggttagcagaaaaagaactaaatcagggatgcattagaattatggtattacgccaccatggaatactatgcagccataaaaaagaatgagtttggccgggcacagtggctcacccctgtaatcccagcactctgggaggctgaggcaggtggatcacctgaggtcaggagtttgacaccagcctgaccaacatgctaaaacctcgcctccactaaaaatacaaaattagccaggcatagtggtgcatgcatgtaattaatcccagctacttgggaggctgaggcaggagaatcacttgaacctcggaggcagaggttgcagtgagccgagatggcaccactgcactccagcctgggcaacaagagagaaactccatctcaaaaaaaaaataaagaaagaaagaatgagttaatgtcctttgcagggacatggatgaagctggaagccgtcattctcagcaaactaacacgggaacagaaaaccaaacaccgcatgttctccctcataagtgggagttgaacaatgagaacacatgga

SEQ ID NO: 11416 - DNA, 6000 bp, Homo sapiens
tcccaggttcaagtgattctcctgcctcggcctcctgagtagctggggttacagatacccaccaacatgcctggctaatttttgtatttttagtacagacagggtttcaccatgccagccaggctggtattgaactcctgacctcaggtgatctgcccctcagcctcccaaagttttgggattacaggtgtgaaccaccacatccggcctttattgtctaatattttacctttatgaaaggaatgttttggccagctggaatagaccttgacagtgtagatcatgtgtgtggtctctagggaaggtgctatttcttacattccaggatccagtgccctactacttgagcatatgtactgcttgcattatttattacattgttaggagttgcaatcactggaatgcttgaaaaaacatcatggtctttggcagggcacagctgtggtcacttcacaaagcagtttcctaaagagtgctgtggcctgtccactttctagttggcaaagatcccaagttcttaggtattgattgattcatagggagcagggatagaaatctaccttctttctgctcctttaaaacaagtcttttatatgccatgccctttgtactgtgtctgacacatggctgtcactcaatgcttattaaacgaatgagtacattaatatgtcaattctgcctcaaacaaatccaacatgtatccatgactctacagtccatcattcctgctctagctaaggtcattatagtccaaactttctttcaatttttatccacactacagatttttgtggtttccttaagagacctgatcataagccacactttcttaaaaatcaccaatggctctctaatgccaaactctttagagaactttgacttttttttctagctccatcttgttttataaactgtccacttgagcctggtccctgaacaggtcctcatagtcacagttctggtacttttccaatcccattcctccatgtacttttgagtaccctttctcacacatcttgtgaaatttcacaccccaaaccctcaaacaacacttcctctctgacttcctggccccataacaagtactcctttactctgtccccatagtattttcaacatatcctagagaatttagtacatttaattgcacttcagttgtttacttccactttagacttaagaattccttagagcaaacattcatcttttcacaccaaactattataatgcttggtacttaatagtatcaagtactacatgaccttaatagatgctcaaaaagcttaaattccatttctaacactagacatataccactctacactaaactggaagcaaatcacagcctttctactagaaaatgtattctgacttagtaaagcaatctctccccagagaaccacccccatacacttaattttgcattcatttcagggtgttcatgaatgccaataaccaaattccaccccaacaaacactgtggctgtaaattgagattctcttctcaacaaatacgacatttggcatggtagaaagagatcagactgtggctagaaacatcaagttttaataccagctcctacacttagcatgagttaatatttaagctccaggactcaaattccaaatttttaaatgtggtgaatacataccgactttgctagttttgctttattgaaaactgataaagtatctagcgcaatgtagccatagaagtgtatttttaactacaacttgtgtcatggaattggcatggaatattctgtcaccatctcatgaaagtaaggtaatgcagttgtcacttgccacttgcaaatgaaacatgaaaatagtatttattgttcaaatacttataatatgggggctttctgtattgaatttttaaaatcttttacataatcctttttcaattcattcaaattagtattttaccttaagtgtcctggttttatcttatagtagtaagattgttggctttcttttcacaaaggtctaccaatgggttcatggcactcaaataaccataattcactttctcatttcttctgtattatgtactttttgtaaaaacacctatcagactgcacctgacatacagcaaataagtttttcattaatggttaaccttagaatctaaaattgattaccaacgactacctcccagcctaaaccatataaagcaatacaatgaaaaacaggcttgaattttctccagatatttaatgcaagatgcaatgtagccatattccatgaaatgtggttagcagtaggggagttgtagccctatcgaatcaaagtattacaatacagctgaaagctttatatagacgtatttcggttcttaattgcactaatgcagacagtttgatagataagcttctctcttgtgctttttctactttgggaggttatatactttagatgagagacaaagaaactctactggtttaagagttctcagttttacttttactatagaccttttttcccaccagtttagatgggaagacccagcctttggtataaataacttacttccacaaaaatatttaaagggtatctttagtgttcactgtcagttgtgtagtcttttggtaagggggtggctagagcctctttactctcagtaagtgctctgggctgatggataaacacactaaatttaacaccctggttgtttgcagctctgacaaaaccactattagcagtcattgtgatggcttttagggtgtctcccgtcccaaaaattgttaatgagcggctattaatttttgaactggccactagtctcaaggcacgctcagaaggctggtctggtaccacattaattcgcttaattaacacagtggccctctctctctccccaggtcctcctaaggtatctaaaatagactgaaagtccttgacagcagattcacaagcaaacaactccttgtccttcataaaggcctccagctgaggtagaacctgctctttcctctcttgctctgcttgttctgtgagcactttctctttgaaaataaagtggcagcctccatagctgagggcagatacatatgtgattaaagtagtaatgtccagatttactcttttgcacacatcgaccttaatttctgttggaaacgcaacacttgctagtatattttctcggtcaactctggtcacctgcaaaagttcagggccctcatcatctgattcactctcacttggttgaagctcttcagggtgatctaacagagcgttgactgctactatgtctcctctcacagatatgcccatttctttcagcttctctgccatggggctggagacactgttgtaaaatgcaaagatgatgtgagggttgctatactgcactggctgctggtgactggcctggaggaagtcttcagcctgctcaatgatgcttttgtcaccatattggcccctgcccagccagatgttatgaagagcttcagccttccggccaatggctttcacccaagtatgaccaccatttgcaactacatctaccacaagggtttgcttttctcctaaggtatctgtataaccaaagacatgaagaacactaacaacttcttccaggttttctgctgattccacaatggctctcaggtgtgttaggttagtgctctgtaaatgagactctttaatagctactttcccagcttctactttctgcaagaattttaattctgccttcaatttgctgcacagctttgcaccaccttctatgccaccttttcttgatctagaaagtgattctgctctcttgatcagttccttggctatggcgattcgttcacagagcatggaatgtgcagacatgctgtcagcattattcctttcctagggaaagaaacaaggcaaacttcagtagtctcctaaaattatgacaatcaattcttcactggtgattaaaaacttcaatctagcaacacagcttatggagggtgagtctatgaacccgggcttgtgtatgtctcattctggagtgactgcttcctctgatagctaaggaaaggatggcagctacacttttgaactcttctttaggtacgtctgacacactttagaccttcatttcttcagcttgaaagccatggggacacagcatggtcctaggttaggatacaatgcaagagttgggcaatctgctatataaataattcccttatgtctatcagcggcctgtttaactgctgagaaattttaataaaggcgacaaaaatgccgaaaacaaaaatacacacagactggctagttagcaaactgtccaaagcaagtgtctgtcctaaactgagcacttcagcctccctaaccttttcctccttcccgagttggtctccttcaaccggctgcctcatgatttcccccgaggcttggggtacttacgccaaaaaaaatcaacactgcctcatttctgcatttgacgtcaacccagactattttaaaagaccgaagaagaccaccaacttgcgtcccactcccactccgactctgaaggaaaatccgaagatgaaactaaactccaaggctgcaacccgcggcggccgtgcaagcggccccagcgcaggtcgccgggtgggcgggccagaggccggcggggccttctcggtgggctgcggggccctcggccctgcccggccacctgcacagccgggccctgccaggaggggccggggccgaaaagcccccaccgccagcgccgcggctcagggaccaggcgctgatagcgcgcggccgacccccttcccgccgggccggccctgcccagccccctctggcctcagaagaggcgccccgctcccagcctccccgcctcgctccccggctcctcaccggcagcgccagaaccgcgagcgcgagcacgcaggcgcgtgcacgcagaggccgggacccgccgggaaatctcaaccgggcagcccccaccccgctcgaacgccgaggcggctccacccgcgcgagccccgccgcctcgggcacctcctgcatcacgtggttccgggccgggtgacgccaaacctgcgattcccaagcggcagcgcggcctcccgagccgggttgacgctggcgtggcggccatgtttattgagggcacctggcttctcccgcttgcgccgccgggtgagcctgaaggcgcgcacccacctggctccaggaagagggaccgagctcgcgtgctgggcctcactcccactgggggcgtcggccactcgatcgcaaccgggtcgtaggcattttgggggctcattttaacagaagaaacgctggagaagcttgtcagaggtgacagctgagaagtactgcctctgggacttctgcctccaagccaaagcactttccactgcattgtcctgggccctccaaagaaagtgtgctgtccttctgaagagaagaaatgattgcatggcttccgaggggctgccatattcatattactgtagtagagtgtccagagtcacccagaaagattagggctgtaagaaagtaaagctaatttaaaatattaaagaggacttccagttataattaatcctgtgtatcctgctccttctccaaacttaacagtaaagcaatgctccttctccaaataacagtaaagcaatgacaaagggaacaaacaaaggcaaaaagaacaagagaagagatgactgcagaccggttataccaacacatttttggaggacaagagcaataacttattcagtccttacagcgtgacagacattgttctaagtgttttacacattgttcactcctttaaacaacctaaaaggtagagatattaagtatgctttacagataagtgagccatagggaggttacctgaacccaagcaccctctttgcagatggtgtcaggagaactgagcaaactgcttgtagaaggggatatttagccactgattcacaaagcagaaccccagaaagcttcaggtgccttgaaggtagaagggagggcagtaaattgttcaggcagaagactagtttaagatgc

SEQ ID NO: 11417 - DNA, 6000 bp, Homo sapiens
ccgcatcgctctcatagtagaagacggtgaaggtctccttgcaggagcgcccagcccgaggcagggacaggcactcgagcatggtgaagcgcagcgtggcgtacacgtggacggcgccccgccgtgggacccaacctgtgcgaagccagtgggcctggcccggggcacgctgcacgtcacacacttcgtaggtgcgcacgctgtgctgttcctcatccaggccgctcagttcctcccactgtgcagagaaggaggtcagcaagggggctggggagccgccagggagagggctgcatggggtgaatcctataaagtgagagggactgagaaaggggggctgctggtactgcgaggagggcgcctctgagaagggctcagacgacactgctggggctgctgtcatctggggggacaggggagaggagtggcacacagaaagcaggcggcacaggcgccctctcctccctcagtttccctccagagctccagctcctgggtgcagctctcacctgcccgtccacctgagggaatgtcacccacttcagatcagcagtttccaattttgtgttcagcagggtctctgagacagacagagagacagagtcagtgcctggggtgggggagggaggtcaggaagaccagatccctgggaaccgaggcaggtggatcctcttagctctgagctagaggagttggggggccaagaggggagcaagccctgccctctgcacccgcctgatttctggcctcttctgctaagtgccaaccccacccccaacatctggtaggcatggggctcccttgggataccccagatctaggcctccctggaggagggagggagatcaaaatgtacggggagaaggggcggcagctcagaaagggttaaaatgagagctgcgccctggtcctgacccccacgagcagaggctgctggtgtgggaggggaacctcttgtctcagcctccacgtttcctcccctaagtcccagaatcagcctctctaccccacaatttcattccctgtccaagacccctctctgctttcagaccaaacaccccgtccttccctccttgaagggagcgctccgtgcctggggcatagccctggcccccatcccagtacctccctccccacgagtgccctgatcaggaagcactggaggtcgggatgctagggttcccaggctcccgccgaggcctcacatctggatttggttatgggaaggcagaggggaggagattctggggggcggtatgaatgggaggggtgaacacacctggcttggctcggatcatcgggggaggggacaggcactggaggaaggggggggattaggaaaaactgcacagcccctggcagtggagagtggaggagggagggtacaggaatcccctcgggggccggcaatgtggggggcattgggcgctgggaagggtggagaggggagccagaacacctggctcccaccccatgggagctgcaggagagaagagaaagagggtgggtgaggcagcctcttcctggggaccaaatgatgtcctccagctaggggtcagatgggaagccagccagcctgaggtgagaggcgcaaggtccccatgggtggcaagagacagccctgctcactggggacaggatgcccgggttctgggaagggggtggatagaggctgccgtctccaccctccattgttccagccgggatagtgttttcctgtctccaatttacacactgtctctgcctcgggctgtccgcagcccagagcaagcgcaggctccctttctgcgtcccagctcagctgcagccacgctttgatctgtcagttcgcatgtctctcacctatctctcctccactctctgtccacctccgtttctctttctgacagtcactatctctccttcgctttcggcctccacttctcgctgttcctcgcggcacagggccttggataaactacttaaccttaactaagccccagcctcctcatctgaaaaatgggggcaataatagcaccacccttagcgttgctggatgggtgaaattaatatttgtaaggcgctcagcacaggcctggtgcttggaaacactcaggtaataggtgtcacaatcaccatttcctctttgcgtctttccttctcaccacacctcgtcctcgtggtttttccacccctttggccttcctcttcccctcgttcatggtttttgttcccccttctccgttctctgagctgggcaagcctcccctcactcccaaccccacacctagcctttgatccccagcccagggcagtcctgcccagccagggggagagggtttttctaacgccgctgaatccttccctttgggagtccctcatagcctaccgccccataaccactttcataccagacagagaaaggggggtgttggcagctcactgaaaggacattagggacacaggagagtttctagggctcttggctccccctttaggggaccaggagggacagcgatccatggccaaagaaatgcttggagagaccaggaggtgggagatagactgggttagttagggcgatgtgggggctgtgtaggtcagtttctacctgggggctgtgtaggtcagtttctacccgctcctaggtctcaagggaagcccgggactcacctggggccggggtctagaccgcatttaaagggatggggtgcagcctgtagaaaccaaggagccaccctataccaggggcaggagcagtgggcgggagagcggtttgggggtttgctgtgtgaatgcaaaggaggccatcctgttgcaggagtgtggaactggaggatcaaggtgtgatcgctaaggaattggcgctgggggtcgttttagggcctagcacgaaaagttgtgccttgtctgctgttgcttctccagaaaccttccctcatgtacggcgggaggtgggactgggacagaaactttgcagatagttttgaatagtggggtagggaggaaaggaaaggcagccaggggcgtatgtaatcagcagtgagagttcggggagcccgggcaggggaatgtcccgggtcgtagccagactccatctctttcccaaacaaaagaaaactccactacccgtcgggcgcctcttccccgcccccctcccgttccagcactatcggtccgaagtgtttgggactgcagtgcccgggtaggggtagtcagaggccggcccctccactccgaggcccagatgttgggggggaggtcccaggagtgacggggtgcgcccccccccgcaaggaaactcaccttccaaagctgcggccaacgaagcccagcagagcagcacccggagctccatggcgccgcctcactcgggtaggatccgaactgagtttggggggccctcgcccccccaggtctgactctccctgggcgggtggacgccgatactccgcgcgggactcctcgtcggggccctcagcgcgggcccatgcgagcgtgcggggcaccgggcggcggcgccaagtgtggccccgcgtctgtgccgcgcgcgcgggcggcgggcccggagcgtgctggcagtggccgcgccgggcgggcgcgcagcaagacgtggctggagttggggtccctccggggcctcggggtcccgccccgggtggcgggggctgagccggccgctcgcggtctccccccctccctggagtggctctgctcgcgccgccgggccgagtgctctcctcgcgggcggggatggtgggagcccgagcggggacggagcgggagggagggagactgcggcgcggagccgggcgggccgggccgggcaggggctgagctgcgctggaactgggccgggcggcgccgggcccgggagggaggggcgcgcggggggcgggggcagctctcccaacgcgggggctccgcgagtgagccccgggcgcgctgattggagctcacgctactgaataattcatgagggaagcggagaggggcaccgagtggagcaggtcgggaagttgagagaaagtttggagaagggggaggggcggcgggtgaggaaccccgggaccgcccagatgtgcgccgtggcggtgcgcgctgtccaggaccgagcatgtcggggctggggcccagggacccccgggacaggcccgaacccggctggcaccagggagcagagaaaacacacacccagcagcaacacggagggccgcccaggcgtgcacgtaaatgttcaccgcgcacacaaagcccgctctgaccttgctgcggactctagatgccgctcttggatgcgcccaccaccctctagtgggcgcagggactgcgttttgggggaaaaggaaggaaaagggagtagaagctttggagaattgacggccgcccagggggcctcaaggagcaatcccagtttggatagccttgcagcgaacgttcacacagtcaccccataaacattcagtgttggggacctactgtgcgcgcaaccaagccctgaaaaatgtccagaggaggcgcgcactaagctgcgctagggagtagagaaaaatcgaggaaacaacggtaaagaaaaggtgggtgtggcgggcgcggtggctcacgcctgtagtcccagcattttgggaggcagaggcaggcggatcatttgaggtcaggagttcaagaccagcctggccaacatgatgaaaccccgtctctactaaaaatacaaaaattagctgggcatggtggcgcgcgcctgtaatcctagctactcgggaggctgaggcaggagaattgcttgaaccgggacctaggaggcggaggttgcagtgagctgggagctgagatcgcgccactgcactccagcctgggctacagagtgagacgaaatctcaaaaaaaaaaaaaaaaaaaaaaaaggtgggtgtgtccgagagggtgaggggtccggctagatctccaaatcgcccttctcactctcactctcgtgttttgggggggcttccccgccgcccgcagccatgacccctgaggctggggctgcggctgcggctgctgtctttcctgagctgtttcctgtctggctcctgggggccctcgggatggctgggaggggcccttcctctcactgccaactcccctcaccctcccatcagttagcggggagggtccagcacagccgtgctcctcccaccaacccccttctacttcagggaacttaacagtatgggttactggatagatggattggagggggtgctgctccaggagtcagcccctccaaggggcagaaggaaaggacttagactcccacagtaattagcggggacagattttttttttttttttgagacagagtctccctctatttcccaggctggagtgcagtggcgtgatctgggctcactgcaacctccgcctcccaggttcaagcgattctcctgcctcagcctcccgagtagctgggattacaggcacagggcaccaaccccggctagttttcgtatttttagtagagacagggtttcgccatgttggccaggctggtctcgaactcctgacctaaagtgatccacccaccttggcctcccaaagtgctgggattacagacgttagccaccgcgcccagccggaggacagaatcttgaggagcccagcaagagagacgttggagcccagcaagagagacgttggagtccaggatgcttggggggctgccaagcgcccttacgtcccagaaaggacagccgggcctgtgataacctcttgtcccggcttacttatcttcctgctgcaagaggtgttccccacacccctgcccttccttgctgttctgcctgggtcctgcgcccgggttggggggggtgggccggtcaccgagggcaggaaacagccggcttcactggagccaggcagaccaggctggagctgggaattccctcctccctccccgatgcaggcccagtctccccttctcttattcagcttctccctcggggttctctgcaaccctctcccaaacccctgccctgccttt

SEQ ID NO: 11418 - DNA, 6000 bp, Homo sapiens
atgttacctaaaatgcccggttttcaacaagaagtaagacataaaagaagcccaaggaatgtatggaccatgcacagaaaaaataaatagcagccaataaaaagtgttctgagtggcccagttgttggactttgtacacaacaactttgcatcagctgttttaaatattttctcttttttttttgccaactaaagaagacatccaatataaatattttcaaaggactaaaggcaactatgtttaaagagttaaaggaaagtatggcaactacgtctcactaaataatgaatatcagtacaaaatagaaataatagaaaagagctaaatagaaattctggagttgtaaaatatagtaacttcagtaaaaaaattaaaacaaatttgagttggcagaagaaagaattagtgcatttgaagaaagaccactagagattatctagtccaaggaacagaaagaaaaaagaatgaaggaaaatgaacagtctcagagatctatgggtcaccatcaagtataccaacataatggtagtttcagacggagaggtgaaggagagaggaagaaaaaaactatttgaagaaataatggctgaaaattttcctattttgatgagaaacatatttactcacccaaaaagttcataaaagaagttctatgtagaacaaacaaaaagagatctaaatgtaaacatatcatagtcaaactgaagaaagtcaaagagaaaatctcggctgggtggagtggctcacacctgtaatcctagtactttgggaggccgaggcaagcggatcacctgaggtcaggagttcaagaccagtctggccaacatgatgaaatcccatctctactaaaaatacaaaaattagctgggtatggtggcgtgcacctgtaatctcggctacctgggaggctgaggcatgagaattgcttgaacccaggaggcgggtgttgcagtgagccaagactgaaccactgtactccagcctgggcgacagagcatgttaaaaaaaaagaaaaaaaaaaaaaagacagagagagagaaaatcttgaaaacagcaagagaaaaatgatttatcaattagattaacatttgacttctcatcagaaaccatgagagtcagaggacagtgaaatgacatattcaaaatgttgaaagtgttgaaagaaagactgtcaactcaaaattctatatccaatcaaattatttttgaaaagtgaaggagaaataaagacattttcagataaacaaagactgagataattcattgttggggacatgacttataagaaatataatgagagtctttcagattgaaaagagaggacactagactagcaactcagatccacatgaagaaataaaccagcaaaggttattgtacaggtaaaagataaaagacaaaagatagtataaagatatatttttaaactcttttcttcccctaactgattttaaatgacaactgaaaaaaacaattgcaaaatggtgttataagcttttagtgtataaagttgtaatttatatgacaattatagcacaaaggagtggggagagaagatactatactgaagtcaagtttctctatactattgcaataaagttaagattaagttaaaatatgtaatgtaatcctcaaagctagtgccaagaaaatgacttaaatatttagtaaagataacaaaggaaaatttaagaaatattagaaaagaataaaaatcccaaatcaacaacctaggattttattcaagaatcctaaaaataagagaaaactaaataattaagattagaactgaaaccaatgacatagacatagaaaaaatatggagaaaatcagtaaatccaaaagttggttttttgagaagatcaacaaaattggctaacctttttattattgaaaaagaggaagaggagacacagatcatcaaaattaataatgaaaaagtggtattactattgatctttcagaaagtagaggattaaaagggaatactaaaaataactttatgccaataaattcaacaacatagatgaaatggatgaattactagacagacacatattactaaaactgactcaaggagaaattaaaaatctgaatagaactatgagaagtaaaaatatttaattagtaacttaaattagtaatttataaacttctcacagaaaaagcccaggcccatatggcttcattggtaagttctactaaacacttaaagaagaattgacaacaattcttcacaaactagtctagaaaatagaaaaaagagtaacagttcccaactgactgtatgaggccctgatacaaaagtcagtcaaacataccacaacaacaacaacaaaaaaacgaaactacaaacccacatctcttacgaatatagatgcaaaaattatcaacgaaatactagcaaactaaatccagcaaaatctaaaaatggttagacactatgaccaagagggatttatcctaggactacaaagtcgatttaacattcaaaaaatcaactaatattaatagaagaaaggacaaatgccacatggtcacttcaatagatgcagaaaaagtatttgacaaaatccaacgtccattcatgacaaaatactctccataaacttggaaaagaagggaatttcctcagcctgatagaagtcatctacaaaaaaacctaaactcatagcaggcgaagatgtgtacacttgccacttcttttcaaaacttgctggaggttctagccagatcaatcaggcaaaaaaaaaaagaaaagaaatgaaaggtatctacatttgaaagcaagaagtaaaactgactgtgtttgcagaagacataatcttgcatgtagaaaatcctaaagaatatacacacacacaaatatacacacatacaggctgttagaactaatgatcaagtataacaaggatgtactatacaagatcagtttataaaaatcaattgtattttgcctgaacccaggaggtggaggttgcagtgagccaaaatggcaccaccgcactccagcctggtgacagagtgagactccatctcaaaagaaaaaaaaaaaaaccaattgtatttttatttacaaataacctgaaaatgaaagtaagaatacaatacctcttacaatagcatcaaaaagaataacataagtaagaataaatttatcaaaagaagtacaaaaattgtatactgaaaattatgaaacattattgaagttgccagccaagataaacttagattctttcattactgtataccaaaataactcaaaatgtatcatagactttaagggttaataaaataaaaatcttgaagaaaacctaagagaaaatctttgagaccttgggttaggcaaagatatcttagatataacaccaaaagcacagtttgtaaaggaacaaaaactataaattggacttcgtcttaacttttttgcttcaaaagaaatcattaaggaaaggaaaagataagaacatatttggaaaaatacttgaataataaatgctgttcaaaagaagttcaaatcaaaaagttgttcagaagagaaggaaagctaatgtgatagttcaatgagtcgtggaagaaaaagctttgaagttagaaatatgcattcacatttcagctgagccatttcctacttttttgctttgggacacaattttctgagcctggggatcatcaggtccacaggattgaagggttgcttgatgattgtggttagaggtaagctcttaacaaatgatgactattattgtcgtaataatacatgatatggtcttattaaataagataatgcatgtaaagcacctagtagttccttgtgcatattaaatattcaaaaatgttatctattattaatcactaagttattatatcagaatccaaaaggaaagctaaagtatgatcatgccccattttaattctctgagtactgtaaaccgaaaaatatataagaatttccaagttttaaccaatggaacacttgttttaaagcgatagtcagctgggcgtgatgggaggattgcttgagcccaggagttcgagaccagcctgggcaaaatggtgagaccccgtttctacaaaacataaaataattagctgaggccaggtgcagtagctcacgcctgtaataccagcagtttgggaggccaaggtgggtgaatccctggagctcaggagttcaagaccagcctgggcaacatgatgaaaccccgtttctaccaaaaatacaaaaaattagccagatgtggtggtgtgcacctgtgatcccagctacttgggaggctgaggtgggaggattgtttgaacctgggaggcagaggttgcagtgggccgagatcgcaccactgcactccaacctgggtaacagagtgagacactgtcttaaaaaaaaaaaattagctgggcgtgatggcacacacctgtggtcccagatacttgggaggctgaggcaggaggatcacttggaggaggaggtgaaggctacagtgagctgtgttggcaccactacactccagcctgagtgacagagtgagactctgcctaaaataataataataacaaagaaatagtcaatcattgtaagtcagtaatacgacaggagaaattggaaatccttcagggtgaagattttattttagtaacatgctttattttagcacaaatgcataccatggacttgctggggatgggttggggagggatgatacagtcgttatagaaaatcatatcatattttattcattatgcttattcattcatcacatggtcactttgaattcttaccattccttatatttccaagatcaaatttgtttcttattatgctaatatccctataaattcccagtctccaggaggtctgagttggttctattatgacttattccacctgccaggggagaaactgttcctgagaaatgaagggactttcccagggcttcagggttagagagtggctggttttagacaaaccggtgctacccatactgttaacccaacacaggcatgcttataaggaaaggttaaaaaaagtaaaaggaactcggcaaatcttaccccgcctgtttaccaaaaacatcacctctagcattaccagtattagaggcaccgcctgcccagtgacatatgttgaatggccgcggctttctacgtctctaggggctgtggagaatacgtgagaagaccgcatcccctgctcacatgcagggcataccctacagtggagctgtatggggctgcctggaagccccctcaccccaggtagagaagtaactgactccatgactcctccagtagcagcctccaatgtgcagggaggagaggcactgagcacctgtgccatccctggcctctcatccagaacccagccccagggatgggagtgctccaggcaataagtggagaaaagcagttaagttaaactccctgggagaggctggggcaccgtctcagccagctggggctcatatgatggaatacaatagctgacgtggcttataaacggtagaaatttatttctcacagttctggaggctgaaagccccaggtcagggtgccagcactgtggggtgactggtggggacctgcttccagctgggagacggtcaccttcttgtgatgtcctcacatgatggaggggacaagggagcgctctcgggccttttttatgaaggtgctgagcccattcatggtggctctgccctcatgacctaattagctccaaaggtctcacttccaaatatcatcaccttgggggttaggattctaacatgaattttagtccataatgggcatttctctctctctctctctgtctctgtctctctgtctctctctgtctctgtgtctctctgtctctctctctctctctctctctgtgtgtgtgtgtgtgtgtgtgtgtgtgtatgtgagagagagagagagatacagacaaacagagatggggagggaccaggagatactccttcccattgcatcactgatccatgcacagtcttggctcc

SEQ ID NO: 11419 - DNA, 6000 bp, Homo sapiens
cacttgtagggcaggtctggtggtaatgaatttcctcagcatttgcttgtctgataaggattgtatttctctttcacttttgaaacttagtttggccagatatgaaattcttggtttgagacttttttttccttaaaaatgttgaatataggaccccaatctcttttggcttgtagggtttctgctgaaaggtctacttttagcctcataggattccctttgtagatgatctgccctttttctctagctgcctttaacattttttcttttatttcaaccttggagaatatgatgagtatgtttcttggggatggtcttcttgcatagtatctttcaggggttctctgcatttcctgaatttgaatgatgacctttctagtgaggttgggaaagttttcatgttatatcctgaaatatgtttcctaaatttcttagtttctccccttctctttctggaacactaatgagtcatggatttggtctctttacataataccgtatttctcaggggttttgttcattcctttcttttctgttttttaaaaaaatttgtctgactgtcttatttcagaaagccagtctttaagttctgagattatttcctcagctttgtccattctgctgctaatacttccattcttgtgctgattccttctcatctgtgtaggctgatattccttctactttgaagttgccatctttggatggatttttttttcttctttcttctttgatgcccttgggggttagattatggtatatggtaggcttggttgattggttttgattctagtctgctcttggatcttggaggagtcccatccaattactgtctgtgccaacatttcttcttttgagtgttctggtctatggggctccatcaggcaggggccacagttggcatacaagatgtatccttgccaggttggccttaatctgctgtctgtgtgcttcccggagaaacacagggttgcaccccctacagagttctggcaaaagtgggactgctgggttggaagctctcacaggtgtggcctgtctggctgtgggaggtaggggtgggtgaaattgcctaccctgtgatcacagggtgtccagggcaacagggggactgtgcctctctgcaatttcaggcagaagtaggactgctgggccagaagttctagcaggcatggctcacctggctaccagcagtggcagtgggtgcaaacacctgtcctgccatctaggtgcttcctgggacaacaggaggctgcatccaccagctgaattcccatagaagtgaggccactgagccggaagctctagcaggtgttccctgcctggctaccagtggcagaggtgtggggtcacgtgtgctgctgtccaggtgtttactgggacaacaggaagctgtgccctatagctgaactcacacagaggtggggccactgatccaaaaactccatcaggtgttgccttcctggctaccagtggcaggggtgggtggggtcacatgctctgccatatacatgcttcccaggacagcaagaagctgctccctctagttgagctcacatagaagtggggctgctgggctcaatgttctagaaggcattgcctgcctggctatcaatggtggtgtaagtggggtcacgtgctctgccatctgggtatttcctctgacagttggcagctgcaccctccagttgagttcacacagaaacaaagccactggaccagaatctctagcaagagttgtctgcctggctatcaatagtgtggttgggtggggtaatgtgccctgccatgtaggtgtttcctggaacagcaggaatctatgccctccagcagagttcacacagaagtggcctactgagccagaagctctagcaagcatcacctccctggctatcaataacagaggtgggtaggatcacatgcccagctatccaggtgcttcccaggacagcaggaagctgtgctctctggctgggttcacacaaaagtaggtgtattagtccattttcgtgttcctgataaagacatacccaagactgggaagaaaaagaggttttattggacttaaagttccacatggctgggaagccctcagaatcatggcaggaggtgaaaggcacttcttacatggtgatggcaagagaaaatgaggaagaagcaaaagcagaaacccctaataaacccaccagatctcatgagatttattcactatcatgagaatagcatgagaaagaccagttcccatgattcaattacctccccctggctccctcccacaacatgtggaaattatgggagatacagttcaagttgagatttgggtggggaaacagccaaaccatataattctgctcctggcccctccaaatttcatgtcatcagttttcaaaaccaatcacgctttcccaacagtctcccaaagtcttaactcatttcagcattaacccaaaagtccacatttgatggtctcttctgagacaaagcaagtcccttttgcctatgagcctgtaaaatcaaaagcaagctagttacttcctaatatgatgggagtagaggtattgggtaaatacaccattccaatggaagaaattggccaaaacaaagggcttacagggcccatgcaagtctgaaatccagcagggccatcaaattttaaagctcaaaaataggccgggtctggtggctcactcctgtaatcccagcattttgggagactgaggtgagcagatcacctcatgtcagaagttcaagaccagcctggccaacatggtgaaaccccatctctacaaaaatagaaagattagccgggcatgatggtgggtgcctgtaatcccagctattcaggaggctgaggtgggagattcacttgaacgcaggaggcagaagttgcagtgagccgatattgccccactgctcttcagcctgggtaacagagggagacaccatctgaaaaaaaaaaaggatcacctgtttttttggggctggcaaaatggctaaatagggacagttcaggtttgcagcttgcagcaagatcaatgcagaaggtgggtgatttctgcatttccaactgaggtacccaactcatctccctggttagacagtgggtgcagcccacagagggtgagccaaagcagggtggggtgtcacctcacctgggaagcaaaaagggtcagagaactccatcccctagccaagggaagctgtgagggacggtgccatgaggaatggcgcactacagtccaggtactacgctgttcccatggtctccacaacccacagaccaggaaattccctccagtgcctatgtttctggaattggtgggttcttggtctcactgacttcaagaatgaagccgtggaccctcacggtgagtgttacagttcttaaaggtggcatgtctggagtttgttccttctgatgttcggatgtgttcagactttcttccttctggtgggtttgtggtctcgctggctttaggagtgaagctgcagacctttgcggttgagtgttacagctcataaaggcagtgtggacccaaagagtgagcagcagcaagatttcttgcaaagagcgaaagaacaaagcttccacaatgtggaaggggaccctagcgggttgccactgctggctcgggcagcctgcttttattctcttatctggccccacccacatcctgctgattggtagagccaagtggtctgttttgacagggcgctgattggtgtgtttacaatccctgagctagacacaaaggttctccacgtccccaccagattagctacatacagagggtccacacaaagattctccaagtccacaccagagtagctagatacagtgtagattggtgcattcacaaaccctgagctagacacaggatgctgattagtgtgtttacaaaacttgagctagttatagagtgccgattggtgtatttacaatccctgagctagacataaaggttctccaagtccctaccagtcaggagcccagctggcttcacacagtggatcctgcacacgggccgcaggtggagctgcctgccagtcccacgccatgcgcctgcactcctcagcccttgggtggtcgataggactgggcaccatggagcagggggcagcactcattggggaggcttgggctgcacaggagcccatggagagcgggggagactcaggcatggtgggctgcaggtcccgagccctgccccatgggaaggcagctaaggcccggcgagaaatccagcgcagtgccagtgggccagcactgctgggggacccagcacaccctctgcagctgctggcctgggtgctaagctcctcattgcccggggccagcagggccagcctgccgctcccagtgcagggcccgccaagcccacgcccacccggaactccagctggcccacaagcactgtgcgcatcccaggttcccgcttgcacctctccctccacacctctctgcaagctgagggagccagctctggccttggccagcccagaaaggggctcccacagtgcagcagtgggctgaagggctcctcaagtgccaccaaagtgggagcccagggagaggaggcgccgagagggagtgagagctgtgaaggctgccagcatgctgtcacctctcacctacgccacaagggccctgggtttcaagcacaaaactgggaggccttttgggcagacaccgagctagctgcaggagtttctgtcataccccagtggcgcctggaaagccagtgagatagaactgtttcactcccctggaaagggggctggagccagggagccaagtggtctagctcagcagatcccacccgcatggatcccagcaagttaagacccactggcttgaaattcttcctgccagcacagcagtctgaagtcaacctgggatgctcaagcttgatgggggtagggacatctgccattactgaggcttgagtaggcagttttccccagacagtgtaaacaaagccactggggagtttgaacttggcggagcccgctgcagctccatgaagtcactgtagccagactgcctctctagattactcctctctgggcagggcatctctgaaagaaaagcagcagctccagtctggagcttatagatcaaactcctatctcccagggacagcacctaggggaaggagtggctgtgggtgcagcttcagcagacttaaacactcctgcctgccagcactgaagagagcagcagatcctgcagcacagcactcgagctctgctaagggacagactgcctcctcaagtggatcactgacccctgtgcctcctgactgggagacactttccagcaggggtcaacagacacctcatagagaagagctacaactggcatgtggcaggtgcccccctgggattaagcttccagaaacaggaacaggcagcaatctctgcttttctgcagcctccactggtgaaacctagacaaacagagtctagagtacacctccagtgaactccagcagacctgcagcagaggggcctgactgttagaagcaaaactaacaaacagaaaggaatagcatcaacatcaaccaaaaggatttccacacagaaactccatccgaacttcaccaacatcaaagaccaaagaccacagagataaggaaaaaccagtgcaaaaaggccgaaaattccaaaatccagaagacctcttctcctccaaaggatcacaactcctcgccagcaagggaacaaaactggatggagaatgagtttgacgaattgatagcagtaggcttcagaagatgggtaacaaactcctctgagctaaaagagcatgttctaacccaaggcaaggaagctgagaaccttgaaaaaaggttagaggaaatgttaactagaatagccagtttagaaaagaacataaacgacctgaccaagttggaaaacactcttcaggatattatccaggagaacttccccaatctagcaagacaggccaacattcaaattcaggaaatacagaga

SEQ ID NO: 11420 - DNA, 6000 bp, Homo sapiens; identical to SEQ ID NO: 1272

SEQ ID NO: 11421 - DNA, 6000 bp, Homo sapiens
cctcaaactcttgggctcaagtgatcctacttcagctttccaagtagctgggactacaggtgtgcaccaccacacctagctaatttttaatttgttgtagagatggggtcccgctatgctgctggtcttgaactcctggcctcaagtgatcctcccaccttggcctcctcacgtgctaggattactggtgtgagccaccactcctggcaaacctgcaaaactttcaattgccatcaacctggccctggtggctactggtgctaccttgagacggagagcagggacggagggagggttttggccaggtgaggttgatggagtgatctactcagtgtgagttgtccctgaggcaggggcctcggttttcatctggagatgagggcacgaccacccactcccagaggcagtggagagagaggcttaggtgaccaggctgggccaagctggagccctcagaggtggcaggaggtgagtgtggctaaagggagacagggtcattaggaacacagtcaggtgagcacaatcaggcgagcagacggggagacttctgtctggaggggcagacctgccgcctgcaccagcttgtcccccagctggtgcctgccccaagccccatccctgccttctccctcatcatactccaaccccgcctcctcctgagcaggagtcaggccctcagttgccataacaactggatcccgacagtaaaaatagtaactaattttttattcaacatcttttgctcttggagaaacagaaaatccatttctaggcttgagtttcacttcgggggtcccctctgcggccctaaagattccattgccaaggtcggctcgaaggtcaacagcaggctggggccaggaagagggcggcaggccatggaccctggacaggcccagccccagcctcctgggagctgtggttaccagtggctgtctgagcctggctggggcagaggtgtcgctggtacctggggacaggtgtgtcccggtgcagtggacagcgaggcctggacctgtggggtcagagcaagggccatagaagtcaaggtcagggcagatgccatggcatgcagggcttggctttgcttactacttctgtttgacttccatcttctggaggtccgagaaatcaccagagcaggagttctgtgtcgggaaatcagcccagagcccagctgggctccaggacagtcctgcccccataggccctgtgaccttgggaaggtccccagcccatgagcctcagtttccctcatcggcaggaggggataggaggcattcattgctcctatccgaggtctcgcttgttttgtgacttgtgacgcacagcatcccagctgggacacgcaaatgtagatgccagacacgcggcagaaacaaggcttcaagaatgggactcctcctgactatgcaccaatgcctaaaaagtcatttcttctgtttcatttccctcctcctcctcttccttctcctcctcctcctcttcctcctcttcttcttctttcttctttcttcttctcttttcctttttcagacagagtcttgctctgtcacccaggccggagtacagtggcacaatctcggctcactgcagcctctgcctcccgggttcaagtgattctcatggctcagcctcccgagtagctcggattacaagcgtgtaccaccaccccctgctcatttgttttatttttaatagagatggggtttcaccatgttggccaggctggtctggaactcctgacctcaggtgatccacttgctttggcctcccaaagtgctgggattaacaggcgtgagccaccgtacctggcccttgtctttttttttttttttaagagagggtctcactctgtcgcctaggctggagtgcggtggtgccatcatagctcattgtagcctccaactcctgggctcaagcgatcttcctgcttcagcctcctgaggagatgggactgcaggcgcatgccaccatgcctggctaattttaaaattttttgtatagatggggtttcaccatgccaaggttggtcctgaattcttggcctcaagcaatctttctgctttggcctcccaaaatgctgagatcacaggcatgagcagtggcttaccccacctggcttaaaaaaatatagatagataggtggatagatagatagatagatagatagatagatagatagatagatgaggctgggacggaggctgagatcctggaggcagaggttggaaaaccaggagttctcatgtcccagggcagaagagtgtctcagctccaggagagagagagaccatctgccactttctttctttctttctttttttttttttagagggagtctcgctctgtcacccaggctggagtgcagtggcgcgatcttggctaactgcaacctccgcctcccaggttcaagcgattcacctgcctcagcctcccgagtagctgggacttatagtcccaggatggtctcgatctcttgacctcgtgatccgcctgccttggcctccccaagtgctgggattacaggcatgaaccaccgtgcccggctgcatctgccacttctaatccatcatcagggtggtctggtggcctttgcctcctaagcactcctgttccctcttctggtccccacctcagccatcccccaccccaccccccagccctcagccctgccatggcctctgaaggcatctacttataaccctctggtcctccccagtggaagtggcgaaataaattagatggagtcagcaacacctgtaatctccccactttgggaggctgaggcgggcagatcacctgaggtcaaggagtttgagaccagcctggccaacatggtgaaaccccatctctactaaaaatacaaaaatcagctgggcatggtggtgcacgcgtgtagtcccagctacttgggaggctgaggcacgagaatcgtttgaacccgagaggcagaggttgtagtgagctgagatggcgccactgcactcaaacctgggcgacagagtaagaccccgtctcaaaaaaaaaagaaaaaaaggtgaagtcctttgtctttttcccacttctggtcctagctccctgggggcagagggagtgggtggggttatcttctgaatgttcagcaggatctcaaataaagcattactgtattaataaaaaggaataggggctggggcttgggaaggagggtgaagtgtgtgtgcaaacgaagggccttctcttggatctggggaccaatcctagggttcctcaggtgccgctggcatgtctttcacatggaagcctgtcttccctccatcagccccccggggttccaagcctcccatagggtggttggttttccaaagcccagaacctgggccaggtctcctacgggagaaagctggaatttgtactcgggaatccagccaccagatgcaaatgaccctgtcatggcggtcaggagggtcctcagagtcatgaagtcttgggggaagagggttttcccagaggccctgacccttcccgggcaggtcccataggggcccttgtgcctagcagggacgtggcagtagggagccaggcagtggggggagcaagcaagccacaggcaggcggtaggtgctgggcccagctacactggggacgacgggcacagtgtccgctgtccttccagccaagttggggccagcggggtcggtccagccctgtctagccctggagggcttttttctcctcactggaaaaagtactggtggaggatacctgggaaaaaggggctggattgggaagtcccctatccacttcctactccctccaccccccaccaacctcactttccagtccccctaccctcgggtcccccactccccaccaactcctccacttcccactccctccacccccaggtcccccgctccctccaacacccccacttcccactccccccacccccaggtcccccactccctccaagacccccatttcccacctccaccaacctcggagtccctctcttcccactaaccccctcactccccccccaacaccccgacttcccactccctccacctccagttccccttcttcccaccaaccccccacttcctccacccccaggtcccccactccccccaaccccccactttccactccctccaccccccaacacccccatttcccactccctccacccccaggtcccccactccccccaacttcccccactttccactccctccacccccaggtcccccactccccccaaccccccactttccgctcccccacccccaagtcccccactccccaccaacgcccccacttcccactcatcccacgtccattcccactctccttaccccccacttcccacttcccccaacccctccagcaccccctgttcccactcccgtccccttcccactccccgactccctcagccccgcaactttgcattccacccacctggcgcccccgccttcccaatccttcccactccccctactaccacttcccgctccccaccccaccaaccccccacctcctggcttccagggagggcaccgggaaaaggggccggggccagggccgccccaggcctgggcgatgggtggctcgcgcgcgcagccaggaccccccccgtcccgcccccactccttacgcccacttcctcacccccacctctcccacccccccatctccccacgaccctcctccacctcagcggaggcggcggggtcgcgggagggagggggccgggcttaggcgattggcagcgcgagcccgggagcccccccgtgcccccgcccgccccgcccccgccaccatctgctcgggatttggcgtcggcggctccgggcgcctccagctccggctcgggctccggctccggctccgggcgccgaccaggtccccttggcccccgccgcgcgccctccaacctgctgctgccgccgccgcgccccccaggctctgccagctacccgcgctctgagcccggggccagattcccatggaagcgccgcgatgttcgccccccggctgctggatttccagaagacgaaatacgcgaggtgagcggcggccgcggaggtccgcggggagggagggaggggcgcgcggcggcgggggccgcggaggccaccttggttctcgggccccgccgcccggagcgctagaggggatcggcggacccctgacccccgcccgagaaaaccaggacccaggcagcctcgtcttctcgctgggatggagtaaccggggcgcccgcgcctcctcgctgggtgccattgggcaagtcgcttcacttctctgaacctcatttccacgtttgcaaaacgggggttatgcgagtccccgtgtcctgggtcgccgtgaggattaagcgagctggtccttgcagagcactttgcgcagcgcctggagcccaggccagctacgctcgggcagttacgctcggtctctcttgggcactcttgttcatggtaaaaggcgttggtaccacctctgtccacccttccagcaagtcggaggaaagagtaagtgctcttttcagatggagaaactgaggctcggggtgcggtggggggaggcacctgtacatcctggtcttttcatagtgtgaactccgtggtcccctcagaacctccgtctcttttgtaaaatggtgattaacagacattgtgatatctgagtagaagttaggctcctgttgcttggaattccagtgaagaaggtgggcgtggggagggggtttctccttttacatatctttaagattttgttgggagatgtgcttgcctggaagctggcatgaaaaatcccctcctaaagttgctcctcggtccccagtggtcttcggcgagcacagacccgtctgctgggagcagcccgcgggggcctctttggagggggcaccaggctgtcctccaggtcacctttccccctctgccacctggggtcccctgccttcgtgaacagaggggcctggtgtgtgctgaggctccagtgggtggt

SEQ ID NO: 11422 - DNA, 6000 bp, Homo sapiens
acttgaacctgggaggcggaagttgcagtgagccgagatcatgccactgcactccagcctggtgacagagtgagattccatctcaaaaaaataaaaaaataaaaaagtgagtcacaggccatgtgtagttggccaactggacaacacatgcctgttgtcctggcttctcaggaggctgaggtgggaggatcacttgaacccaggaggctgaggctgcagtgagctataatcaagccactgtactctagtctgggtgatggaccaagaccctctctcaaaagaataaaaagtcactaagcccatcccatattgtagggaaggagaattaagctgcctctcaagggaagtgtcatatccaaaagcactgaactatttacatacaaggagtgctaacaatctggttaactagtattacaggctgggtgcagtggctcatgcctgtaatcccagcattttgggaggctgaggcgggtggatcacgaggtcaggagattgagaccatcctggctaacacggtgaaaccctgtctctacttaaaatacaaaaaattagccgggtggtggtgggcgcctgcagtcccagctacttgggaggctgagacaggagaatggcgtgaacccgggaggcagagcttgcagtgagcagagattgcgccactgcactccagcctgggcaacagagcgagactccgtctcaaaacaaaacaaaacaaaactagtattacaaatccaaaaagtatcacacgttagtccctgcacaagaaaactacaagtaccctgaaatcttgcagctcttctgtgaaagaaatgtgagagtttcccaaatgtgacagtggccctaaaaatttccagggtagtacccaaaacaagtagagaagataaaggaaatgtttccacagtatcaaaaaattttttttcaatcaacaatgctagagaaaagacaatttttctattctcactataggaaacatgaaggggcaatcaaagagtgtacggtgacaaaaatgtaagaaaaagccaagcacagtggtgtgcacctgtaatcccagcactttgggaggctgaggcaggaggatcacttgaggccagaagttcgaggctgcagtaagccatgattgcaccactgcacttcagcctgggcaacagaggaagaccgtgtctcgatgtaacatcaacaacaacaaccaaaaatatatatacacacactcacatatatatgcatatatattatatatgtgatacacatatatatgtatatacgcatgtgcatatatgcatatataaggatgtgcatatatgcatatatgtgcatagacatacatgcatataaatgtgtatgcatatatgcgcatatatgtatatatgtgtatacatctgtagagaaaagactattacagaagtgcgtgaggtagttaatcaataaaagtattattttctgaattttgtgttcttcattatctgtgagaagagctgacttctagtacaacagtgcagtttcccagcgtacagtgctctgaagggccaacactcaaggtttaatgttttgcagtcaccatcctgaaaatttcagctttggatttgtgttttgtgaagcccagatgagacaatggagcacgcaatagagactggaagcctgggcacacacatggttccacctcttgcctccccaggatgggttctctgagcagagaaccagtctagcagcctggtctccccatttctgcccttgcccagtgaccactgctgccctctgttcagctgggggcctgggcgtgggtgcagagtgcgtcgggccaggtaacagtgggtaagaccagactcatatgccctgtgcctctttgggcaggccatggtggtggctgctcactgtgggtggtgccctggtgcatttggtgggcaattcagcagaggtaagtctcacccccactcctgatccaggtacctagcgggttccttgcatgaaggttgcaatacccttgaaggttgccttctgccaggtcttggggtggtgttgcatagaaaggggtgatgtctgactcaacctccctgcactggccggtcacttggcaggagaggaaagcagcacctgtcaagcccaaatgcatatcgcctccgcgttcaatgtagatgctcatgtgcaccaggggagcacgtgactgtctacactggcccatctagcatccctatgcccaaggtgtgcgctcagccagctctgtgcctgatggacccccaccccttccttccaaccttcctgtgtctggcctatgcctatctcctctggccagccccaggcacactccgtggacaagccatgaactacgaatcatgtactttcttggatttttcatctcagttaaatgatctgatatttgcattcaaaatcgacattgccggtctgggcatgatggcttaagcctgtaatcccagcactttgggagcccgaggcaggaggatcacttgaggccagaagttcgaggctgcagtgagccatgaacgcgccactgcactcccgcctgggcaacagagcaagactccatctctaaataaaataaagacaaatgggaaagttcatggtcattattaaaattttctaattcttctttacttagaatgacgttaaatagcaaacaagaaataccgcaagtcgagaaagagactgcaaaaggaaaaagctttatcttttaggattttaacaacactttcccgcattgcggttttttttgttgttgttgttgttttttttttttaagacggagtatcgctctgtcgccaggctggagcgaagtggtgcaatcttggctcactgcaaccactgcctcctgggttcaagcaattctcctgcttcagcctcctgagtagctgggactacatgcgcgcgccaccatgcccagctaatttttgtatttttagtagagatggagtttcaccatgttggccaggatggtcgggatgtttttgttttttttttttttcttttgagacggagtctcgctttgtagcccaggctggagtgcagtggcacgatgtcggctcactgcaagctccgcctcccgggttcacgccattctcctgcctcagccttaggagtagctgggactacaggcgtccgccacaacgcccggctaattttttttgtatttttagtggagacggggtttcaccgtgctagccaggatggtctcgatttcctgacctcgtgatctacccgcctcagcctcccaaagtgctgggattacaggtgtgagccaccgcgcccagctgttctggatctcttaacctgttgatccgcgagccttgacctgccaaaagtgccgggattacaggcgtgagccaaggcagctggccagctttttttttttttttttttttttttttttttgagacagggtctcactctgttgcctaggctggagtgcagtggtggaatctccgctcaatgcaacctttggcccctgggcccaagcaatcctcccacttcagcctcctgagtagctgggagcacaggtgcgcatcaccatgcctggctatttttctttctttttttctttttttttttttttttgtatttttagcagagacagggtcttgccatattgcccaggctggttttgaactcctgagcttaagcgatcctccctcctcggcctccgaaagtgttgggactacaggcatgagccaccgcaccaggtcctcgcccccgccctgctttttgaactgcgaactgtgcgtttttgttttgcactccgtcccgcaaattatgtagcagatcctgtttgtcagctttttttgtttgcaatttcttgtgacgtccccatcccgtagaaatattcaagtttcttttttttcttttttttttttttttttttttttgagatggagtcttgctctgtcgccaggctggagtgcagtggcaccatctcagctcactgcaaccttctcctcccaggttcaagcgattctccctgcctcagcctcccgagtagctgggattacaggtgcgtgccaccacgcccggctaatttttgtattttcagtagagacggggtttcaccacgttggccagcatgctgtcgatctcttgacctcgtgatcctcccgtctcgtactccttaagtgctgggattacagggatgagccaccgcgcccggtcagacgttcacttttctacctaattttggattctctttcttaaagacagtccccagaatggtaaaatcttcagacccctacataaactgcatcttccacctccaccttcaatgttgaccttatcttgagtgaggcaatcagaaatcaatttttttcctcttgtacttttttttgttttgttttgttttgttttgtttgagacagggtctcactcagtcgtccaggctggaatacagtggtacaatcatggttcaccgcagcctcgatgtcctgggctcaagcaatcctcctgccttagcctttaaaatagctggtactacaggcacccaccatcaggcctggctaattttttaaaaaatttttgtagagacggggggtggaggaactctcattaggttgcccaggctggtctcgaactcctaggctcaaaggatcctcctgtttcggcctctcaaactgctagaatttcaggcatgagccaccgcacccggccttctcttacactttttcatacaataggcctgtagagctcttttgatatgtgggaggaaagaaaagatccccagggagtgttatttcaaaaaagtaaaggaaactgctggcacccgaggagaagccggaaacccggcagggaaaatttggcagagtccggggtcttcttgcaagggagtccctgcgagctgacctgctgagcctgcgctggggcgcgccccctttaaggggcggggcctggccccgctctcccagggtgccccgcgcgcgcgcgcgccggcagttcggccacgtccctggccacgtcgcgggcgatctcgccatcttcgccgcttcctctcaggggccgccgcctcctgagccgcccagccccggggccgccgcgctgcgccgaccgccaccgccgccgccgccatgaacattttccggctgactggggacctgtcccacctggcggccatcgtcatcctgctgctgaagatctggaagacgcgctcctgcgccggtgagcggcgggggaaggcccggagaggctcgggcgtgggggccgggtctcgccgaggacccgccgacctcggccaccccacggctcgcggggcctgcgccggcccgacacaccccctcggccggcctaacgggtgcccggacccggggggcagcggcctgcgggccctcggggtgggctccgggccgggtgtcgcagcgcgggaccccgctctgcagtcggtccccgcgtgaacttgagctgtcggagcgcacccggctgcgcggggccctgctgtgtctgaaaagttggcgtgggacggggggtccgacaggcgtggcccctctctgggcttgaatgggggcgcttctccggccgggatctcccgtgggggtcccggggttgcaggaaacccgcgaatcaatgggacgggcgggaggaggatgggcaggatcgtggccggctgcgcctgacgtggcagcccagccagctcgggaggtggggcgggcgccgggagaggtcactcggctccccaccctgcccgtgcaagaccgggctctaggtgtggtgtagtggggtcgggtcagacctgtccttaagtgttgtgtgggcatcacccaagcccttgggtccaggatcacaccgctggggaggggcttgccgagaggtcgtcagtgattttcttggcgtaattaatgctgctttgggaaacgatctggtttttaagtgcctccatctaataatgggttctcttaaaactgcggcgcccggggaccgccgaggcctcctatgggctcctgcaattcgttgctccacgtcaccagtgagctggctggttccctgatcaagagtacagatttcatgcaggcactgcta

SEQ ID NO: 11423 - DNA, 6000 bp, Homo sapiens
gggtcattgccacagaaaggggaggtgacttccaggtgttgctatagcaatggtaaactgacatggtacttgtgggcatgtcttatggagaggtgcttttgcctcttccctgtttcaagttagtcttcaatctggtctggagttcaagccccacctctggagtcaagtcctgcctcctacctcaatcttgtctcaaccagataaagttgagtttctggatctgtaaacgctcatcaagaccaactatgctctctgtgaagtttttcctgagtattttagctcataaggctagctctcccctcttaacacatttaatttttttttttgttgattccactcatttagcactttctgggtactgtcttttatcattgactatgatgttacttactatgtatctaatactctaaaatttgcaaagatcttttatatattaacttttttatttctcacaataatattctgagaagtacacttattttcagaagataaacagatttagggaggtagcccttggtaactcactggaggtgtttgaacaggggagtgacatgagcagagcaatgatgtagaagcctgatcttaactacagtgtatagagtatatagcaaaggtggagactagaggctggtagacgagatagcttccagctattatagtttaggctataaggagctgaactaggagggcacatcaagaatagaagagaggttctcaaccttttttccttcaacaacaaatgtatccaaggaatataacatacttttggccattataatgttgtctccatttccaactgtatatgtgggaattactgtagaggtgaatctctactgtgaggtaggaggcaagactgagctccagaggcagggcttggacactggacaaaattgaggaccagctaaaacagggacagggtggaagcagttttccataagtcacacctcccatgtgccatgtgccatgtgtgctatgtgccatgtcagtttactgttgccatggtaacaccggggagctaccacccctttccatggcagtgacatgacaacccaaaagttactaccccttccctagaaattactgcataaactctgccttaatctacatgtaattaaaagtaggtataaatacgactgaaaaactgccctgagttgttatatctgcaggagcagtcatggagctgtaacacctctttaataaagctgttttcttttaccaccagcttggccttgaattcttccctgggtaaagccaagaacccacaggctaagacccactttagggctcacctgtcctggatcaaatctacataatttagactttgtggaggtcaaggagtaagattaacccagtatgttacacaagctcaaaacttgacagtcatccttgactacttctttcaatgttgccctacatattcatttggccgacaagtcctgctgatttcaccttcttaatggttttcaaatttactcctctctctagtttaactgcatggggttcttcaaaagttccctgactcctctaggcagtgttagttgtctttcttctgcctttctgtcaaattttgagcataactttattgtgggacttagtatatatattcacattacattggaatcatctgtttactcatgtttctccattcaaccatgatattcttaagggcagtttaaaaaaaaatcttatatctctagtgcctagcatataataaggctcaatgaatgtttgaggaaggcaaatgactttggtatttttagcccatctggcaggataagtgccacattcactgcattcttactatgtatgaggtatttgaataaaaagatgagaaacagtttctgcattgaatacatggacactaagaagggagcaatatacatggggacctacttgagggtgggaagagggtgaggatccaaaaactacctatcaggtactatgcttattgcctgggtgagaaaataatctatgcaccaaacccccacaacatgcaatttacccatataccaaacctgcacatgcactccctgaaactacagtaaaagtttgaaagaaaaaaaaaaaaaagaaatagcttctgttttggaggagctcagataacagcaagggacaatataatgactaagagcaaccaactgtgtgatcttttatcaattatttaatatctctgaatctcagtttccttatctgtgaaatgaaaccatatatatccttacaagaattagtaaaataagctataatgcagtgcaatcttacaaattcctgtaaggattaaaagaacaattattcagccgggtgcggtggctaacgcctgtaatcccagcactttgagaggccgaggcgggcagatcacgaggtcaggagatcaagaccatcctggctaacacggtgaaaccctcatctctacttaaaaaaaaaaaaaaagtacaaaaaattagctgggcatggtggcaggcgcctgtagtcccagctacttgggaagctgaggcaggagaatagcgtgaacctgggaggcggagcttgcagtgaaccgagatcgtgccactgcactccagcctgggtgacattccaagactccatctcaaaaaaaaaaaaaaaaaaaagaactatttttcagcacttaacacagtgacaggcatagtagacacaggttgttattattcatgatgatgagcctagcagaagaacactataatatgaggtgaatttttttttcttgtttttaaagatgtggtctcactctgttgcccaggctggattgtagtgatgaaactgccactgtaaaattataactgagacggcgaaagacatctgacatcaccaactccatcttgcttctaacctccaagctgtccttgttcactcctgggcataggctgaactaactttggaaagaacttttagtttatagcttaaaacaaagatgataacagccctttccctaaacaaatccccttcttgcctaaaaaaattcttttaatccttacaggaatttgtaagattgcagtgcattatagcttattttactaattttgtaaggatttaaatatatatagttggcttcattttacaggtaaggaaactgagattcagagatattaaataattgatcaaagatcacacagttggtttgtgcttttagtcattatattgtcccttgctgttgttatctgagctccaccaaaacataaactatttctttttttttttttgctctttccaacttttactttagtttcagggagtgcatgtgcaggtttggtatacaggctaacagattagcgaaaagattagacattatggtttaggagtcatgcagctggaggctacaagattctgaccctccccaaattgctcctggggataacaactctattgtaaagcctaacatcagtgtttgagatattttgcagaccctgcaaaatggatcagctggaaccacccagataggtaaactggctcatctgatcttgtggtcccaacccaggaactaagattctgacccttcccaaattgctcctgggaataacactattgtaaagcctaacatcagtgcttgagatactttgcagagcctgcaaaatggatcagctggcaccacccagatcggcaaactggctcatctgatcttgtggccccgacccaggaactgaggcagtacaagacagcttccactccctgtgatttcatctctgacccaaccaatcagcacttccgacttactggctgtctccccacgcaccaaattgtccttaaaaactctgatccccgaatgctatgggatactgatttgagtaataataaaactctggtctcctgcacagccagctctgcgtgaattactctttattgtaattccccagtgttgatcaatcggctctgtccaggcagcgggcaaagtgaaccctttgggagcttacagcaagtgacccaatcacagctcactgcagcatcaaactcaagtggtcctcccgcctcagcctcccaaatagccagaattacaggcgcaagccacagaggtcagcaaggggaaatttttaggagcacagacattgggcacagaaaacgactacgtaccttcagaatgaggcaggaaagtcttaaaagtcaaagtcttagaaatgtcttacagccttaaaaatcaattaagtcttagacctgggggggtcaaatctcaaatacgacagcagccagaaatttattacatcagaggttgggaatcacttgggaaacttcaaaggcagatcaatggccagttcccagccccaaactctttagaatttctaggagtaggtctccagcgtgagtatggttttacctctcctaaagtgattctaatgtgcagccagggttgagaaccactgccattctaaaccaatgagggcaagatggccaaacagaagtgtcatttcctatttagtctccttgattgttgcaatggaattcctcagcttcaaaagtccagaatttcatgtgagatttccaaattctaaaatgttggcaagtaattaaaagaaatttttttaaaaaagattgggatcaaagaaaacatggattcgggccctactgagtgtcacttcgtaacctttttgcagttcaacctcaggtttgaacaacctgattctgagaagttaaataatttgtccacggttacacagccagtaggaataagagttaggactaaaacccagtccctctgaatttaattaatgttccttccatgagaaggaaggaacacctgaagatgcgttttaaaaatgggtaacagaaacgcgaagttaccgccagccatgatcgcaaccacgcatgcgcctactactgccggcgaggcggaagagcagggaaggttaaaggcgatgaattacgacctctgctggcgacgctcacgactcctgccgtaaaggccgtgtgtggcgcctgcgcacctcctttccctttcggattcccgacgctgtggttgctgtaaggggtcctccctgcgccacacggccgtcgccatggtgaagctgagcaaagaggccaagcagagactacagcagctcttcaaggggagccagtttgccattcgctggggctttatccctcttgtgatttacctgggtcagtgggagaagaaccgggaaagtgactggagggaagagggtggcggagacagcagccccatttttggccgtcgggggagggagagaaaaataggggacactgccgtgcacggcccctgaggctgtctggtcaagtggggccgatctaacctgagttcgagttcccgttctatcgctttatagttgcatggtctttaagcagtcttgcaatccctccttttctatttttgcatccttaaagtggaggtcatatttctcgggattgtagggagggttggatgaccccagtggatgtgaaagtcactaattcactctctagcactaggtggttctcggggtgtttttcctcaccgctccatgtggtcctaagtggaaagagtcctgttcagggaatcgagacacctcgtgaaagtaccactgccatgaaagcatgattataataatagtcgttggatgcctctgctttcttacctgtacgatgaagggtttggatgatttctattactgcccccattttacaggtgaggaaacagccgtagagaaacttttttgccaaggtcgcacagctatgctgactgagggagttaggggctcaggcagtggggcatcagagcccatagtcttaaccattatagcgcacttaaaggatttggggtttttttggtttttgtttttaagacagagtctcgctctgtcacccagactggagtgcagtggcgctatcccggctcattgcaaccttcccctcctgtgctctagcgatccttccacctcagtctcccaagtagctgggactacaggctggtgccaacaggctcggtcacttactgcaaggatttgttaatatttttcagttagggttgcagactgggacctattctgtagttttttcttt

SEQ ID NO: 11424 - DNA, 6000 bp, Homo sapiens
gcatgctaccacgcccagctaagtttttgtattttagtagagatggggtttcaccatgttgttcaggctggtctcaaacttctgagctcaggcaatccacccacctcagcctcccaaagtgctaggattacaggcatgagctacagctgaggattgtttaacacgcagattctcaggccccaccctaaaaagactgactcagaatctctggggatgggatttgagaattcacaatgtaataggttctctctgtgattctaatgaaaactatagtttgatctagtgaaagttggagggtaaaggaataaacaatttacaatgtgactggagcccaggaacaatgtaagatataatagtaacttctaggaaagagccactatctctaccaagggaaatctaagtgaaggcttaatatagaagctgacatttgcgtggttttgaaaacgtgccttgccaagcagagatggagggtgtggcagggggcatctcaatgactcatgttgtcaatgatattttcactaagagaaatacacagtgtatactcactaaatgctttgcctaggaagtttctgtctgaagccttcctcctcagcctctattctgtgttcttcagggatttcagcgacttcattttcgttgatggttccgcaccaggttttgagggattttaatggttaagaggcacttgaatgtaataaatatgtatatacgtacatatatgtaataaatacatgagtgtatacacacacacacacacaaacaggcatacctcacagattttccaggttaggttctagaccaaaccaataaagcaactattgcagtaaagtgagtcacacaaatactttggtttcccagtgcatataagcattatgtttactgtagtttattaagtatgcagtagcattatgtctggaaaaataactaacacacctacttaaaaatactttattgcacctgggcatgtcggtacattccggtagtcccaagccactcaggaggctgaggtgggaggatcctttgagcccaggagttccaggccagtctgggcaaacatagagagacctccatctctaaaaaacccccaaaactttattgctaaaaaatgataatgatcatctgagtcttcagcatgttatcttttttctggtggagggtcttgcctcaatgtgaatggctgctgactgatcagggtggtgattgctgaaggctgggatggctgtggcaatttcttaaaataaaacaaaaatgaaatttgctgccttgagagactcttcctttcatgaacgatttctctgtggcatgtgatgttgtttgctagcattttacccacagtagaacttctttcaatactggagtcaatcctctccaaccactgctttatcaactaagttgacgtagtattctaaatcctttcttattatttcatcagtattcacagcatcttcactggagtagatttcatctcaataaaccactctctttgctcattcataagaagcaactcctcatacctccaagttttaccatgagattgcagcagttcagtcacatctgcaggctccacttctaactgtagttcccttgctatttccaccacatcctccactggtcttgaacccctcaaaatcatccctgagggttggaatcaacttcttccaaactcctgttaatgttggacattttgacctcttcccatgaatcatgaatattcttaattgcatctagaatggtgaacctttttcagaaggttttcaatttactttgcccagatatattagataaatgactatctatggcaactatagccatataatatatatatatatgtatatatatatgtatatataggtatatatatgtatatatatgtatatatatatgtgtgtatatatatatgtatatatatgtatatatatgtgtgtatatatatatatatatatttttttttttttttaagatagggtctcatttgtggcccaagctggagttcactggcacagtcatacctccctgtaatcttgaactcctgggcccaagggatccttacatctcaccttcatgagtagctaggactacaggcacacaccaccacacctggctaattattctttttttttttttttttttttttttttttgtagagatggggtgccactatgttgcccaggctggtcttgaactcttggcctcaagtgatcctcctgcctcagcctcccaaagtgctgggattacaggtgtaacccaccatggccagccatgaaatgtattttttaaataagacttgaaagttgaaactactctttgatccatgggcagcagaatggatgtggtactagcaggcatgaaaacattaatcttcttgtatatctccatcagagctcttgggtgaccaggtgcattgtcaataagcagcaatattttgaaaggcatctttttttctgagcagtagatctcaacagtgtgcttaaaatactcagtaaatcattctgtaaacagatgtgctgtcatccaggctttgttgttccacttatagagcacaggcagagtagatttatcataatccttaagggccctaggattttcagaatggtaaatgagcattggcttcaacttaaagtcagcagctgaaatagttcctaagaagagaatcagcctgtcctttgaagctttgaagccaggcattgacttctactctatagctacgaaagtcctagatggcattgttttccaataagtgttgtttcatctacactgaaactctttgtttagtatagccaccttcatcagatatcttagctagatttttttttttttttttttttttttgagatggagtctcgctctgtcgcccaggctggagtatagtggcgcaatcttggctcactgcaaactctgcctcctgggttcacgccattctcctgcctcagcctcccgagtagctgggactacaggcgcctgccaccacacccggctaattttcttttttttttgtatcttttttttagtagagacggggtttcactgtgttagccaggatggtcccgatctcctgacctcatgatccgcccgcctcatcctcccaaagtgctaggattacaggcatgagccactgcacctggccttagctagatctttttgataacttgctgcagctgcttcaccagcatttgctgcttcaccttacaattttatgctctgaagatggcttatttccttaaacatcatgaaccaacctctgctaacttccaacttttcttctgcagcttctttacctctcagccttcgtagacttgaagagagttagggccttgcactcgattaggcgttggcttaagggaatgttatgtctggtttgatcttctatccagaacatgaaaacgtttctttaccagcaataagcctccttcgctttcttatcattcgtgtgttcactggagtagcatttttactttccttcaaggacttttcccttgcattcactacctggctgtttggtgcaagagccctagcttttggtctgtctcggctttcaatatgccttcctcactaagcttaatcatttctagcttttgatttaaagtaagcttttgatttaaagtaaaatgattcttttactggaacactcagaggccatcgtagggttattaattggcttaatgtcaatattgttgtgtctcaaggaatggggaggcccaagagagggagagatatggaggaaggtatagggttggtagagcagtcagaacacacacatttatggattacagtcgctgtcttatatgggtgctgtttgtgatgtcccaaagtaattataatagtaacttcaaagatcaccataacatatacaataataatgaaaaagtttgaaatattgttagaatcaccaaaatgtgacagagacatgaactgagcacatgcttttggaaaaatggcgcccacagatttgcttgatgcagggttgccacaaaccttcaatttgttaaaaaatgcaatatctgggaagcacaaagatgtatgcctgttaaaggttttaaagaagccattttttttaaaagagaaaacttttaagaagctttacagatagaagacagtaagtatttgttgactaaatggtcaagttggagtgagcagattttataattttattctactaaccaccaccagcaattttatttttgatgcttgtagatggacagtggtgccaatgtctattcggccttctgtttttttgttttgttttgtttgttttttcctgccaaaggacggtgcttagaacttcccagtcttccttgtagtggggaaaatctgtcaccccaaggatacgaattaggtagaaaagtaatgtaagagccaatcacaacgcgcgctccggagcggctccagactggcttcgcccggacgactggcggaagacgagacttcgttacctccgttcaatcggacaaagaaggccataatagtttaggacaagagaaaattccttgtgggttaaactgcggtgggactgactgttacgcagaaggcgtaatcgcaaaacttgtatacactctgtatcatggatacattattttctggaatcctgcagaaacgatcagcagttgtgatggcaccagtaccgaaaatggctgtaaggcgctccggacgctggatcaggtgacgcagcatcaggtgacgcagcctcagtccgcccccttcccaccagtggctcctcctcctgcttcccggcgtagcggtgggcgtggcttgcccacaggctctttcttctggggccgggaaaaccgaggaatacacatgcgcagttggacccctcaggcccttcgtgtcccttcccacccatctccccgccccggccctctgggcggggctgggccgacagtccagctgcagctcgctggagattcagtgacttccttgttgtgagccccggcccggcagtgtcccgactcgtagccccgctgttcttaatccgggccgctagcctgagtctaggtcgcagccgcagccccaccccgtcggtcaccttttcagcgcaggtcctttccccgcacgccctgcgctccctaacatgcccaaccccagcagcacctcctctccctaccccctccctgaggaaattaggaacctgttggcaggtaaagagcgggaaggcggcgataatgctgtcggggcgggggcgagggaacggtgagccggtggggacagaagcattcagagcccttatcctccctccccgcgcttcccacgtcttctagccagtggggtcggcacagggaggagaggagaggggttgttttgtctcagaaagggagtggacgtgtgtgttgaaatttggtgcggggatggtggcgaagccctttttggtgatctacacaaatgggatcaggacgtttctatgtgcattgtgaagacggtgtgtgtgtgtgtgtgtgtgtgtgtgtgacagaagggcgggggaggaagagtggaagagggagagagaatgataatgataatgaatgctgcgtgagcaagcagaagggagcagaagtcaaataagtagttcttgggtggtctggccaatggaggtagaggatgtagagatgcaaagagctgtcagagccacaggtgttaggggttatggggtgaaagagtttgtcatttctaaaactcccgtttttcttaaacattcagctcactcacgtttaagacttttgaagaaggtctggttctcaaatggccacttgtccccagcctcagtaatatattaaagcaaaaaaggaaggatatgttaaagttctacttcctgtgtgacacgatgaaagtacttcatctttgtacccttatcttccctttttcagttttacattaccatttataggaacttattttaggagctaaaaacgtggttcttcagtagcattatgaatccactactagttcattaatttactggatacggaggtgtgtatgttcactaagaaccaataatttatatttctgtacaaggtagaaaatata

SEQ ID NO: 11425 - DNA, 6000 bp, Homo sapiens
ataaatctataataatcaagagagtatagtattggcataagaataaatacatagccgggcatggtggctcacgcctgtaatcccagcactttgggaggccgaggtgggcagatcgcctgaggtcaggagttcgagaccagtctgaccaacatggagaaaccccgtctctactaaaaatacaaaattagctaggtgtggtggcacatgcctgtaatcccagctacttgggaggctgaggcaggagactcgcttgaacctggagggcggaggttgcagtgagccaagattatgccattgcactgcagcctgggcaacaagagtgaaactctgtctcaaaaaaaaagaataattatgtagaccaatagaatggaagagagagttgagaaatatacctacatttacacggtcaattgacttttgtcaatagcatggtaaatcctgggggaaaacaaatggtgctggaacaattgaatagtcacataaataaacttggaattttacctccacttattcaaaaatttacttgaaatggaccatggtcttaacataagtgctaaaaaactatacatctctggatgtaaacatagaagaaaatctttgcaaccttggagtaggcaaaatttcttaggacataaaaagtattaactataaaagaaaaaatattgataaattgagcataacaaaattaaaatcttctcttcaaaagacaccactaatgaaaagcgagacatatactgaaagaatatatttgtaatacataaatatgataaagaacttgtatccagatataaggaattcttaacatgtaataataatactaattaaaaatataaaactttttaacaggcaaaagacttaaacactttccaaaagaacatatatgaatggctaacaagtataggaaaagttgctcaccattattaatcagcaaagaaatataggctggacatggtagttcatgcctataatcccagcactttgggaggctgaggcgggtggctcatgaggtcaagagatcaagatcatcctggccaacatggtaaaaccccatctctactaaagatagaaaaattagctaggcatggtggtgtgcagctgtagtctcagctactcaggagaatgaggcaggagaattgcttgaacctgggaggtagaagttgcagtgagccgagatcgtaccactgcactccagcctggagacagagtgagatgctgtctcaaaaaaaaaaaaaaaaaggcaatataaattaaaaccacgaggagatttcagtacacatttgtgagaatcgataaaatttagaagattgataatagcaagtgttgataaggatgtggagcaactggaactctcatatatttctgatataatgtaaaatggtaaaaaccactttggaatacagtttggcaactttttataaatttaaatatacacctgccgtatgactcacccacttcactcttaagtattaggttggttggtgcaaaagtgattgcagtttttgccatttttaaaacagtaatggcaaaaactgcaattacttttgcaccaatctaatgtttacccaagagaaatgaaaacctacacttacataaaacttgtagataaatattattagcagctttattcataattgttccaaactgaaaacactattagtatctgtggtcatcactgagtgtaccctccagacatgtttagcagacagcctctagctataatctccttctgcctcagctgcagagagtaacctctgtagggatcatgtccttctcagggcggaagagaaaaaaggaaatctgttatacttgtattttttagctcttaagtctctgaatatgactagatggaatataaatgaccgtgtaacagttgcaagtcatttaagacattttttttccttgcaagctagctcatggaaatcttataatttactcaaagttaaacctcacataattgatagaggccaatgattaaagcccttactgatatttcttggtgttctccacatttgttggacagttctgttctcttatctctatttatgcagctcaaataatagtagggactgtcttttggatacaaagcagagacaaaataagtgtattgctgctggtttttgttttttaagacggagtctcactctctcacccaggctggagtgcaatggcacgatcttggctcactgcaacctctgactccctggttcaagctattctcctgcctcagcctcccaagtagctgggattataggcacgcaccaccacacacagctaatttttgtattttcagtagagacggggtttcaccatgttggccaggatggtcttgatcttctgacctcgtgatccacccgccttggtctcccaaagtgctgggattacaggcatgagccaccatgcccggtcattgctgctgtttaataagcgttcatagtgccatataataagcttctccatgcagaccctggggaaagcaggtgtctttcaatctccatgtgttcctgggctcctggcctcaaagctcctgtggctgtgtagggacaaaccaacaggcttcaaagatctcaggccaggcaggcaggttggcagtatcccctatccgtgtactgagcatatggctgcctccaggggagcagcgtagggtgcaagtgccatcctttacacaacaaatgacatatactggctataggaaggcacaggattgcatttgcctttctagtagtggtgtagtcttaaactagacatttaaaacagtgactctggctgggcacggtggctcacgtctgtaatcttaacacttcagatggctaaggcaggaggatcatttgagtccaggagcttgaaaccagcctgggcaacatagtgagactccatttctacaaaaatattttaaaaagtagctaggcatggtggcacatgcttgtagtcctatctactcaggaggctgaggtaggaggatcacttgagcctaggaggtagaggctgcagtgagccacttccctcgaggctgggtgacagagcgagatcccatctcaaaacaaacaaaaaataaaacagcgactctgagacttttaaaaaaagtttaatatttattttaagttctggggtatatatgcaggatgtgcagatttgttatataagtaaacgtgtaccacggtggtttgctgcacctatcaacccatcacttaggtattaagcccagcatgcattacctatttttcctaatgctctccctacccacacctcacggactttcagactttaacatgcaagagaaacaactaaagagcttgaaaaatgcgggttccctggctccagccccagagactctgaattccatagatctgggctggaacccaggaataagcccgctagaaatttctaatattgattatttagactcattggctacagttttcttggctagactaaaagaacagtaaagtacctttgtgctccaagagtctacgaaccaatgctctattctgcagtacctacaccaacttcctcagcccttccccactatccgtttactcatgtgtcagactgtaagcacaggctcaacattcaaagggcatggaaaaaagtctccttctctccccagcacccagtctcccagttctgctccctggtggcatctattacaggttcttacgtactcttccaaagatactctgtgcatttacaaaaataagtacagacatacatatatattttcttcccacaaataacacacacaacgttctgcacctagctttttatttttctttagttagtataggttggaaatagttttgtattagcaaataaagatcattctcctttttaaaggaagctggatagtagaggcaggcggattgcctaagctcaggagtttgagaccggcctgggcaacatggtgaaaccccatctctactaaaaatcaaaaaaaattagcgaggctggtggcgtgggtctgtagtctcagccacttgggaggctgaggcacgagaatcgcttgaacccgggaggcgggaggcgggaggcgggaggcaggaggcggagtttgcagtgagccgagatcctgccactgcattccagactgggcgacaaagcaagactcaaaatgttttgatttttgttaatctggctggtggaagatgctaccccacatatttgatttgcagttaagtgagcctgaatatcttttcgtgtgccaggatagaattgcatttattttcctctgaattacgtcttcatatcttttgagatagtcttttcttatttacttataaaagatggagttgacgctggcatcaacacacacacacacacacacacacagacacacaacacacaagtccctgtacataactttattaacccagatatggaatcttggcttagttacgtgctgtgtgaccttgggcaagttacttaacctctctaggccacaatgtccaagtacctgggacagggtctggcttaccaacatggtacaggacggcacttttaaaaccagggactcgacttggacgtgcgagtcaacaaggtacaggacacatttctctccggggaaatcttgtgtgggcgccgaggcccggacgtagcaaccaaacgtcgggaagaggcgccaaaaggatgctgggcctggctccttgaagcccgggttttcccttttgagagccacaaccaagaaataaaaatctagcaaagagggggccactttctgcggcgagatacgccctctcggccgctcctccagctcccaggccccctccctactcgacggtgagcagcgccgcggcccgtgcagccagacgcgcggggtgcggcggggccccgggggccggggtgggggaggcggagggtgggcccgcggtcacgtgagtcgggccagctgctgcggggggcggcgggccccagcgccgggagtctgggtagggggaagcgcccggcggccgcctccgccactgcagctgcagcccccgaggtcgccgcagtaatccggacccggcagcacccgcaccctcggcggccgcagcctcagcaccgcagagcggagagcggagcccggagcccgccgccccaggtgagccgcgtctgggagcgcagggcgtttgcagcgctgctttcccggcggtttcaccccacccgccatcgccacctcctgcgtttcatctcctcccgctgtccctccgaacccgcgggtagcgttaccccaggccgattcccggtgctggcccgggcgggctgggagcctgggggcggtcagaggagaggtggcctcggcctgaagccggggtgactcggctcggggactgcgggggtgcagtggagggatgccggccccgggctcccgcaccgcagccgggttccccgcgctgctcttcctgggtttccttttcctggcagccaacctgctgcccactgggatgtgcctgtgggcccctggcctcgccaccctggggtctggggcgagccgggcaccttccccgaggtgccgtacctgctgcgcgggcgggcgccgcgaacatggctgcccggagacgcccgccgccttcggcccggctctgccagcgcgtccaactcgcccgcggccgccgcaccgtgtcccggagcagccctccccgctaggccgacgcgcgcgggccgcccctgggttctccgcgggccgcgcgtgggacttgacacaacttccctcgagccgcacccgggcgttctccgcggggcgccgggcggggctgccgagaggccggcttggtcggcctctgcctcctcggctcgctcttgaggcgtcgagtatttggcgacctcactcgcgagggccgagagaaatgtggtctgcaaagcaggaggggcgcttgaactttagagaattggcgagaactcggatttgggaataaaaatgtccatgaaaacatcgaaggaaactgttacctgctttgactcaaagctgaccttgtagggttctgttaaataacgtggcttttctggattttctgtctgattctagcatgc

SEQ ID NO: 11426 - DNA, 6000 bp, Homo sapiens
tggcaaaaactgcaattacttttgcaccaacctaatatatgttgaagacctcagattatttacatccagcaccagactcctcctagcttcaaaccaaataaccaaatatctactgaacatttcttttacaagccaaatagggaaaagatcaactttcccacaaaagatgggtaaagagcaagagtagaaaggacagaacaaagttgaaaatggccagtaaatttatgaaaaacatcccctcatcagaaatcaaagacatacagttaaaacaaaaattaaaatattaatactattttccccaagctaaattaatgaaatgtgtaaaaaatgataatatctaatgtttgatggtaggagggtttagagctctcatatatagctcactgtagaataaattgtgagagactgaatatataaaggggcactggccagaccagatattaaaatagaactctgacccacagtctgaagcaagctgcagcaattgcccaggaaaccaagccattgtccacaatagaaaacccaggaatctagcctgacagtcaaaactgccatctctagtaacaatccaggaaccttaactataacctctgaaacaatcagcctaaaatgaccaggactttattggtagttgacaacttccttaatttttactcccacttccaactaagagcaaccagagaaaaccaaatatccacccctaccaatcacataggttgccccacttctggttaccccacctgcagctttctcatgccagcagcctccaaccagggcctacctgaagccttcccttttcctaccttcccactcttgtgcctgtgtttgagtctctgccacagcgcaagtgctggtggctgactccctttctagagtaagctctgaataactcctcaatggcatttctcatttggatgatctttattcctgcagttgataccaccttgcattatagcattttccagaattatgcacagggatgttaattagatgtacttaaagtatacaacaaaatagaatgattatatacattacttttcatacgatggaattataatgtgaaatcatgttttattaaaatcatgttttagaagaatattttacaagattgttattgggaaacaatcttgaaatatgactaagtaaaaaaaaatgacaaaacttggtaatatgatctttgttggacaagtttttaaataaatacagagagacagagaggggaaaggaggaagagagagaaaaaagagaagaaaaaagaaaggcatatatccaacaatcataatctaagtggagaaatcatgagtggttttagaattttattttataatttattgtatttttccagttatctattatgaacacatagtacttttgtaattagaaaaatgttattaagaaaatctaatgtggttgctcagggaaatttccaataagctatatcttaaaatgacatttagaatattagaaggtaacaggtttcagtaggtacagttttggaaaaactaaactgcaaaataagctgaggctggccaaatttgctaaagataacatcaatattcttttagctatttggtacagttaattaaataaaggctaagattgtagcttggaattagtagtgtaatgtggtgtaaatttgcttgtcattagctgtcacacctgtagattgagaaaggtagcaatctaagaaggaatggaagctgaagattgggaaaagaatctacaacacatcccctaattagcaagggcataagagtgaattattttaactttgtccactttgccgatttttcaagtttcctgaatttataaatgctatttaataatggaaaatattaaagccgttcatattgtttaagcaatgaaataatgctattgtcacgaataaaatggctataatttgagttagtaaactgtttcagacctacgaaacaaacatatgagacagatccttgaaaccagtgagccactctacaaatataaggtcttaggtctgttttctgaagtctattaacaattttaggtcctatagactgagaatgagaagttgaatcttacctttacctccatctgcatttttgttttagttttagtttttgtttttgtttttgttttttgagacagagtcttgctctgtcaccaggctgtagtgtagtagtgtgatcttggctcactgcaacctccgcctcccgagttcaagcgattctcctgcctcagcctcccgagtagctgggattacaggcgcacaccaccacgcctggctaatttttgtatttttagtagagacggggtttcactatgttgaccaggatggtctcgatctcttgacctcaggggatccgcccgccttggcctcccaaagtgctgggattacaggcgtgagtcactgcgcccagccctttacctccgtatcttgaagttgggagagggtggactgagcaggtgatttgacacagaatcagtgactgttaggctgactactcctcaaacttgaaagtatatgcatatgactgagggatactattaaaatccagattgtggttaaatacatctctcaaagggccccaaattcttcatttttaacaagctcccaggtagtctttggactacacttagagtagttggagaatacaagaccacctagataagagagcctcaaactctcacttcacatgagcaaatgggatttggaggtcacatgtgaatttcatcctgtccactgtcccagcacgaacctgctagttcatagtaggtttcttcctctaattcacctttccatacctgtgtctcttcacttttccagtctctccaaaaggaaagaggctcataatactttattgtaatcaagagagtatactgaatgcggaacaaacttggggaattgagagtttctacggttaaatgagcagaggaaaacctataaagtctggctatatctttaataagacccataacacccttcttgagaaagagaataaacattctcattccagaaaagtagaaaggccaggaaggcccagagtggatggccttcagctttgcttgcttgggctgcttgacttctcaccaaaataaaatggaaccataaaacaaaaatgaccttgtggttaagacagtggtaataatcccttattttccttcttcatcccaatctcatccattcagcatagaagaggagattgcccagttggagaggctgtagtcctagaggtttatgggtggctgtcactcataacagaaaagagaaaattggagtttgtgaggaaagtcagaaaagtggaagagctcattttatttctctttcccgtggatactcgactgagggcttccacagtctctttggtctgtattaaagtttttctgggatctggagttcatcatgagcaatgtttggccctgggctgctttgcaagagattttagaaactcttgggttaggtttatacttgccctaggtttatacttagggcattgggtgcttgcttatggatttcttttttcttttttcttttttttcagatagggtctcactctgttgcccaggctggagtgcagtggcaccatcaatgctcactgcagccttaacccccacctcagcctcctgagtagctggaactacaggcgcacaccattatgcccggctaatttttggtattttttgtagagacagggttttgccatgttgtccaggatggtctcaaactcttgagctcatgaaatctgactgccttggcctcccaaagtgctgggattacaggtgaaagccactgcacctggctgcttatagacatttaaatgcctcagggtggtctatcctgtcggctgagtgattagcccactggaagaggaaccccagcaaggcttggaggaagaagatggaggtaaggctgtttaggccctggggagaagacaggtgtctcagagatgatgtcaccttggcttctgggccattgaggaatcatgggttgagcaagctacagacagagtactgagtccatgacttcctactgggtcagagtcaatgaggcacagggagtcaaaaaaggtactgaggcaatcaccacatgctgccatttgcaatgccctctgctggtcaccagctactccagtgaatggaaattgtaaaatgtctgtctttggacaaggtgctgcagattcctgagggttaagaaacagaattcataatgttcagaaacatggagaaggaatcagtcattctgaaggctggaagtaatacagtggttgtgcagattttgaccaaggacaacttcatattgtgtcttcacttgaacatttacctattgaatatcctcaacaaaagtttaacaattaatttattaaacaacagagattttttttaaatcaatgttcatatgacaggagaagacaaagtagcaagcaaaaataatgatattatttgttggcgtataaattttctctgactctccactgcaaagactgctttatattcactgaatatacttaaaaaagagagagaaaaaaggacaagaacacttttagagtaagcagcatttggcaatcacagagactttggcatcaggcagggctgaattctattactagttctgcctcttactagctgcatgacctctgagctacggtattctcccctataaatggggatgatagtaggaattgctgtgaggattaaatgagataatttatgcaaagctataaacccagggcatgacatagtaagtgcttaataaacactagaataactagagaaacaagaacaacaataaaataagctatagtattagcaatggttatgttcacatccttcaaagcagaattccattgagtttggagaattggcagcagaaatgaaccctagcaggtccgtcccctagaagagatttccaggctcagatgaagctaaaactacatttcccagaaggccctgggccaagtgtgtggtttcctcttatttccgggtctgtcaggtgactctcccgtggcgccatggcggaagcagaggagcaggtaaagggtgcaggtggtagttgagggcacagggatatagagactagggtgggctgtttggggagggtggagtggagtgggtggaggtgcggagctgctggaatagcgcaaggcaggtccgcggcagggcggggtgggatggcgaaagttggtttcggggagcagagaggatgccagccccgggagggcacctagggaaagcgctctgacacacccccgcgttcgggctgcctttcctcgggccccatccctgtggcctttgcccagggaaattttggcatgaaggcaggcccggctacctcagggactgactgcctgtgggaggaggaagagaggccgggtgactgaaatttaagttgctttccacttgaagtaggacaataagaactaggagagagtagacgatgagttttgttttgtatctattggagttaggtacagagctggagcactgttgcggtgcagcagggattaaatgcatccgttctggagcaaaaatgcctggggtccaagtgctggttccttttcttacccaatgtgctactttgagctacttatttaactttccagtgtgagatgggggtaataataaggccgtcctcagagggtggtttaagatggagagaggagtttatacacaaagttagagtacttagaactgttgggcttagtaaaaattaaatgggattatttgttgctggtagtatccagtcaacaactggcaacgtggcactgaagtttagggtagaaattggtgatgggaatatgaattattttcatatagcagtagtggtaatcacacattttatgaaatgacgaagtaaaataaaaaagacaaaaaagagaagcagaccaaaaaagaggctagaacttgggggagataacttaagtttccatttccagtgttatttcagttggatactgtttttcttcacaagttaacagggctgtcagttgcagtcattgtctctaaacagtgacttgatgatgggct

SEQ ID NO: 11427 - DNA, 6000 bp, Homo sapiens
cctcccaagtagctgggactacagttgcatgccaccacccccagctaatttttaaattttttgtagagacagggtcttgctatgttgtccagactggtctcaaactcctgggctcaagcaatctgcctgcttcagcatccgcaagtgttggggttacagatgtaagccactgcgcccacgagttgctgctgaatatccaaattgtctaagcttctcctctgggtttaaaatggtctatggcatgtctctacctataacctcttgccccaggcatcttttctgagcaatgtcctgattttaggtaagagatacagcatcttgcatcagttcttccaggatcccccagacaagaacagatgcacgtaatagtttgcaaataaggcctgctctctttggaggagggagctgagaactgtactactgttgtctcaattccaaaactgttgactgagtgcagtggctcacgcctgtaatcccaacactttgggaggccaaggcaggaggatcacttgaggccaggagtttgagaccagcccagacaacatagtgagaccctatctctacaaacaatttaaaacactagctgggtgtggtggcacatacatgtaattctagcttctcaggagacggaggttggaggattgcttgagcccaggagtttgaggctgcagtaagccatgattgtaccaatacattccagcctgggctacagaatgagaccctgcttcaaaaagaaaaaaaaaaaaaaaagaccaagactgctgccatgctggggaaggggtggggcaagactaagtaaaaacaccacaaaactttgctactgttttgaagatggccttttttaaattgagtgtttgcctggttgctgtaggcctttgttttctagagtgacaacaaagttggttctgacagtttggcttgtttattcagtgtttcagtttggaaatgagagcttggagcttcctaggccaccattttgctgatgtcatttccaatggcattttttgcatctcgactttttcctcgcgttcaatgcttcaggaccacaagatggttgctacagctctagaccttccatctgtctagtgtggcgaaaagtggggaaggctagaatatcatgccagctgcatacctcccctttcatgagggaagaaaaagccttcccacggggatcacagggcccctgctagctgcaaaggggtctgggagaacagggagagcctctctcacctgagcagtggacacaatccttcaccaaagagtgcaggttctgatggcaagaaagacaaaggggccaccggcaggctcgttaccccaaagagcgagaagtaggggatgtgattacttacatctgtaccagttagagtgttgtacacatatccagccaaggtacctgtggcccaggtcaggtgactggcttagcaatttcacctaccttcctctcagcccagatccccaaattctttgaatgctgttgggatgcagaacagcaagtcagcgagtgattttttttaatttaatttttatgagtacacagtagattatatatttatggggtacatcagatattttgatacagatatacaatgtgtcataatcacatcaggttgtaaatggagtgaccgtcacctcaagcatttgtcacttctctgttacaaacattttaattacacccttttagttattttaaaatgtactgctgattgtaattaccctgttatgctatcaaataccagctcttattcattctatctaattatatttttgtacccaccaaccatctccgcttccccctacctccccactactcttcccagcctctggtaaccatcgttctacctactgtctattgccatgcgtttgttttcatttttagctcctataaatgagtgaaaacacatgaagtttgtctttctgtgcctggcttatttcagtgagtgatcctcatgtctccagggcttgtctgtacatgactcacctggggcagcctctgccaggtgtcaccccggagccagcaacaaagggctgctctgctgatggctgcctcacccccggctgctccctcagtgaactggcacagctctgggcccctctcgggaccttctcagagtagccacatttcagacctgtcttatgattctaacatcaaacttataatatcaatcttactaataccaatagaaagtggaaaatgaggtattatctggcagtcattaaattagtaagttctaatgacaaacataatacacgatgaaggtgagactgtgggaagatggtgcctttgcgagttgcccatgtcagtggtaagagtcacggccctcgggaaatcaccgagtcttcattacccaagactggcatcaacccttcaccaaattccaataactgagaatctgataattacccaataaatcctagattagcctgaggaaagaaatgagctgtccacgtaagagtcgtaaacattgggccggggctggtggctcatgcctgtaatcccagcactttgggaggccgaggcaggcggatcacgagatcaggagatcgagaccatcctggctaacatggtcaaaccctgtctctactaaaaatacaaaaatgaaccaggcatggtggcacatgcctgtagtcccagctactcgggaggctgaggcaggagaatcatttgaacccaagaggcagaagttgcagtgagccgagattgcgccactgcactccagcctggcaacagagtgagactctgtctcaaaaaaaaaaaaaaaaaaaaaagaatggtaaacattgtactctgactcacaaatctcatctaggggaacttgttttaaggaaataaattcaaagaaggaggaaacattgttaggtgcaaagaagtcaaccagaaacttatttatcaaaaatgaactattgggaaccggctcgacagtcagcaccagaagaggagaagatccacgcgttctgtggaccataacctagtcacggacgtgctgatcagagattgaaggcaacagggaggatttatgtgaaaagtcaagagaaaaagcaggatgcatgtacatatcatatggttacagctcggcacgtgtgtccagaggcaccggcagctgggttgggagatcgggtgtgaaattttcactgtcattccgagccggattgtgccgctgttatgctgcgtgtgtttcacaaatgaccccaggagaccacatagctggactctatctctctgtggtgctagactgggcacagctgggctccaggggcttagcctagacagcccccatgggaagaaacatatgaaaggcagggtgggcctttcatatctttgttctgacacagctctgtgcatgccgacagtgtcttcttgtcgcaagtgcccacggccctgcctaaggccctttgacactgaaggtgcccgccacgtgctggggcgaaatcttccaggaatgtcctctaccagtgacagatgaatgtggtggaaagctgtctgtgtccttattccttggaggggaccttcttgggcacgtccccaccagttcccggaggtccctgggggcaggagcaagctcttggatgcattctggtcagctttcttccatcccctggctcattccccattcaccgactgctgtcatctggggtcatctccccaataaactctttgcactgggatccttgtttcaggatctgtttctggaggaactagatgacaacaccgggaacagaggacctagagaggcagcttcatgggtggtggggtgtccgcctctgccggccagggacttgggagcagtgctgggaaggtgctggatggagctgtcactcacaggggcaggtccttggctgctgactgtcttcctctccactatggctgtcttgagaacttaggggtcagcctgaccctgccttggcccccttcctctcagcctctgtcttctcctgcatgaggctgggtggctcccctgtgaatcaggcaggggtccacagaacactagagacaggtcccttcctgcagctgtctccagtaggtggccacgcaggagatgttcccaacaagctgcccttatctgcagctcagctttggtaatgggggcccattaccaaatgggggtaaaggtcatggcccatcctggtgatagtgagaacccaaggtaggccttgaagattcctatcaggagggagcagaaagtgtgtaccacacccctgggcccaggtggagcagggctgctgctcaaggctcccagccatgctctgtcccttgctaggggtgaccggtgggacaggcctgggcaagggacaagagggagaaggtcggggggaagaggggatgaagagcaaagtgagcaaaggagagtcttccactatctggggtctctgtcaactgtcaggccctagagtgagctgttctttccctttgcttcctggaggaggggacttttgtcactgcgtcactccaccctgcctgcccctccgttatcaggctgttaatattaattaacaacagttgctagggatgacagtgcagagggttcctctgagcccattgctggccctggtcccaagagggggtagggcagagctggggtctgaggctgagccagggagggtgcggaggttcctcggccatgctgagctcctgaggccgggtcccagccagtgcctggtcccatctgtgcctccaggccctggcaccaactccagcagtgttaggggctaatagcgtggtctctcccctagctgactcagccctctggcttcggtcgctttgggaagtgagtggagaccctagcacctgcgtgatgaggctcatctaaagcgggggcctgtggactggggccaaacagtgggagtggtggatcattaaccagcagggctcagcctcattggtccctaacccagtcaggccagggttgtcatcgaaggggaggaggctgccttaatgtgtgttcagcccttggctgttcctgaggcctggcctggctccccgctgaccccttcccagacctgggatggcggaggccggcctgaggggctggctgctgtgggccctgctcctgcgcttggtgagtcccagggcttggctccacctcccctgcggcctccagttagggaccctggggccagccgtgtaccaggcgagcgttactgggtgacagcaagggagcctcagggcctgcgggctgggcaagtctctggacacatgagggatgccaggccccacagaggaggggtgcaggtggagggtttccaggttacaggcttgaatgcacacaggggtgaaagaggctgctggactggggtgctccaagtccctcctgtcactggccctactgtggggtccaggcctgcagttgagggaggtctgaggcaaggaggtgctgggatggggttacctggtgagcatcacctagggaggactgagcactctggaggctgggagaagatccagcgctggcacctcttaagttcctcgcttactttgtgtctgggaggtgggtgacagcttttggcctcaagcaggtggtggtagtggtggtgggagtcggggggcctcctgaacagactctccatgagagaccctggcctctggatgtggtgtacagtgtggggactcaggctgactttgacgtgggcagagcccgggaccttggagtcagctttgcctccttacccatctctggcctctccagcatgactttcctaagctgcaggtctatcaggccacccccaggaagaaaggccagtgttgtcactccaacactggctggctggcacatgcctccaggaggcttcctactccccacactccccgcttccctgcccctgctccatgtccttcttaccctcacaccctccctggctgcctgctgcctggatggcacccagctgtgtcagggcccacgcgtgatgttgctgtgctctgcaggcccagagtgagccttacacaaccatccaccagcctggctactgcgccttctatgacgaatgtgggaagaacccagagctgtc

SEQ ID NO: 11428 - DNA, 6000 bp, Homo sapiens
agtcctttcctaagaggattctattcatacttcatgaaataccagttgtctatatcaaataatcagtgtggagaaaccactccagacgaaaggacaccttgatggaaacaaggtgggcaggtgagggtgaggaagctgagatgatacggataattgtatactactcaaaataagtgcttgagggcctaaaacattaccccatgtaatacatgtgttatgcttttcttaacaattgcattggaacaagataaatgcagaggtggttatggcaattccctatttgtaatgtacttttgagacagaaaaatcaaagtgatcaccaaactgtagtgctgaaagatgattcctactgtgatcatcgcattccttcagtggaattgctgcatgtgactttgcagagagaacagttagggtatggttatgttcccctacactccaagtggccaaaggacccaaggcatttgggggcagcctatcaaggtatttaaatatcaagccatgatatttaattttattttgaagccaatggaaagcacggaaaactacagaagagagaggtgccatttataattcaaattattgaggattttatataagacagagtacctacttttagtcccaggtatagcaaatttgtcttttctaacttgacaatggctttaaaagtgtaccatgatgcccttccactgcaaattacagggcactcagctatttttcacaaaatcatgatacttcaataactatgttgtttttctttagtggagctactattgagcctcacagatgattgacacatatttccctgcaaattaacatcacttaggacatacttatctcagagaaaacggcccagaagcatattggggtgaagggaggctaaggccccagagctcttctgggcatgagatttctttctcagggggtgcttatgattggctgcttgtcccaagatgctaatggaggcagggaaggctcactgctccagcccatggggcggagcaaggccagtccctgttgcttcgggttccatttatgggctttctacctgtgctcacttccccaaagccacccctgatttgaatgctgatcagcagccccattggagcagcctgcttgcaaatggggtggagggggctgatcgcagccttgcccctgctctccttggtgcagcctgctctgggaaccagctcaaaggatggtaagtttgacattctaccaagatcttatcaatttttctttcttttcaccacaactaattacaaaaatttgcccaagcactgtgtttgtctccgtgagtgtgatgggacccagagcgtgggctgggagtggggatagggtgttaattaaaaaaagatgtagaatatctaaaggtaaatgagtagaggtccacaagctgcctcaaggaacagaatggaaatgacagtgactggcagtcttgctaggaagggacatgtcagcatgtgctactgctcatccaaagagaagaaggtcaagtgatgctggtgggccaggtgctttcccgggaagctccatttggaggtgagaaactgaagcaggcagaagatgagatgataatgatcagaacctgggcttgcattgaaacctgagaaacgaagttggttgctcatgataaccatcattctagtgttatttttccttgtatattttatgtatacacttgcctgagttgcaaatgtaatatttccccaaatctgaaacttagtatcattaaatgccatctattacatcttcaagtatgaaaacccatgtgagaacaattgctgaagtttccatctgaggaggaaccctgtgctgtgtaaactgcagctctgtgcctttttacactgtgaactgtgtaaacacctgtgtttgcttttctactttgactactgaaagtcttcaggcagtgctacctactttcaggtattcattctgaactatgtgcatactaaacaccttaagtctgtggagtaaggcaggggttgactaagtgaactattacctaagaagcagttttagaaactaagtattaaatctgaaatacagaatgtggcttaaaaacaaattctaaggaggtggcttttgtttaaaacaatgaagacaaagggaaagacctcccaggatctcttccagccagggggttccgtccttgcacattgatttcatgcaaagaaatgatttttcttgtgttttttcctcctttcagcaaggtcataaggagagtcaaaatcctgatcgagtctttgtttctaaatgaggagcttagatagtgatttcttaaaatgggccatatttggaagccatttacctaattttattcagaatatttttacttaaagcagttttcaaaactcgacgttttccagtttgcttggctgcatccacgtctcaccttaagcagcacacccctccgtcctcgggagggaagcagtgagtttggttctgtgttgtgctccctgttgtaccagtgcagtgctcggcaaaccccaggtggaggagtatggcccaagaatgtagatgaactgggaacccctcccttgtctggatgcagctgctctgaggaaacaatgctggccgcactgcccggaaaaaggcgaggctgcccagcccagcgctggccccgagggtgttctgcaatgatggaaacattgtatagtttgtatcttggctactgagcccttgaaatatggctaatgatggagaagctaaagctaattctttttttttttttgagacaagagtttcgctcattgcccaggctggagtgcaatggcacgaagttggctcaccacaacctctgcctccccggttcaagcgattctcctgcctcagcctcctggatagctgggattacaggcgtgcatcaccacacctggctaatttttttgtatttttagtagagacggggtttctccagctaattcttaattctatttaattgtaagtaacttaagctccagtagctgagagtggctatgagagtggctatgagagtgcctcccacgtagggcagtgcaggcatatttcttccctcaattatgtcactttctttgctcctcctcatttcctggcatctttggttagcactgctggcttcaaaaacatcacaaactttaaatgtaggccctgttctcaggatgtccagccccacaaggaaggaacaggcagcagcaaggtcagagcatccaggtgtgcgtgtgggtatggatgccagcccagcaggcagggttgcacaggtgtctttacccagtggactctgtttagatttgacaggaaggtgtcagagcaaatcacaggggcttcagaaagaagggattttgttcgtttacaaactgcagtttgcagtttatccttttcttggtcacaggcgcatttgaaagtgtattgctaatgaaattggaaagtatgcatttcccccaaatctgagatttactcacaacaagcacagtggggacaaagccagaggcactgacaaggcagtgtgagaagagcagaggtggcagcaggccccaggagacaggtgtgttaggtcaacagcaggccccttaacccaccacagggctctggttactcacctcattggcagcaaagttccagaaaacacaggatccaaggccggacacccgtagcttggttcatcattgttcaaggggtctgtgttcccatctgagaaagagcttgtgcctgaaaacgttcccactcttcttggtatcactctcttcagagtggagagaaaaaatatctagtgttctgagtaaaacattaagttttctaaaatctctgaaggtttaaatgttggtataaagaactaagacaactaacaagtgctttaaaaatataagagaaaatgtttcgtaatggagagaactcagtctgacccgccagttgcaaacaaggagaggtgcaggaggttcggaaccagatcattcctaggttctgccgtaagacagagtgcgcctagtgtgtgccttgccagccttccttaggaatgctcttctgctcttgtggaaggtatcctgttccccagtgcagttgtggacagttacagctttttttttttttttttttttttgagacagagcctcgctctgttgcccaggctggagtgtggtggcacgatctcggctcactgcaacctccgcctctcggtttcgagcaattctcctgcctcagcctcccgagtagctgggactacaggtgcgtgccaccatgcctggctaatttttgtatttttagtagagacggggtttcactatgctggccaggctggtctcgagctcctgacctcgtgatccgcccacctcgacctcccaaagtgttgggattataggcgtgagccaccgcgcccagccaacagttacagctttttattctcagacttctctcagcttccatgtacagtctctcccttgagtagtgatctgtttcaggcagccacaaagatccctacctaaaacacacttttgttttgttttgttttgtttcattttgtttttgaggcagagtctcactctattgcacagtggtgcaatctcgtctcactgcaacctccacctcctaggttcaagcaattctctcgcctgagcctcctgggtaactgggattacagatgtgtgccaccacacttggctatttttgtatttttagtagagacggggtttcaccatattggccaggctggtctcaaacttctggcctcaagtgatccacccaccttggcctcccaaattgctgggattacagacatgagccaccacgtctgtcaaaagcacacttcttaggaaggaatttgtctgacagtgttaggaaaacaaaagctgtttctgcttgggaaaatgttactggagtttggatttttccctctgtgtttgatgtgtgtcctgataagaggtcacaagtacagaagctggaagcattaagctctatttctttgtcttccagaggatgtaggaagaagctggtctgctgactgtcatacttgtgaccagcttgcacaggacatggccgaggaggcagcccagaacatttctgatgaccaggaaaggtgagttatcactgttctcagagggtttggtaagcttgattttaaagtatgcattcagaaattttctttcaaaagtcatcacctctaggatgtgggctcactctggcacgagtggaggccctgtaccaggagggtgcatttggccggcggggtcagttcagaggttggagttggtgttgagaatggagttttttcctgaaggcttttgagaagactcctccaagcggatgccttcagccatgagaagtgctgattgctcttcctgcaaatgcaggataccttccaagttcgaggactttctgctgcctggtagtagacaaagttaagctatctgcttgtctgctaggtcccttgcatggagaccaggagaaacctggcacaggaagagatcatggggtcttggcccaggggtcttatttctttttttttgagacggagtctctctctgttgcccaggctcgagtgcagaggtgcgatcttggctcactgcaagctctgcctcctgggttcatgccatttatcctgcctcagcctcccaagtagctgggaccacaggcgcccaccaccacgcccgactaattttttgtatttttagtagagacggggtttcactgtgttagccaggatggtctcgatctcctgaccttgtgatctgcccgccttggcctcccaaagtactgggattacaggcataagccaccgcacccagcctccatgggtcttatttctaaaccctcttccccatgctctgtgcgcgccagcacccatgtgttgttgaggctgggcagcctgtgtgctctgctgttgactgtctcatggcagtgtgacatggtgcaaacctccatgccccctttcctgggcgtgaggccagcaaggtgacctgcctgtgggatgtggtaaggacccaggtgggtcaccgctgtcccctggcctggcatgatgggagcctgtgcctg

SEQ ID NO: 11429 - DNA, 6000 bp, Homo sapiens
ctgtctctatagttttgccttttccagaatgtcctagttggaatcatacagtgtgtattttttcaactggttcttttacatagcagtatgaatctgaggttcctgcttgtcttttcacggcttgagagctcacttccttttagcatattccattgtttgggtttatcacagtttgtttattcattcatctgctgaatgacatcttggttgcctccaagtcttgacaattgtgaataaagccgctataaacgtgtgtgttaagtttttgtgcgagcataaatcttcctgttatttaaataccgaggagtgcaattgttggatagtatggactacgtttagctttataagaaactgccaatgtgccttccacagtggctgtaccactggcattcctaccagcaacggagacttcctgttgctccacatccttaccagcacttgatgtagtattttgcactttagacattcaaataggtttgcagtagtatctcattgttgttttagtttgcaatctcctggtgacaggtaatggtgagtaccttttcatatgattatttgccatctgtgtatcttcttttatgcaatgtctgttcagatcttttgcttatttattttttatttctttttttttgagacggagtctcgctctgttgcccaggctggagtgcagtggcaaacgatctcggctcactgcaagctccgcctcccgggttcacaccattctcctgcctcagcctcccgagtagcagggactacaggcacctgccaccatgcccggctaattttttgtatttttagtagagacggggtttcaccgtgttagccaggatggtctccatctcctgaccttgtgatctgccctgcctcagcctcccaaagtgctgggattacaggcgtgagccaccgcccccggcctttttgcttattttttaattgggttgttttctcctgaaatatactaagaaccttaacatgcagtagcagcactgcaccctggagagcctgaaaccctgcacgactgtgtggaaagaacacgaccctgtgccagatccgcggagacttactatgtggaaagaacacagccctgcatcagatctgcggagactggcctgggcagaaatcagcacgtggccagcccagagggtggctatgtgtgtcggagcagttagacttctctaatacaggccaatgcaggaaaagaagtccattaggcagattcagaaagggttttgtttttgttttaagaaaatgatcatgaagtaaagggaacagtgagtttcaggaggaagtagtcaattgaaactgtttactgtaattgataatatagagtcactggcaactaattctgtgatctctaaatctttcgagtcaacttcaccaccctcttctggttactgcatttttaactaaataagatggagtaactttttttatagtacttaaaaccttgttttttcaaaaagggtttgaggaggggagaaaactttatttgatctcatcacatttaactcttaaaatattcctgtctaaaagactctttatgtttgaatctaggtccagtctttgatttttcctggggaactgttgacactttcataatttcaaccactgtgtcagcttcatttttaaaaagatacagctctttccactttgtcatcatacctaaatgaagtaatacaaaacaaaaagctgctatggagtccttggttctccatagatcttcttaaactttttcttgcttcaggcagagattcaagaatataaatggaatattaattcagcttatctcaaacgatattattaatatttcatgtatttttaaattgaggggcaatttaaaatttctgctatatatacattcaatttacactcagtacaatttatgtcaaaatttttaaaacttgatttggtgatctatatattgacttttttccatcttataaacatttttaaacatacagaaaaattgaaagaattattcaatgaacatcttacaccacaactaagtctacatttaacattttgttgtatttgcattatcaccagtttattcctctaaccatgaacctgccctttttaaaatcaaaataagttgtagatacctgtacatttccctcctaaatgcatcgacaattgtataattaactagagctcaatacttgttgaggttttttttttttttttttttttttgaggaaaaaggcacagacctgctgctatggatggaatgtttgtgcgcctccaaattcatatgtggaagcccaaatgtgatggcatttggatgaggggcttctgggaggtaattaggtcaggaggctgaagccccatgttgggattagtgttcttacgaccaggaggagagctggtcctttctttctctcttcctccatctcccgcaatgtgagaatgcaatgagaaagtagctatctataaaccagtaaaagccttcacaagaacctgaccattatctctgacttccagtctccagaactgtgagaaataaatgtttgttgtgtaagccaccactctatgatactctgttatagctgcccacgttgactaagacccctgtgaaaccctaagacctgttaaattacagagcattacattcactccccagttccctcacccgccttctcaatatgtagccccgggcaaacactgttctgattttttccaccattcattatttttgctttgtctaaaatttcttgcaaatggaactgcacactgtgccttctttagcgtaggcttgtttcactcaccatgtttgtcattcatcaatgttgtggcagagagttttctttccttagctatggagtactattctgttgtgggactatacctgtatgtttattcattctattgatggtaccctgttgcttttagttctgttatcaataaagttactacgaacattcctgtacaagtctttctgtgaatttagtttcatatatcttcaataagtacctggaattggaattgtggagccataggtggtgtatatatgcttcatattatgataaactactaaacttttcccaaaagggttatgccattttacactcctagtaaccaggaattagagttctagagttctgattgttacgtatttttgcacagatttgctgttatcagcctgtttttttttttttttttttttacagacggagtcttgctctgttgcccaggctggagtgcagtcgtgtgacctcagctcactgcaacctccacctcccgggttcaagggattctcttgcctcagcctcctgagtagctagggttacaggcatgcgacaccattccagactaatttttgtatttttagtggagacggggtttctccacgttggtctggctggtctcaaactcccgaaatcaggtgagtagacaattataacaatacactgtaatgaaagttatttgaatgtggcctctcccagattaccttctggtacacatctctttttgaaccagattttcttggataaggggaaccactgtatgtgttacttgattttctgtgttttgctgaaaatactgtcaactcagacatttggtggttggggtgaacttgccaacatgtgattttatgtttttttggaatgaattatttttttgaaaattatttattgagcatttactgtgtttagcactttactagatgctatattatacccacttggagcttatggtctagtaaggggatttacagtgtagggagacagaccgaggaataaataaataaatgttaatacaaatgctatgcagcaaatgaagaaggtattgtgaaaaaggaaaaaagagcatgagatagacaggattgccttagatggtcactataggcctctaaggagatgacacatgggctgaagtcccagggatgaagaactagtcaaacgcatctcagtctgttcagaatttaaaagtgactcttaaagctaaggcaaggtatgtgtagtgtgtatggaccacctacagtcagatatacggaggtgtgtgacctctaaccctgacccactgaatcaatatctggaggttctggggttacaaatttcatttactaaaaaacttaacaggagatttcagttactgaagaagtttaagaagcactgagagttgtaacacgtcttaatgttccatcagctcttcctgagttatattgttcctcagatcccgttatgctccattgctaaaaggaaacatggccgggcgcggtggctcacgtctgtaatcccagcactttgggaggccgaggcgggtggatcgcgaggtcaggagttcaagaccagcctggccaatatggtgaaaccccgtctctactgacggtttcagccatccggcggggggttcctggaatgcatccttgtgggtaagtggggagctgtgtgtacattatgaccactcccgtaaccaaacctagcgtttgacaaaggcctcaattacagcggcattcattaccgtgaatgacagccaaagtcaaagtttggggtggggatactattttgaattaggccataacattatattgctcataagcttcatttcgaccaacattatatacatacaaaaagtatgtaccgtaaggacacacatcaagctggaccgcaggaaaaaaaaccacaacttaggatttacctagtcagccgctactagagagcaagcaccgcgcaaggccgctggggctcgtgctgtggacgtgagtgggttgaggtcgggctggtggggtaacccgggatccagccggaaaaaagggataacgctagactcacactcctaaggaaggccaacgccccaactagcgagctccgcaatgcatctcttccaggaagcgtggccgggcgcacgtcgcgctgcgcttgcgcactgaggtttcgcgtaaggaaccaataggacggaggagtgggcgggctgttggcagaaacccggattccggttccggtgggcctccatcagcaagctccagtgctacgtgtccctggcattttaggtgtcggttgggtaggtgagtttcttcccaccggtcggtacgggcgaacggggcggccacacctttgcgactcttgggggcagcgggcgtgggcgagccggcgtgtctccccgggcggccgtcgcggggcgggcggtaagtggtcccctggctcagggccggggtctggccgccgacatcccaccaactcggcctctggcggaaggcagacccagggccgcggactcccggcgagctgggtggccggcccgcggggctccagggcttagcgtcctgccccggcgtcttctgtgctgcagccaaagatgatgtcctgctgcccgatcccttcggggttggctctgtgtgctgttgtggagtcctgtctgggaagagctgtactcagctctggtcctgccgccgcttccgtggtttaaagtgagagcattggtctagagtctagttcgagagatcatagttggtttttggatctctacccctgacattgagtgcggtattgtgtgtagcgtgcgtttttctggataaagaattcttagcttccttcgtgacaactatgattacaaaaagtttaagccctttggatttcaagagcaaagttgagtgaaatactgagaaaacagacattactgtgtttttgcccccagaacgttgcagaattcctggtgtttcattgacattatttcatttcgttgtccacaccctacactaaggaaggcaactggggcttacagaggtttacattccatagccagtgatttgaactaccacctggccactgttctgagtactggaaatggaggaaaatacaaataacaccctggctgctttacttactatagcagtggctctcaaagctaagatcggataacatttctattgggtaatagattcctcaaaagaacctgtatggtaaaatatatagccctgtttccttaaaagatgtgttcaaatcgaaaagtttgaaatttagctagtagcttctcagaatttgcgtcttcctttagccattc

SEQ ID NO: 11430 - DNA, 6000 bp, Homo sapiens
gtgagccatgatcatgccactgcactccaggctgggcaacatagcaagaccctgtcttttaaaaaaaaaaaaagaagaaaaaggccgggcgcagtggctcattccagcacttcgggaggccgaggcgggcggatcacctgaggtcgggaattcgagaccagcctgaccaacatggagaaaccccatctctactaaaaataaaaaatcagccgggcatggtggcatatgcctataatcccagctactagggaggctgaggcaggagaatcgcttgaaccctggaggcggaggttgcagtgagctgagatcgtgccattgcactccagcctgggcaacaagagcaaaactctgtctcaaaaaaaaaaaaaaagaagaaaaaagaaaaaaaagaagaagaaaaaaaaacttgaactgtaccagtaaaactggaattcctcactcaaacccagtaagtagttcctaccccgtctttccttgtagcatatcatcaccattatatatgttatttatttgtgtgtttggcatctttactagaccacagactgcatgggggcaagggcttgtccatctttttttctgccatattcccaacatctagaatagcgggcacatagtagatgctcaataaatacttttttatttgtatatatttttggacagggtctcactctgttgcccaggctggagtagagtggcacaatcatggctcactgaaggctcaaactcctgggctcaagcagtcctcccacctcagcctcctaagtagctgggagtacaggtgtgcaccacgatgctcagctaatttttagaaaaatatttttctttggagacagggtctccgtgtgttgcccaggttgatcttgaacttctggcctcaagcgatcctcctgcctcggcctcccaaagtgctgggattactggtgtgagccaccaccacactcagcctaataaatacttttttttttttgagacggaatctcgctctttcgcccaggctggagtgcagtggtgcgatctctgctcactgcaagctctgcctcgcaggttcacgccattctcctgcctccgcctcccaagtatctgggactacaggcgcccaccaccatgcccggctaattttttttttttttttttttttgtatttttggtagagacagggtttcaccatgttagccaggatggtctcgatctcctgacctcgtgatccgcccacctcagcctcccaaagtgctgggattacaggcataagccaccatgcccggccaatactttttaaatgaaggaatgaagcctgggtatggtagctcatgcctgcaatcccagaaatttgggaggccgaggtgggtggatcacctgaggttaggaattcgagaccagcctggccaaggtggagaaactccatctctactaaaaatacaaaaaattagccaggtgtggtggcacatgcctgtaatctcagctatctgggaggctgaggcaggagaattgcttgaacccgggaggcggaagttgcagtgagccaagattgtgccattttactccagcctggatgacaagagtgaaactcggtctctaaataaataaaggaatgataatctggccctcgatgggcttcccttttctgcacaatagtttagcatccaaggcctcccccttccttgggctcatcccccacctatgtccacccaagtgccacagcaggctcctgaggtgctcccggtagagtgctccattttagagagctccccacccccacccctgccccagcatccttcctttgtccactccctgctgcaatcccactgcaacaccctgttcgaatgtcaccacctctgggaagccaccctggttccctcacctaccaaaaccatgtctgtctcccccactgcagtgggaacatcttgagtgcagaacagtggccccagagcatggtttcccatttaatgtttgatgaatgaatgaatgattaaatgaggaaaagacttagcagaaaaacagagtttaaagagaagggcaagcccgggtgcagtgcctcacacctgtaatcccagcactttgggaggccaaggcgggtagatcatttgaggtcaggagttcaagaccagcctggccaacatggtgacgccccatctctactacaaatacaaaaattagctgggcgtggtggcgggtgcctgtaatcccagctgctcaagaagctgaggcaggaaaatcacttgaacatgggaggtggaggttgtagtgagcctggattgcaccactgcactgcagcctgggtgacagaaagagactcagccttaaaaaaacaaacaaacaaaaaaaagaagtgaaaggcacactttttttttttttttaagagatggagtccaggctggtcttaaactcctggcctcaagcaatcctccctcctgggcctcccaaagtgctggattacaggcatgagccactgtgcctggccacatttatttctttattcatttttcatgctactatttaatatgcgtctcaatgagtgatgcttggtgtgacaccagggctctcagagggcaggagctgagcctccctttcctgccctctccctaaggggccagacactgggctctgggggcatacctgtgacccaccccactgactcaccctgcaggctagaccaggagtcaggcagactcccctgtcacttgtcatctctgggcaagttcctctagcacttacctccttacttttcctctgtgaagtggggcgccatcaatgcccattctgcagggcacccaaagttgaagccgggacaactggaacagggtgtggctgttccctctgccaggccacatcggaccgtcttgggccagattttccagggaagaagggaaagctggaacagtgtccctagcttgcctggcagccagctaacctgtgcccatagtctgggagaggtgccaggcccagacacactgggcagcagggggctggattggctccagagctccaatgctttggcagtcctggggaagggaagggatgtgcttggcttcaggtcaagagggtgtgggccacagaagtgacagctgggggtggtggagggcacagcgggcttatgggggtgtgtgcgagaccactgttgcaacaagatgctggcagggaccttcaaaagaacatctgctgttgactggcctccccactcccactcctccacaggttttcccatgagtcctagaggaagccaggccccaggcttctagatagaaaatagaacctacattggccaagtgtaatcccagtgctttggaagcccaagccaggaggatcgcttgaggctaggactttgagaccagcctgggcaacatgaggagaccccgtctttacaaaaacgaaaaaagagaaaatagaacctcaggcctagagccagagttcaggattggggatgcagggaaaggaggagaggggggccataactcaaatctctttcccaaagatagagtagttcctggctgggtgcagtggctcacacctgtaatcccagcactttgggaggctgaggcaggcagatcacttgaggtcaggagttcgaaaccagcctggacaacatggtgaaaccccttctctactaaaaatacaaaaaaattagccaggcgtggttgtgggtgcctgtaatctcaagctacttgggaggctgaggcaggagaattgcttgaactcgggaggtggaggttgcagtgagccaagatcgtgctactgcactccagactgggcaacagagtgagactccgtctcaaaaaaaaaaaaaaaaaataggccgggcacggtggctcacgcctataagcccagcactttgggaggccgaggcgggagaatcaagaggtcaagagtttgagaccagcctgctcaacatggtgaaaccctgtctctactaaaaaatacaaaaaattagccgggcgtggtggtgggcacctgtaatcccagctacttgggaggatgaggcaggagactcgcttgaacccaggaggcagagctgagatagcgccactgcactccagcctgggcgacaagagtgaaactccatctcataaataaataatcaaacaaacaaacaaacataaaaagatagaggagttccttcatcctgcaggaaaaaggggtgggtcacgcagcatcagagctgtgaactgagaaatcctagggaaagaagaggccagtgcctgagtccctactggatgatgggagcaagggggaagggtggaggctcccagactggaactctccaggaggtttttggctggggaacagaagggagagcaggaggtcccaaggtaatgaaatgaaggagggagttacaaccttcagcaaattctggggaagtgaagggatctgaggatgaggaccggattctgggacagggatgctgagctgctaagtcgggaagaggctggaagccaggcacggtggctcacgcctgtaatcgcagagctttgggaggagggaggatcgcttgaggacaggagttcaagaccagcctgagtaacatagcaagaccctgtctctacaaaatatttgaaaattattcaggagtagtggcgagcaactctagtcccagccacccaggagactgaggcgggaggattgcctgagctcaggagctcaaggctgcagtgagctatgattgcaccacagcactccagcctgggcgacagagcgagaccctgtctccaaaaataataaataaaaaacgagacagggctggggcagaggaggcagcagggtctctggggacccatccccgggagcgatcacgcgtgcggaacgtccaggacgagaccccagggcttcgatccccacggggctgctcgtgcggggtggggcggggtctgggcggggtctgggcggggcccgggcggggtggggcggggccggggtcccgggggccggggcggggccgggctggcgctgcgcagccgcggggcggccgtcgcgcatgcggggctcacacggctgcagccggcgccgctgccactcccgggagcatgaaggaccgaacccaggagctccgcacggtgagtccggccccagcgcgcggccgcccgccgcccgccgccagcgccaacgcgccggacacttcccgcccggctcccgcggccaggatggtggccgctcctgcgcccccagccagggctgaagggagcggggcgagccagggacctcgacccccctccgggttccgcccctcggacccactcggggtcaggctcgcgtgagctcggccgcgctgacacgtggacggtcggctggagtccggggtcctggataaacttttcggggccctcttgatttggggggttcggagggtatgatggggttttggtggcgggacctcttccccctcccgcagagcaggccctttctctggccccctcactgcccctcatctctgacctcccgtgccccctcggtgtagacagacgaggggaccgcggtgggaacctccttggtgtagacagacgaggggaccgcggtgggccggtgccggtcccctgcgcggggccccgctgcggggcgcgctgcggaaacctgatcgtcgggtggtggcggcctcctcgggccaccctggtcacctgtggctcccatcacctgtggctccccctctgcttggtcgcagtagggatccactgcccgccccaggtatgggggggggggcgtcacacccgcccccggtccacctatccaccttcgggctttcgggcagcactggctggcgtttccagacccttcagggttccttgcgacttggatctatttttctacctgtatctgggaaacccctggggtgtggctcctggggcggggtttggggggagtaggaggatgcacaaacgttctgagtcagagcccaccttctcccagcccagagacccctgcagcctgcgtgggtccccttcccctggcctctgcccttagggatgaggagcccaggaggatggtgaccgggagtggaggacagcgacggaaatg

SEQ ID NO: 11431 - DNA, 6000 bp, Homo sapiens
gtgtctcttgggtattcctagacgaaaattgctgagtcatatggtaacatgagtcagcaatgtaatcttctgaaggaccaccagattgttttccacagcagatgccccacttacattgccaccagcaatgtatcagggtgtcaatttctccacatcctcaccaacatttgttatttgattattgcctccctagtgggtgcaaagtggtatctctttgtggctttgatttgcatttctctaatgaccaatgatgttgagcatcttttcatgtatttattggatttttttttttttgagacacatcttgctcccttgcccagattggagtgcagtaacacagtcatagctcactgcagcctcaaactcctgggctcaagcaattctcccacctcagcctcccaagtagctgggaactacaggtgtacaccaccatccctggctaattttttttttttttaagtagagacaaggtctcgctatgttgtccaggctggtcttaaactcctggcctcaagcgatcctcctgccttggcctcacaaagtgccgagatcacagccgtgagataccgccccctagtcacatttattggccatttttatacattctttctctattctaaatgtctgctcagtttctttggccattttttaattggtttatttgtctttttattattgagttgtaggaatcatggtaggtattgagcaaaaagctgattggagctgtgtttgcccagaggcaaagtcttatttgcaaagtccctgaagtttggcctctgggcatgaagctctgtcctgctggcctcatctcagtgcagccctgcccagcaggtccacctcccccaggctcagggacaagccccaaacccaagcaactcaggacaactcttgtctcacagatggggaaactgaggctcaaggtggtaaaaggactggctcaagcgctcgtgacccaggagagcaaagccaggctcaagttcagatctaccttttctctgtacaatttctctggacatatacatgccctgcctggctgttttctgcttttatagcatacttaacatcgcctctattcttaccataaccctggaagtgagtcatgcagacaccatttccctaattttatagaggaggaaactgaggctaagagaggcgacgtgactttcaccagcctcaaggccagcaggcgtagggctcacagtgcccaatccaggcacaactggcagtgcagtggggaccactctgggcctcaacccctagtctaagcccagccacaccacctggagggtctacttttcttctggcccagagccacccccactcaccaggaaactgtagcagccagtagtccactggaggacttgagttatatgaacttcctctagaacagctccacccagcaccagctgggccctctggactggcactcccagatctgcccaggccctgcccaacaggtgcagcccaagacctttgctcctgaaagaagtagaaccctggtttccatgagcccctgacactgtttcttactcttcttcttcttttctttttttttatttttttgaaatggagtctcgccctgtcgcccaggctggagtgcagtggtacgatctcagctcactgcaaccaccgcctcctgggttcaagcgattctcatgcctcagcctcccgagtagctggcactgcaggtgcatgccaccacgcccagctaatttttgtatttttagtagagacggggtttcaccatgctggccaggctggtctcgaactcctgacctcaggtgatccacccgcctcagcttcccaaagtgctgggattacaggtgtgagccactgcacccagccatgtttcttgctcttctatcattccaaggcttaggcatttacagaagagggcacaggctgcatgcctgtgatttgagatatggaggcaaccccaaaaaaccccaaggcccagctcaatggggtctctcttctctctggaagagcccttgactcctacaagatgaccaagcccccttgactcagcacagcagtatccctttatcagtcatttatgccagtaggaaagcctgggtaggcaaggttgaaggaacatgagaaagtcttcccttcattcaagtcactaaatcgactctctgttgagtacccaacaccattctaggcaataggaatgcagcagtgaataaaaccagcaaaattcttgcctgttctgggacattacagatgtcccaatggagctgacatactggaacagaaagaaagaaacaatttaaaaattggctgggtgccatggctcatgcctgtaatcccagcactttgggaggccaaggcgggcagatcatgaggtcaggagttcgagaccacctggccaatatggtgaaaccccatctctactaaaaatacaaaaattagctgggcgtggtggcacgtgcccgtagtcccagctacttgggaggctgaggcagaagaattgcttgaacccaggaggtggaggttgcagtgagccgaaattgcaccactgcactccagcctggtcaaaagagcgagatttcgtttaaaaaaaaaaataggctgggcactgctgctcacacctgtaatcctagcacttcgggatgccaaggttgggggattgcttgagaccaggagttcaagactagcctgggcaacacagtgagaccccatctctacaaaaaaaaatgaaacaattaggtgggcttggtggtatatgcctgtagtcccagctacttgggaggctatagctagaggattgcttaagcccaagaattcaaggctgcagtgagctatgatagtaccactgcactccagcctgggtgacagagcaagacactgtctctaaaataaataaataaataagttattgaacgttcccagcacaaagaaataaaagtttgagatgatgaatatgccaattaccctgatatgattactatacattctatgtattaaaacatcactgggtgtgccacgcgtaggtacgatcattgccaatttaaaatttttttaagtacaatgaaacataaataagaaaaatatagaatattgtccgatggtgttacatgctaagcagaatataaagtattaaaggggggcaggcattgtggggtaagaaactgcaattttattttattttattttatttattttattttgagacaaagagtctcgctttgtcacccaggttggagtgcaggggtgtgatctcagctcactgcaacctccacctcctgggttcaagcaattctcttgcctcagcctcccgagtagctggtattacaggcgtgtaccaccacgcctggctaatttttgcatttttagtagagacgggatttcgccacgttggccaggctggtctggaactccttacctcaagtgatccacccgcctcagcctcccaaagtgctgggattacaggcgtgagccaccgtacccagccagaagctgcagttttaaatagggtggtcagggaaagactcactgagagcaaaaagctgaaggcagttaggagtaagctatgtggatgtctgcaggcatgttccatgtacaggggacagtaagtgcagggactctgaggcaggggcatgtggtatgcaagggctgctctgaggggaagagaggggatggggttaggaacagcccaggctgaacctccaaggccaaatctgaagggctctgagcttggtgaagaagggggaacgatcgtccaggtgtgacagccagggctttgagtgtagcatttctgacttcccaacctttttttttttttttttttttttttttaaacagggtctgctctgatgcccaggctggagtgcagtggtgcgatcatagctcactgcagcctcgaactcctgggctcaagtaatttcctgcctgagcctccggagtagttgggactataggcacacgccaccacacctggctagttttttaattttttgtagagacggggtctcactattttgcccaggctggtgtcgaactcctggtctcaagcaatcctcccttctcagcctcccaaagtgcgaggattacaggagtcagccaccacggtgctcggtcctgcccgatttcccacttttgcggagatcgaacctctttcaccaccatttcattaaggtgggcctcagccctgactcaggctcaaagggagggaggacagggctcggagaggggaggggactcaatgggaggagggggacttctgggaggggagagcagcttagctaaaggcatgcaggctcacggccagcgatgggaactggagggagagctggagaggaatttgagcttagttaggcttaagggcatcttttgggtacctttgcgcaggcagtccctggcttctgggcccagcaattcctgggctggacaaccccaccgcccggactcaggctgagcctgtgcgacgtgtgtacgggaggggcagagcagcaggtgcgcggctcctgcaaacagccgcggccacgcccaccctggtcctccccgccccgccgttccggggtaattggcagcgcccccatccccacgcggcacgtgccaaaagcgcccaaagtggtgaggagagagaagccgtgtcaaattctttgggatttgcaccccaagcccctgacgcatcccgtcctcggttttgccccggagaattcattcccgagcagagagggacaaggaccgaggggcgggggctgggtcaggtcccgcccttccttggcaacccccctaccccggcgttgtgggccgcgcagggccaagtccttcctcccaggacgctcggtgaaggtgggaggcaggggccacgtcactgtccttaggccctggagagcgcggctccgcccctaccgcccccaccggagcgctgggcacttagctaagacgcaccggccccagcccagggccagcccagtcgccgccgcccgcccacaaagccacaggcaggtgcaggcgcagccgcggcgagagcgtatggagccgagccgttagcgcgcgccgtcggtgagtcagtccgtccgtccgtccgtccgtcggggcgccgcagctcccgccaggcccagcggccccggcccctcgtctccccgcacccggagccacccggtggagcgggccttgccgcggcagccatgtccatgggcctggagatcacgggcaccgcgctggccgtgctgggctggctgggcaccatcgtgtgctgcgcgttgcccatgtggcgcgtgtcggccttcatcggcagcaacatcatcacgtcgcagaacatctgggagggcctgtggatgaactgcgtggtgcagagcaccggccagatgcagtgcaaggtgtacgactcgctgctggcactgccacaggaccttcaggcggcccgcgccctcatcgtggtggccatcctgctggccgccttcgggctgctagtggcgctggtgggcgcccagtgcaccaactgcgtgcaggacgacacggccaaggccaagatcaccatcgtggcaggcgtgctgttccttctcgccgccctgctcaccctcgtgccggtgtcctggtcggccaacaccattatccgggacttctacaaccccgtggtgcccgaggcgcagaagcgcgagatgggcgcgggcctgtacgtgggctgggcggccgcggcgctgcagctgctggggggcgcgctgctctgctgctcgtgtcccccacgcgagaagaagtacacggccaccaaggtcgtctactccgcgccgcgctccaccggcccgggagccagcctgggcacaggctacgaccgcaaggactacgtctaagggacagacgcagggagaccccaccaccaccaccaccaccaacaccaccaccaccaccgcgagctggagcgcgcaccaggccatccagcgtgcagccttgcctcggaggccagcccacccccagaagccaggaagcccccgcgctggactggggcagcttccccagcagccacggctttgcgggccgggcagtcgactt

SEQ ID NO: 11432 - DNA, 6000 bp, Homo sapiens
tctgtagatatacttttaacagcccctttcttgtactgtttttgcaactggaaagctgcatactatgcacttttccctttacttcctctcattaaatgtcaaatttaatcatgttatgattattatcaggtagtggttcagccacagctatttcctgccccagttcctgttcagtacccagaataaaatccagcatattttcattcctagtgctctaaaactacctgttccaggaagcaatcagttgttctcatctgaaaactcacttctatattttgtgtcacattagcaattttcatgagaataacaaagtggactaaaaatgcagttttcctaaatgtcacttaatattttccacttagtcatatgattctggtcatcaagtgatgtttcagatttgtaaatttaacgtatttatggtttggtattaatctgagaagaagatagaagcacgagactttctcagattttcaagggcagtcccaatttaaaacacactggccaggagtggtggcttatatctgtaatcccaggactttggtaggccaagatgggaaaatcacttgaggtctctagcctggccaacatagcaagaccctgtatgtacaaaaaaataaaaattaaaacattagctggacacagtggtgcatgcctgcaggtctagctactcaggaggctaaggcaacaggattgcctgagcctgggagttcaaggttacagtaattacactactgtactccaacctggaagacagaatgagaccctgtctcaaaataaaaaaactctgtcccactatcatgtatcaagtagggattaagaaaagacagtcaaaatatatgcaaaggggagttcacaataatgactccatgtggctacaggctaggtaaaggggttaagggatggcaaccatcattttggaattcttctttgagtcttaatttgaactgggaaagtaagtattggaaggtgaatattaaataaacatgtaataatggacaaactgctgaggttttcctataattttagtatctaagtatgcaatttccaattatcaaaattgggtagtactcactttgcccaaccacatttacataccattatcatttaaagctggccttcacacatacattttatacaaagctacaattacttaccattccctaaacaatccatatttctgttctgagactctgcctcttcctgttctgcatggaatgccctctttctccacctacaaacaccaccttcagacctttaaggcttcagtggtagctcccctgaaacccaactagttctctcttaaaattatttattgtttcttttgtattcactgctttctatgtgcccgtactttatatattttatttaaggcttaatgtcttctttgaagtattgccctttccattaaacagataaggaaactgatgctaaaagaggtttggtgttatgttcaaagtcacaaagcctgataggaattcaaatccagactgtctatactttaactgaattcttgtctcaagaattattgggaccacaagcattttggattttggattttgtaatatttgcatatacataaagagatatcttagagatgggactcaagtctaaacacaaaattcatttatgtttcatttacaccttatacaaatagcccaaaggtaattttatataacattttaaaataattctgtgcatgaagctaagttttgactgtttttttgttttgttttgtttttgtttttgagacggtgtcttgctctgtcacccaggccaagtgcagtggtgcgatctcggctcactgcaacctccacctcctgggttcaagcgattctcctgtatcagcctcccgagtagctgggactacaggtgcataccaccacgcccggctaattttttttgtatttttagtagagacggggtttcatattggtcaggctggtcttgaactcctgacctcaggtgatccacccgccttggcctcccaaagtgctgggattacgggcgtgagccaccgcacccagcttgactgtaacctgtcacatgaagtcaagtgtcttgtggcatcatcttggcactcaaaaggttccagattttagagcatttcagattttcagtttacagatgctcaatctgtatatattgtattatcgtcatttgttcaaatatctatttctcccatcaaatgaatgctcctcaaacacagagaaggtgactccatccctttatcttcagcaaaatccaacagtgcctattatacaatgatctcaaagtgttactgtgtacaatagtggattcaatttacggttttgcagtgttattttccactgagtagtctcctactataaagtctccaagaagccaattttattgtggtaataaagtataatggcttggaatgtaggctttggaatcagactgcttaggtgtgaatctcacctctactgactcatttgtgaagaaatcttgaacaaattagttaaactaagtcttggtttgctcatctataaaatgacagtaatcagtacccatctcacaggactaaaatgattaaataatatacaagtagtccaactattttcgagtttcattttatccacatgacaccctaaattctcttcagtttagtgaaggtttttttcattacatattccttgcaattttgcattaaatggaccagccaaaaaaagttcatggtttaaaaattgggtgggccaccttcttcatttttagggccaactgtccagtgccagtttgggctcaaaaaaagtttactcttggaggcttgactatctatgcaagagtgcccccattgtatactatacttgtttactcaccacattttcatgctccaccagaaagtggtcaaaattggaacacgaaaactctccacctcactaacacctaacttaaaactatcagatgcattcagacagccagtctgtgtgggaggcaggctatttctggggcaaaaatatttcctggaaccactgtttctggccccagacatggctcattctccgcagacctccagattcctctcctctacgttatggaggtggagccactacaactgataacgcatatccatttccttctcttaaaatttgcagtccatacaccatatccaagttaggatttcaaattgttatactgttttgtgactctttaggctaaagtgtgcagtttccagactttcagaattccccttccaatattaaaaatatggtgaaaaaagcccagtttgaaagaaaataaactttacaaaaatacctgaaaacaagatcaaatactaagtctcttgccaaagtcttggagaaaaaaaaaatgaaagaaacgtttaaaaatggcaaaagctaaccaaaaaccttaagattaaagtatcacacctgaaaagtagtctcaaagcaaggaggatatactattaacaaagaaagcaaccgaaaactacaaaatatttaatattcaccatgaatttcaaaattacttggcatgtaaagtacacactgagattaataaattgttccagattctgcactgcccaggttagtataaggcagttccttgttttcgccacgctaaaaataagaagggtgacagattagtgacagaatgatccctgaagttacacaaggaggtgctgagttagaaagccatgactcgaaggacaataccagaatgctggctgtcaacactgggcagataaaaataagaaaagctgaagcatgctgatggagcacggtattgtttccagacgggaactatcccttaaggcccatgccttaagcacccactccgccgtgttgggatcagaaaactcgactgccgcctgctcagagggggcagggcagcgaccctccttccacctcctccagcgcgcgagccgccgccccctcccgagcccgctcctccggccgctagctgacatctccccgccagccgggctagccacccgagacccctgaacgcccttccaggacccgacgacccctcagcacagcgccaagggaaggaagcaaaggacaggggcctggaagcggggcccgaggggcgggtggcgcgctgggcttcggcccgtcaccatcaagacttgaggaccgcgcgagctcgggaggaaggcggctgagcctccgccaccggccgactgatgagaaggggtcgcggctgaccccggccctcaggtacgggagactgccgggaaagtcgccggcgacggagggcgacgcgttggccccggagcccccacctccatcccgacgaccgctctcctccctcgtcccgatccatcctcgaaattctgtcagaactcgacgacctccacactgcccacccgagcgcggaggtgatgccgctcttaccgtaggagcgagcgccgcgccgctaggaggcggctgaggtgcgcgcgggagactccgaagctagcgccgccgccaacagagcccaaggagccacaacgaggctgcccgcgggcgcgctgcctccagagggttgccccaccccctctcccgcaggattttgcgccggagcctgcagtcactgcgcgcgggcagggaggatgggaggaggggcggggcgtcccgagagggcggagctgagcgccggctgctctgattaacatctgtgggcccaatgggagcacggaaactccaggctgatcttggactgacttccctactaacccgtgacagtagagaggcgggaccaatgggtctttttattgccgcctttctgtcgaacccgaaagtaaggaaaggtcggttggtttgcactggcggacaaatggtccaattaccgcggaaaagggacctctgaatccagattggcgtcctctctacctatagggtaggctcaggggcggtgagaaccagccccggatgtgggcgcggcactgaggtagaactgagagatcctctaccgcagtcgtttgaggaggcggaactgaagttttttcttaattatcatgtgacgggttctggatttaatggggggaaaagggcggaaaaggacaaggatccaaactggcgaatttgctgatcttcgcgtccctctccgctttccggccggcagcgctgccaggtgagtctggggctctgccctagcccgcaccgtacgccggcgctggtctcctgatgcttccgtgggctgtgcggccgaccctcaacccatcacacagccagccccaaacgcgcacacgcctgcttggctccagggcttctgtgcgcatccagcaggaaccgtgttaaactccagcatgtgctgggcttacagcccatgaaaggggagcgtcccggtggggcgccgcgagccgactgtcggtgtttgcagaagggcaagtatagtttaggagcgtcctgaagttccaggggcaaataggcccccagatgagctaagttgtaagcagaacgctgttcctttggccaaggctgttgctgcacgggcttttcaaaagcgactcattatgaagaagaataaatatgtgggctcatgaagcaaaattatctttgggatgaggcaggttcacttggtagactactggcagtggcgagagaagggaaatgggggctgatacccagccgtgggctatgtgggtggggctctatatatgtccatacaggggtaactccgaaggttttaaaaatgagtaaggaatcattaacaaatatttaactgtcttcctagtgccagaaataaccaccttaaatgggaaacattttagttgagcacatttttggagtacgcacctccccctttcttgtggagagaatagtaggaaacataacgactgctcaaattgatgaagacgtaaatgtaaaactgggatcgtatgtcatcgttgtagctcagcatacaggcgtacaatccttcaatcgtcatttaagtatcagcagtgcttccccattgagggtatttccgtgcaagaacataacagaattttgttgcatcccacattataaatcttgtaggcacaataagattgttacttgcatcctttcacctcca

SEQ ID NO: 11433 - DNA, 6000 bp, Homo sapiens
atcaaatacatatttcttgttatgtcacaatatgcataggtatcttacacaattatactatataaattctactttatatttactttttccctttaacattaaattatatgcatttttccattttgctgcaattgttgtaatgttcactttagtagatgcataatatgcataatttacagtgttaactgtgtcaggtgtttacaataccttatttgatttaattctcacaaaaacctataggacaagtattgttttatttatttcacaaaagtaaaaactgaggctgataggggttaagtaacttgctcaaatgtatgcatctagtgagggttaagccaggattcaaactaatgtctgttgactcaaaagtccatgttaatacttgtcagataatagagtgaggatccacagaagaacttcaggctcatccaggggttcaataccccagagattctggtagctgcacaccagagccacctagaaaataaaaaaaatacttatgctggagtctcatctccagaaactctgatttcattcgtctgggtatagtctgagactattatataactcctcaagtattttaatgtccaaccagaattcagaaccacttctttccactgtgacagctttactgtagagacaataaaacagagaaacacagttaatttgcatctaaaatgaatagagttatttaagttaattgtaaaagtggccttataaattacacgcctcctgctaaattgtggatgtctattcatatacatttgggaagttagcatagaggtgtattaatggtcgccatggatgtagataactaacccttgcaaagcacgtcatgagaagagaaaaaggccaagaacaaggccctgggagataatatttaagagatgtggagaggaagagcagaagagctacagtgaaggctatttccaggaattttcagtgctaaatgctgcagaaaggccatatgggagaaggcctgaaaaatatccattagattcagctataagtcttcactggaactttcatgggagaatactcatggactagtacatgtaaaccagactttcagtgagttgaggcaaatgtgggaggtaaggaagtggatacaatctgtatggacttttctacagaaattttgactttagaaatgttatcagtatgttctcagctataagcatgagaatatccaaattaaaagtgacttatacaatagagatctccactcaaaatacacacacacacacacacacaccacacataagaagaagccagaggtgggtggttcacaggtttagactctggttggcttctttgggatacttttggtcacccttaatagtcataagatgttggaaacttctccaaataccatgtcctcaacaaaaaatgtctaagaaggtaactctcctcataggcctctctcttaccagggaggaaaccttcttgaaagcctccagtggacttgccctaatgactcattagcctaaacactcatatcccttcccacagctgcaagggagtctcagaaagtgactatatggtgtatttttcctttacattcgcaggtaggctttgcttttagggaagagggaggagaaggatggctgtatagccaattaggagttccacaaagggtgtgatgagagtgtggtagccagagagagacatgggctcaatggtggtttgtttttttttttttttttttttttttgcttgttttaacatggttagaactgatcatgtttaaatgtctttgaaagaaaaaatataatcagaatagtgagacctctgtgatcatgggatgcaatgggacataaaatatgagagatgggcaagaatctcttccatcctaattggaaaggaggagaaatggaacaggttggatataggtaaatgtgcagttttgttggggagttgaggaaattcccatctgatagcttctttttcttccctgtgaagtaggcagctgagttatctgctgagagtaagggaggagcagagagaggccaggagactgaataaaataggcaacataaggagagttgcccaggcaacgcgggatttccagatgattttaagggtacagttgagattggctgctttcaatttaagattactgcaatcagggacatttatgatttctttcccccttcagctgcactagacacctagtaagttacacgtgttaagaacacagaaggattaatatctcaggggactttctgcccaggggtgataaaataaatgaggcaaaagaattgaagatattatcaaaagagcaatcagagtgataaaacacggaatctaaattagaagaaagtgaaaataggggagtagatctaccaggagaaagtcaagggaccaaaggatcagagacactaaggtggccaaataaatgatatattgaccgtgagtgagagaactggaagataaagctcaccaaatggtctggatttatttcaggcttggtacagttctaaatgttgacaaagtccagaatgtgaaacgggaatgagtggctgaagcagaatgaagagaaataattgataagtcatggtattgggagagtaaactctacagccttggtccaatttgtaaatataaaggtgtatgaaataaggactttccaagtttaaatgtgcatatgaatctcccgggtatttattaaaaagtagattgccattcagtaggtttggggtgaggcttgaaattctgcattcctaacaaggggatgaccatgttgctggtctggagatccacactttgagcacaaggcactggaaaatcttaccattgacttccacatatattgtcttcttttaaataatcttctatcccacttggctaaaggaggcagaccttagaagctaggtgccactttgtccctcctattggctgggggtgaagagcttgatgcagctataaatccgttcataatccggactgagacaataaaaaccccttgtgagaaaccgaactgagaaatagagactgggcctgccaagcagtgttggacactggagctgtaaggtccattttccttgagtttagcaccaagacaaactaaagccatatgcaagttgaagttttgggaaagtagtgatcatgaggaagcagaggaagctggtttttaggaaaacaaatggagcagaggcatagaaaattgatgagaagggaataagcagctctcgagtgctaaggtcatgataccttactcaaccatccacctccaacatagcctccacggatatctggcctctctggactggcattttgcttctcctcctcatcttggctaactcacactctccttttgggtcctgatttagaagccttcctcgagaaaacttttcctgccacctgaagctagtgggtttcctcccatgtatctccatagcattccattgtgtccagttcacagcacttgtcaccatttatgacagccaccatttggatacttactatttgttggtgtcttatatattctttattacttttaaaaaaacagttaaacgtatatactatagttccacttattattatgatcttcactttttacatatgaaggagatcaagagaggttagataacttgtctaagatcacatagcttgtcaatggtggcatcagggtttgaaggcagaaacgatcaacctcaaagcttgtgctcttagccaccgtatctcttttctctagattctaattatgcatctctgttttccactctagcttcaagactatgactatgcctgtgtcttcaccactatattaccatgtctggtagttgtctggtacatagcagattctcaaaagtattttgttgaatgtggctgaatgtgagtgaataaagttatttgtaccgccattcaatcttctaagataactgggtgcaggattgcgtagcattgctgttttatcagaaagtcctgagcaaacaaacatgatttgtaaaatatataacttgtaggtcagatatgcaccgtactaatcctgctcagtgttgcaaattccagatctatgtatctacatggtttgtagtccatcccgtgtcctaaactgttgagtggacgccgggaatcatggcttggattctaaatgttgtgtgggtacaacgttccaacccagatcctccctgcacacaaacgttttcagagctctcttcagtctcggcgctatagtgccctgagaatccagcgtggctgtatatttatccatgattcgaaatgcagagtgacgttgttacttttaacgacctgtccacctccagttgtctatgccctagagcctggaagacgagattggtatgcgaagcgctggctccacagctgcaaacttgcttagtcagcaccatcactggcggcatgagtggacaagtcaaataagtatctagcactgtcgcctcctgactttctataaacacataagatccctgtcacagaacaaatcaaggcaaacatgcgaacaaccctaaaccaaaattaccagtgactgccattctgtcctcgttaagcgaagactgaggtggttaaagcaggttgattgtttttaagatgctttcagccaggtgcaaggctatctgcagaaatgtgctttgcccacgtggatcgcatggacactaattactaagggctaaggagctgagaaacgtgcagccgcggagattggccgccccacggggaataagctggcacctctagaaataaagctccgcagccaatgcggcgccttggcccgcgggattggcggcctcggtcgtgacgcgacctgggcgggccgacttgcgacggaggcagcgggtccgggtcgggggacctgagaaggagccgggaggtgatccgcagcgctgcgacgggaccgcgcgattcctctcccacgcatctggcccgcgttcctgggcctcggcaccggatcccggcgggggtgtggacccagggcccactctccccggcgcggccagggccccccagcgtgcgagcgcctaggggatgccgaggtttggcgggcgcgggaccaatatgggcagggccgaggcgggattctccctctcgctgtgcctagaccgtactcctgctgcagttccggcagagagcgcggggagagcagcggcgggagctgcggcgagcacgccggccctggggtagatgcaacacatgagagggaatccaagttgcttgggtcggccccggcagcgacctgaacccgccgccctgcgggaggggtgtgcggagcgctgggctgtgctccggcaacttcactcctcccgccgccactggggaacgtagtgggggagacgcagaaggctaggcgaggggttctcaatgcgttcttccaagaaaactttttctcccttgaacatgaaggaatacgtgcttaccgtagaaaattgggaaaacatgggaaattattgtgtaaaaatggggggcgacgtgtgggagtctctcccggggcgaggggactgcgatttgctgtgctagccgggggcgagcggcgggcggcgctaccctggcggcccagaggggcggagagccacgcggcgccaagggctgagatttgaggaagtgggagctgcccgggcgggggcgtcccgctgagagtctgccacgcagtgtttgtttcctttcacttcctgcggcagctgctcaagatgaggaggtgcgcggggccggggcggagcagtcgcgttccccgcgtgtgagcccccacccatccctggcgccagcgcttccccgaccactcgggttcggctatgcgggagccgtgaggaggaggcttgcagtcgtggacctgagacctcgggaggtcatgctgtcttgcttttaagtggcttggggaaagtgaagaaaccccaaaatggaggactttgctaccaggacctacggcaccagtggcctggacaacagacctctgtttggggagacgtccgccaaggtgagtgcggattgtgactccagactgggatggggggtgtgtctgctgcctgccctctggcggagtccggg

SEQ ID NO: 11434 - DNA, 6000 bp, Homo sapiens
attctggatatttgacctttgtcagattctataggttgcctgttaactctgatgatagtttcttttgctgtgcagagctctttagtttaattagatcccattggtcagttttggcttttgttgcaattccttttggcattttcatcatgaagtctttgcccattcctatgtcctgaatggtattgcctaggttttcttctagtgttttatggttttgggttttaagtctttaatccatcttgagttaacttttgtataagttgtaaggaaggagtccactttcagttttctgcatatggctagccagttttcccagcaccatttattgaataggagatcctttcccccattgcttgttgttgtcaggtttgtcaaagatcagatggttgtagatgtgcgatattatttctgaggtctctgttctgtttcattggtctatatgtcaaaacagctattttgaattctctgcctgacaggtcacatatctctttcttcagtattgttcccaggtgacttatttagttcatttggtgaggtcatgttttcctggatggtattgatacttgtaggtatcggtcagtatatgggcattgaagtgttaggtatttattttggtctttgcagcccgagcttgtttgtacccatctttcttgagaaggcttttctaggtgtttgaaagtacttgggtattttgatctaagctgtatctgcattagggagcaccctaagcccagtaacattgtggtttcttacagacttatagaggtactgccttgatggtcttggataagatccagaaaatttcttaccaggcagagactcttgttgtcttcttttactttctcccaaacaaacaaattctctctctctctctctccctctctctttttctgtgctggacatcctggagcttggggtgggatgacacaagttcctctgtggctacaccactggggctgcactaggacagacctgaaatcagcacagtactgcatcttgctcaaggcctgatgtaaccactacctggctaccaatgtgtgctcaagaccttggggctctataatcagctggtagtaaatctagccacgtttgtatccttcccttcagggtggtgagttcccccaggccctgggtaggttgagaggtgtagtctgagagccagagactggagtcagaatccttagaaatctacttggtgtgcagtttagttggcactcaaaccactagacacattcttccctcccctttccacaggcaggagagcctcgccccctggccttcaccaccacaggcccaggggagtacttccaggctactgccacggttcacttaaggcacaaaggtttttcaatcagcttgtggtgaatgctgcccggtctggaactcattctttagggcagtgggcaccctctgctcatggcgggtccagaaatgccataaaagagccaaggcctggattccaagagcctgcttggtgctttgaccctgtggccgaattggtacctaaggtgcaatacaaagtctcctttacttttccacctgcttttctcaagcaaagagtctctcaccaccgccaccatagcgggtaatgtgctggatcttacctaaagccagcacatctcagagtcctacccaaggtccatgtccatggcgtactatctgggcatcactgatggttattcggggcccaaaggtcagcaagtaatgagtcctgctaggactggttccttcccttcaaagcagtagattcccttcttgtccagcgtatgtctagaaatgtccaggagctagggcctgggatgtgagtctcatgactctgaccagtcccctatcctactgtggctaagctggtaaccaagatgcaaaataaagtcctctttactcttccctttcctctcctcaagcagaaggaaggaatctcttttggagccatgagctatgctgcctggggttgggggaagggtggtgcaagccatttccttagctgccccagctggtgtctccgtaggtcatgtgcctccccaagtccactggctctgagctcagcttagcactagaaatcacctaggagttgcagtccttgtggcctacactgactttcaagtttatttagagccccaaggcattttagcccacagtgatgaagcttgatggaactcaagttccgacaactgggatgggtgattcccctctggctaggcctgatctaaatgctccctctgtgggcaggtgtcaactgagttcagcccagctttgctttatactgtgacagggaagcactgagttcaatgcacagtctcacaatctctgtgctctccctctcccaaacacatagcttttctctccgcacaatgtggccactgctgggaggatgaagggtggcatcagcaattcaagactgtctttcctaccctcttcaatgcctctttcagcgatatgaagttaaaactaggaactatgagtgctcatctgatttttggcttttataaagttgctttttgtgtatagatagttgtttaaatttagtgttcttgtagagagggacaatcagtagatccttctattcagccatcttgccctgcccttcttctctacctgtggtagtcttgactatatctatttgtgtagattttttagtggtcctctgagtattgcattatatataaataacttatcatactttactattttcatcattttacttgtttgagtgaagtgtagaaatcttatctcccttatatccctttactctctctcattcacttgtaattgtcttatgtatttcccttacttatatttagaaccacatcagacagtgatataatttttgcttcacccataaaaaataatttagaaaactcaataggaagaggaaagtttcttgtatttaccaatatttttcttgaccatgttctttattctagatattctaagtttctcctgtttataattttctatttagagaacttcctttagtcattcttttattttgaaaagcgttagctttagaataactttaagagttagtaaatgtcaataaccttaagcctagtgaccctactcttgcttatccatttcatcgttggccttggcaccttgcagccctccctgtccacccagtggttttcattactctcacagaacacaagaatttcattaggcaatgtgaccttggaactctcaatgtgcccattaatccacgttggcagaaatgatataacatagtgattaatagcaaattcttctaactacttcttgtcatggtacctttgcaagtccaccctagtttatgaaggtataaggaagagtttagtggaaaacagagagagagagagctgaatcagtattacccttgtcttcaacatctttatgagtgcctttgggtgtgctgggccgaattagatgaattttataatgaacaaaagaagaacgaaaccaaaaggaaataatatttttaagagaaaggtcaaaggcaaagcaaaaaatttctgagtcaagcaatgagaagggttttttaaaaaagaaaaaaaaactttgggagaagtataagatgtaacatgggttgaaggaagtaaaggcaggaaaaattaagatctataaactctgagaaggtagtttgagcagaagtaaaaaacattagtgaccaaaagtttggaaatgattcaagagtagttaagtgcagccaagtgcaaacagaatagtcaaattttcactatcttcagacatgaaaatttggagaattgttagatagccacaaatgcaatatagtgggggaaaagaccacagagcatatttgtcaagatataagtcaacaggacagagaatagagtccatcatagcaccctctttaggaaaaattgttgctaattaatttatatttgaatataatttgaaaatactttggtagatggaatttgttattctctgttgactcttacttataggaaattctttttgtacaaacccttttatgctatagttcaaaaatattgatctattcaatacacatttactgagcccactggtgctgtgggcactagaaatacaacaggtaaggcttctgtctaacagtggtcttcaataggaatacagaatgagaagctgaagtcacgtggccagagctggaagcctaattccattgtttactagctgtgtaaaattcactttgatatccccacctctaaactgagaataatagttcctcacttgtttaccttgaacatgctccttgttttgagaatcaaatgagatgatatatatgtgtgataggctctgtaaattcataaaatactatataatctgagtaacttttgcattagccttgtttaaatccttctttatatgcctaaaactttttatcctaaaaccttagcccaggtccttgcacatagtaagtgtgggcagcaattattggatattccagcgaatgaaatgaaaacatattaatatttttactctcacggctcttatgtgctactaagatgacaagagacaataagcataataaattctttaatgatatagtatactagaaggtgataaatgctgtggaaaagaaaatcaaagtaggataagaggaactgagagtcctgagggtacaagatccaacttctaattgagaagagatttttaggaggtgagagtgtcctccatgtcagtattttggggaggataattttggacagggggaacaactagtacaaacaccctgaggtggagtgctgcctctcttgtctgagtaatatccaagaggccagtgtggctggagtggagttaggcaaagacaaaataaataaaaatgagatcagagaggtcacggagagggcacagcattgtaggccatgactgagtgaattgggggctaccacagaaatgtgaagagaagagtgatgtgatgtgactcacatttcaaaagaatcatccaggccatgcttttgacaatggacaaaggcggaagaggaggaaaggacagaggcagagagacaattaacaagctattatagaaaatcaggtggagatgatagtggcttgcatgatggtggtagagctggaggtgcagggcaaaggtcagattctgaatatattttgaaagtaaaggcaacaagatttcctgacagattgattatggtgtgtcaaagaaagagaggaatgcaggatgattccagtgtttttgttgacaactataagtctggagctgccaactggatgcagaagttcactggagggcccagcctggggaaaggatcaggagcaggttaggcatgttaagcttgagatgtctgttaaacatccagataggaatgtcaaagatgcacttgtgtttaagagtcaggaatgcaagagggaattttaggctagaaacaaaaagttagaaattattcgatacagatggtatttaaagctgtgtgactgactgacatgacagaagtggcgagaatagactgagaagtccaaggaatgagccttggaccactccagtgttaggtaagtagttgaaaaaaagagagagagagaaggcatcaaaggagactgaggaagagtgatcaggaaagcataggaaaatccgagaaacatatggtgtcctggaatctatatgaaaaagatatattcagaaagacagagtgataaatctgtcaaattattgaatttgtcaggtaaaataagaacagagaattgatctttggacttagcaaagcagagattatcagtgacttttataaaaatagtttcggtagtgtggaaagatcaaacttctgtttagagtgggtttcagagagaacaacaggaattgaagaaagtaataaactttgccaaccagtttagctccaaaggaaaagagggaaatatgatggtagctggcaggggaagtgtggtcaagagaggttttttgtttgtttttcaagatggaagaaataacagtatgtatgtaagctcacaggagggatccagcaggcatggggaaattgatgatataggacagaaagggaagaatggctcctt

SEQ ID NO: 11435 - DNA, 6000 bp, Homo sapiens
tgaccatctttattaggatatttgggaaataatacaatttatactaaacacacatcaaatcttaccttattttcttcttacaaaaaccctaggaatatgctgtttttgtctttatttgaatgacacagaaatcaaggtttttgagcagtggagtatttcttcaaatgacacagaaatcaagtcttttgagcagtggagtatttcttcaaagccacacagctagtaagtcatgaagctggaattccaagagttgccacttcattttcttctttccctttatcttactcagttgtcttctctcctcttaattttgtcattcatttaaaaacatttcttgtgctattatggtagatttattttaatagggggcagtgacttactcagagagatgattctctaatggagttttaaagatcttagaagttgatagaggaggctgggcgtggtggctcatgcctataatcccagcactttgggaggctgaggtgggtggatcacttgaggccagaagttcaagatcagcctagtcaatgtggtgaaaccccatttctactaaaattacaaaaattagcctggtgtgctggtgcactcccataatcccagctactcaggaggctgaggcatgagaattgctggaacccaggaggcggaggttgcagtgcgcctggattattaacactacactccagcctgggagacagagtaatactccatctcaataaaaagaagttgataagggagatagttcatggcaacggatctttgaaggcacgctaatgataacttaggcatttagcctactagtgtaatttccataaatctgcctctgatgtcatactctcagcacctaatattttctacaaacatttattgaaactttattttgtataagtctctgtccagtttgaatatttaaaaaattcataatcatatgaaacattaataataaatacaaaatgagagatgccgatactgaaaagtaggattgcggagtggtagaaaatatttctggctgtagtagatggggaagtgttcaaagaggagtataattcaggtttccatttgccatcgacttatcacatggctaactcactaagcgacttaattaaaattaaattaatttatcatcatctgatcaccatttcacacaactcatgtctgttgctgtattggctaaatgatggcaagacaaacgacctctgaaaatgatcctattgaccttcggaatctggatttttttttcaatgcaggtgtccatagaagcaatctgatgtaatccaacatgagttcaagcacagtcatttaatatcccctatcaagtacagtcatttaatatcccctatcatcacatgtccttcatacataaaaatcattacatgtgaaagggtggagagtgtgtggatcccttattattgtgttattgtaacacaataacaatattgtgttattattgttaacacaagtgagtcatatgtcttgctctttggactgagtggaaacttgtattctttctctgcctcaggtcaattaacttcattgaggtgagttgcattccttctttaagcatgttgaaccttcaatctggactcagatgggctaaatagaggagctaggaaaaatacagaaaataaattattagagagatcagagaaagatacataagatttacaataaaagaattatgagaaaaacatccaaaagaattaaaaaccataggagaaggaaaaataggtgaacagctttttaatttctataaatgtgttgttaatactcataataaaggactcagagctgggatatgagaataataggtcaaacgtatatggatacatagatgtgactacatacatgagttgcaaagaatgctaaggagggcaaaaagagattgagaagagggcattattactaatatatagcaatgttgaatgtttagggtgtttcaggcactgtacaaatcttttaaatacacaaatcacttaatcttgccataacattagaagatactatctactctttaccaaaaaggtaactgtgggatagcagagttaagtaacccgttcaaacctatgcataataatcagcagagatggtccttatctaagtttttctgcctttgaagtccaaatagtttaatgcagccaggtactaaagaagaaaacttttgtaaattagtttagtttaatgatttacatgtggaaaagcacagagtgaaaagcacatatcatctgagaagcccagtgagtttggctgaaatggagtgaacatgtacatgttgagggtgaggaagatgattagagagaagtgatgtgttgtggttcttaaaagctaagaggaaactgttagatatgatatagtctgtggcagggagccattgcaggttttccaagatggactcataaggagaaaacacttcgtgggactggaaaaggcagtgaagtggtgtgtcctatgataatgtactacagtgtaggatagtggttaagagtacagttatgagagagggactactggttagcaccttacctgctgtgtgactgggcaaataatgcaaacctcagtgtcttttattgtaatatgggagtaacaaaaatagtaactacttcataggattcttgtaaagattaaatgacttaatttctttgaagtgcttggcagttcctgataaatgaccagtagttaataaatgttagttgttattattatcattatatattattactcccatagatacatatagaacagactgcagcagagaggcaaatctttaatgttgtcagagtatagacaagttggtgaaatggctacatgagagcggaggacaagaaggtgcagattgtggcagtcacttcaaatggaaatatcaccgcttgaatgaaggtatatgagtgtcaacttgcaaggggaccaggtaggtttcatcagaaattaaggaagcttaaggagaacagccaagttcagcttgacagaagtggtggtggcacaaatgcaagactggtgtctttcaagaaaccaaggactgttgaaagtagcaagagctagtttgttttaggtccatcatgttttatattcacactttcatgtcagtggagcaaagaaatggaatacaatataatagaatggtagaatcttatttttaaaatctgtgttattctgatctttaacttacttatatctttgatagagatctttacctgatgctcaagattgtagaaatagtataatcaacataacagtatagcactgtatttatatcctgcactgtttagggagggtttaaggccattcaaaaggatacataaaatacaacaagattacataaatgaaaggtgagataaagcaacaaagcaaaacaaaagtgaaaacagagatcataggcacaaataagattaaaaacgcatgtaatgaagatgaaagcttttacatttaccccagatggaccacagggttgttgttaagcctttaaacagtgaacaatgctgtacacttgcatatgcaattagaacatgtggaaaaaatagtggcctgttagaagcctaattaacaatttgtgaaaaaaaaaaaaaaaaaaaaaaaaagaggccgagctgtagctcacgcctgtaatccctgcactttgggaggccgaggcgggcggatcacgaggtcaggagatcaagaccatcctggctaacacagtgaaacccagtctctacgaaaaatacaaaaaattagccgggcgtggtggcgggagcctgtagtcccagctacctgggaggctgaggcaggagaatggtgtgaacccgggaggcggagcttgcagtgagccgagatcctgccactgcactccagcctgggcgacaaagcaagactccgtctcaaaaaagaaaaaagaaagaaaaacaaaagaaaacttcattgtattgtaaggccaagaacaaaatatatcaagataaggaaaatttgtagtcaagaatagaaaaaaattatggctttgaagtatgagttatttaaagaaagtggaaacatcctcagactatgcagtaaaaaacaaagtgattttcttcttctaaacttatgcaataaactgataggtaatatgtgaaagtcatagaatgtagactagaggatacaacaaacctatttcctctatgttcataagaagtaagaaaagctctgatgtgagttagcattgctttacaattttgaattgtgcagattgcacgtacttttcctcagtttgaagtaaatagtggacaggaaaaaatattaaatgttggcagtaaatatggaaggaaattacaactaatgtaatatgctaaaacatgctatgtttattttactaatttgaattaaaatgtaagaatttaaaatgccctggaaaaacacgggcattgatctgacgtctgaagttttaaaatattacacactttgaaatagcatttgtaccttgaaatacctgtctctatatattttttaaaacttcctttttctttcattccatttatcatcaaataaaggatgaacagatgtaactcagaaactgtcaagcatgctgaagaaagaccactgcagaaaaatttctcctagccttttcaaaggtgttaggaagcagaaaggtgatacagaattggagaggtcggagtttttgtattaactgtattaaatgcgaatcccgagaaaatttcccttaactacgtcctgtagttatatggatatgaagacttatgtgaactttgaaagacgtgtctacataagttgaaatgtccccaatgattcagctgatgcgcgtttctctacttgccctttctagagaggtgcaacggaagccagaacattcctcctggaaattcaacctgtttcgcagtttctcgaggaatcagcattcagtcaatccgggccgggagcagtcatctgtggtgaggctgattggctgggcaggaacagcgccggggcgtgggctgagcacagccgcttcgctctctttgccacaggaagcctgagctcattcgagtagcggctcttccaagctcaaagaagcagaggccgctgttcgtttcctttaggtctttccactaaagtcggagtatcttcttccaaaatttcacgtcttggtggccgttccaaggagcgcgaggtaggggcacgcaaagctgggagctactatgggacagttcccaagtgtcaggctttcagatttcctgaacttggtcttcacgggagaagggcttcttgaggcgtggatagtgtgaagtcctctggcaagtccatggggaccaagtggggttagatctagactcaggagctcctggagcagcgcccaaaccgtagtggcactggaccatgttgcccggagcgcgcacagcccgcgcggtgcggggacctgctctctgagcccgcgggcggtgggtgggaggaagcatcgtccgcggcgactggaaccgggagggagaatcgcactggcggcgggcaaagtccagaacgcgctgccagacccccaactctgccttcgtggagatgctggagaccccgcgcacaggaaagcccctgcagtgcccatcgcggccagagcagctggggcatcaacggcgggcgctccctcttactgctctctggcttcgacgggggactagaggttagtctcacctccagcgcgcctgaggctcatgcatttggctaatgagctgcggtttctcttcaggtcggaatggatcttgaaggggaccgcaatggaggagcaaagaagaagaacttttttaaactgaacaataaaaggtaactagcttgtttcattttcatagtttacatagttgcgagatttgagtaatttatttctagcctccagctctgaaataaatgacatgttgttgtttttaattatttttaagaaacgcaagctagcctttggaatcaatatccctgcttagagcagaagtttgttggctgagtggagcacagcatatgcattttccctgtcttttttgttctttcttttaatgatacataatattttacatatttatg

SEQ ID NO: 11436 - DNA, 6000 bp, Homo sapiens
ggtttcaccatgttggccaggctggtctcaaactcctgacctcaagtgatccgcctaactcagcctcccaaagtgctaggattacatgcgtgagcctccgagcctggctggattcatttttgaatctaccaaaacacagagtgcagtgcacatcatactcaaacatttgttgaatcaattttaccagggtcttcaatgtattagatattgttgaatctatgccatttaaagagtaaactcaaaacgtattttctgatgactcaaggtgatcatgacgaacatcaaacattttacagttcaagctaatacgccaaggtatcggcctacatttctgttcctctccaattgccttattttagccaaaactatttagacatggacctaactgtggctgatcccatgtcctccttagatggttctgtaacacctacttttcttgcactattaaaggtatttcccctttatatcagaatctgggtgctgtgctctcagtggttaaatttgtcagaagcatactctgcagataaatgggatattaagatgttttcaccgagattatagaaaccaaagtacgtgaaatggtgaattaaaaaggcacctaaagtaatgatgtgaagataaattaactcatgtagaagatcgttatgacaaaatcttttttagtgatagaaacagtaaatgtgctgaagacagaaaccaggacctgaggattaaatatcattaattatagaaaagatagtatgggaagatcagaattcaataaataagacattttttaggagaaagttaataaatcaaattccattgaaaatccacagctttggatttttgggaaatccaaaggaaaatttgggaacttacacccttaatatgctcctaacttcactggtctacttcaatcatttcaggggtaaagactaagtatgtaaaaccaaaaggtccctcaactattatgtatggcagaagtaattcaaaatttgtttcttgcaattacctcaggaactgctgtggagatagaagaaagaaggtgacggggcaagtagttcttgctttagcctctgtactgctgttttagcccaaggggttccctttttacaggctttacacattggacttctgaatattattttgtttaaagggttctactgataaaaacacaaatctaagtatcactgatttagaccattagacctagagttaatgggttgttcatcatatttgagaaaattgtcatcaaactgtatcagatagctactttgagctaccttttttttttttttttggacatagggtctcactgtcactcatactggggtacagtggcacaatcttggctcactgcaacctccgcctcccaggttcaagtgatgctcatgcctcggcctcccgaatagctgggactacaggcatgcaccaccatgcttggctaatttttgtatttttcagtagacatggagttttgccatgttgcccaggctggtcttgaactcctggcctcaagtcatctacctgccttggcctccaaaagtgctaggattacaggtgtgaattaccagccagatagccatttgtagccattgattgctagaggaacagaatggtgcaggtactatgttgctgtgggaattaagaagctaatactgctctaattgggccatttactttctctggacctcaagtactttgtttctaagatgaaggggtattttttactcaatgtctaaggtccttaacacattaagatactcttaataggtgtatagtcaatagggtggcaggcctagaaaacatgacctttaagaatgctgtcatatgatcattaccataaatacaactattacaagcatgtgacagtgttttagtttaacaaaatgaatagtaaaaaagtagaataacttttcagagataagtaaataaaatatattaacagttccaggaaacctgttagcacatgttcttctgataagtttctagtctgggaatcggctgggcctggagggctcatgcttgcaatcccagcgctttagaaggctgaggtgggcaaatcacctgaggttagaagtttgagaccagcctgggcaacacggtgaaaccctgactctactaaaaatacaaaaattacccaggagtggtggcacatgcctgtaatcgtagctactcaggagacagaggctgaggcacaagaatcacttgaacctgagaggaggaggttgcagtgagctgagatcgcaccactgcactccaacctaggccatatagaatgagactccgtctcaaaataaaaataaaaataaattgaaaagttactagtctgggaatgaaaggatcagtttagacattcaaagacgcagaccttcagaaagtcaaagtccagcatgaaccttttaaacagaaaaaaatcttaattacctcatttgccaaaattcagccaatatcaaccttaatcctattaaggtcctagaattttgcctgagttttctaatttcccaatcatctaatcagtgtataaggtaggaaagaaggtattccagattcttaatgcaaatttcttttcctttaataacattcattctgttgaaacaacatctgtatcactcaggaacaattttaactgtggtttgcatggctgttctgtagtaacattcttaactgttacactagtccagacaaacttatgtagctccccaagattcataatcaagaaattgctgttatctggaggacattccaacattacagtaagcagtcaatgagcagttccactaggacaggggagtcttacactctaagaactttacactagactgctaatcagagaaacctgaaaggtctgtcagtccacaaaaggttaaaacaaatggttttttgttaacgataaacagctgataaaaatgttaagcttggtgctaatagaagcgttttccaaaatgaaaaatttaaatgattacacagtagaaagtactagttacaaatttttccttctatgccagtgtacggttttcacttacccctcccagatccttaatgtccttttgaagtttttcagatatggtgacagaaggtaagtcaaggtaaaatacttttccccaaagtggcttacatttggatttttctggcctgttatcagttttcagagatttcagagatggtctgtttttttcatttttgacttggattccacctattaaagatgtttagaatcagatgttttacacagacacttttactatttttaaaatatttcattatacaatattacagaataaaaatccttacaaccctaccagtttaagttattagcattgaaatgtatttctttgtagtactacttaggatagaggcaaaatgccctatatactttcacagaccgcatattgtaaaataatagttgactcagcaagaaatattcgtgtgtttattcctgaggcacggaactatataaaactcttttgaaagattttctttttttaggatgtaaactccatggggatatttaatactcaactatttattgagcatctgccattctgctgaacattcaaaactggtgtttaaacttcatttagcgatgaaagaatcctctgttacgcagaataacctagtcctcaagggtttcagactgctcaagttttagtttcatataaagtttgtctgcatattaacaactaaacggtccatttcacatacaatttgtctacgtattaagaacttaacggtccattacgaagaactaaacctttcattattttcattagaaacagatctgagatccaagcaactgctttaaaaattaatttttcaaacgcaatctgttcttaaattggtagttactacacacacacaaacacctgtacaaaaaacttaggtgctggaatgtttcaccaaataaagtgactgaaaatggaaatttgcttttgtttccctgtttgtaatgttgaaaccagcaatggggtgtttgaaatacaatgctttcccccaacttatgaggaaaggaaaataaactttcaagggtaagaccaaaaatccacccacaatcactcaatctaatcctgaagcgaaaagccacgagcgcgtctgactttaaattgaggatgcagtccgtcgcctccaagggcccgggcggaggcttagcatatgcgagagcccgggagcagacagcgccgcagtcccggcgaggtcccggatctgcacattgtttgctagttttcaaccgaaggcacgaccgggaatcaatctgggaccgccgctgtaaacggcagagcgctcgaggggccgggtcaggatccgttccttcttaggcaaaacactgaacgggggctccttccttcagaccccagaggccggtcagaagaaaagaagctgaggacccggcgggagaagtctgaagaatcaatggtggaaccacgaggggaggaaaggattaaagggactgcaggcggaggaggggcttcttaccctggaaatgtcctttactgtggatcctcatggctccggagttcatggcagtcgcccggcacctacatgctgggtccggagaaagtgtcgcaccgggcagccgcgaaagcacggcttcccccggcctgttgacaggacggccgcctctctccttccgccagctacggcctctacgcagtagaggtaccgcgtctgcaggtcgggtttccggggccggatccggctccaaggcgcggaggaggaaggcgcaaagcacaaacgagtgggctgcggcggttgaagatttgaaaacgcgtcacgcggccgcggcgccgatacgcgcgccccgccccgtctcacgccacgcgccgtgccccgcctcgcgctcgcccctcgtgcctgccttctcgcgctgcgcgccccgccccctcacgccgccgtccttctcgcgcctcgctctggccctgcaggttgtgtttccgcctctaccccgcctccattccgttgctctctcagtctcagacccgggctctcggtccgccgcttcaggtcttggcgcagcctcagagagttggcgcggctctgtgttgaccaaacctagtggatgcagttagcgccggagcccggccccgcccgtcaccagggttattcccgccttctaggtttgccaggactgccggccctgcagctgccttctgccccaggtatgctaattttccactggtcggacgtctgggaagctgaaggcgaggggctttggctgagtccggactcagctctggccgggcccggggccggggccggaaccggagccggacagcggcggcagccgcagcccctgctcagcgcgccctgggtcgcacagcaagcggggttttcccgcggtcactgccgaccccaccggctgaggacagctgcagagggacgtgcgggagtgagggcggccccggggggcgtctgagggagggtctggccaggcggccccggccttgacggcagcgccaccgcagaacgcctccaggtcactttgtgtccttgggtagttggctatttgcgctgtcctgttgacttttattgtattcagacctgttttcttttagttgagtgtaagtttatttcaacaatgaaggagtggaaagtaacatctcatttttttttcctgtaaaacagagattaaagatcaaattaaaatgcttgtgaatatattttaattttataagttggaacatgcctctccaaaaaaaaaaaaaaatctgtttcttcaggaggaagaggatattttgaactattttgcattcctctactccaggccataataggcactcctgtagtggttgatttttttacctggtagctcaaggaagtcagagtatcagcgttacggttttgcaggtaggtaccttaaagaatagacaagggtgggttgtgacaagattagctggagaacgcagagaacaggtttgctaagggaaatgagagtttggttttagacaggtttatgttgaagggcctggggcgacagtcatggaactatgcttattagacagttaaagatgtttatgactc

SEQ ID NO: 11437 - DNA, 6000 bp, Homo sapiens
tactttttttgggtgcaggtgggcagtaaaatgttgtttggttttgcttcctggtctgtgttggcaggagtcctagaaattggttaaaaccaggtcaatggcctggcttcttcactataccctttgcagtttcaggaaaaaggaggagaaggattctatctgtccacccccactaaaataggaaagaagtagaaaaaaagttttctgagacaggaaaatgatttctgaatataccaggaagtagctgaaaaacttcagtcacagaaattgattatttatccaagtcccaaagctactacaagaaaactcagaaaggcctttgttttgctttttttaacaacacatgccttcctcattctgaccacatgttgtgatgaagccacctcagtaggcattacagtcacagaagtctgactgagcaggtgcctttctcatcctacccaatcccattttatacaaataacagacattcaattactgactcatgtcactaaaaagcccagagtatacagctttcttcagatatggcactctaacaattgcagaaatctgtctcttctcatctctttgctctcttttcccctgaagtggcctctttctcaggctgactttctcctcacagtgacccaggcttgctttttagcagtccgacaaccctctgtaaagagtgtgctgcttcccaggttgttccaggaaagattcctattggcccaactcaggtcacatgccatcattggaccaatcactgtggacaaggctttgtgctttgaatggccaggtctaagtcaggtgcctgatcctggaaccccagtgccattggttcaacttgaaccacgtggatcaagattgtgcaagggcgtttatcaaacgaaaatgaagatataattagcaaagagaaatggatgctgcaggaccaggactagagcaggcaaggaaggcaccaaaggaaaaacatttaagaagtcatttattttcaggttcgtgcagactgggttttgagtgagcacctccacagatttggtgtcctagcctcctcattcacctcacttagtcctggtcctggatgctaggtaagcaaaagacaaaatattccttacaccaatattcaaatatatctcccagagcgcctgaaatccctgccatagagattcatttctgggggttagacagagacatctctaggagtccttcaaaaaaaatttttttttcaaaaacagctagagggcaaatctttaagtcaataaaagattcgcatacacatgctaattatagactatcaagtcagtcacctcctggtccagcacgtgttgaaagctccaccccaccccaataagaaggtgtggaacactgtaaggagaggacttgcggaagagggataaatgcccaagacacaagatagtgcagaggggagccccagaaaaggagaaaaatggcattgaaagggagatacaaaatgttaagggtaactttttttcaatcacttaataacatttaatgaacactggctctaggcctacttcatcagtttgcctaaattctaccatttggggcctttgacatagtaggatgaggagagaggaagtagcaggaaagactcaggggcacagtaaatgtggaaatccctaaataagaacaatttggtggtgcacaacatctgggaaggtttatctggagctctgagtataaaactacaggaagaaagatgaatcctgcccacaggaagtccttgggtactcaggttgctggcatctttgggaagcttaattttcccctatggcaagggtttacggaaagactaggagagttatgaactgtgtgtccctcctaggcccaaggggaaaatcaatctttaaaccacaagataaatacgtcaaatgcctcttaagttttgcactaataaaggcattttttttccatccttcatatcccagtaatttaatcttccttttctaggactccagttgcctttggcaaagaaaagaacttgcataactgaaatatatctgcctctcataaaaatcacatttcaaaattttttatctacctaataataataagtttataaagcaatgattctgttattactcagaggatgcattcgagaatatggttgtccattatgtcaactcataatggatccaaacaccacctagaaaccagagtgacctggtccatagaccccagcttctgcttctaaatggcatgcatcgatatagctactctcttaaccagatgtcagtaaaccttggaattttataactcactcgtctgtttatccagcagccttctgcatataaaatagcttccacaggatatgtctacatggagagaatgtgatggccataatgtctggtgcccttagcaactgtatttttacaataactatttgctttatattccattaacaactaacaagtcaccattttggttgtttcaggctcagtgtgcttatcaagtttctgtgcccatcaaggcttaaaaccaaatggtagacaaagggcaagtctccaaaactgtgttgaccatctatgaagactcttagggacacgcagcggaccttcttccatgggtgcacacccctctcttgcctattagtctgcaaactgggaaaatcagatgctataaaatcaatgaatattttaagttcttccctggccaaagaatactatcggatgaattttttgcaaaatataataattggcagtagatttattaattaatgagtgcaataaatattcagtaccaattacactcacgcaccacctaacaatgtttcggtcaatgatgcactgcatatataataacggtctcataaaattataatggagctgaaaaattcctcttgcctagggacactgtagctgtcataacatcacagagcaatacattactcacatttgtggtgatgctggtgtaaagaaacctactatgctgccagtcatatagaagtatagcatgtacaattatgtacagtatataatacttgataatgataataaatagctatgttactggcttatgtatttattatatgtaccttttaaattatttttgagtgtactccttctacttgtattttttaaaaagttaactgtaaaacagcctcaggaaggtctttcagcagatattccagaaaaaggcattgctaccacagaagacagctccatgcatgttactgcccctgaggacctttcagtaacaaaagacatacaggtggaagacagtgatatcacatatcttgattctgtgtaggtctatgctaatatgtgtgtttgtgtcttcatttttagcaaaaaaattaaaacttttaaaaacgggacaaaagcttatcgaataaggatataaagacaaaaactatttgtacacactgtacaatatgtgttttaagctgcgttattacaaaactcaaaaagttttttaaaacttagaagtttaaaaagtaaaaatgttacagaaagctaagggtaatttactattgaaggaagaaaaatatttcttataatagcatagcctaaatgtagtgtttataaagtctacagtagtgtatagtaatatcctaggccttcacactctctcacttactcacccagagcaacttccagtcctgtaagctccattcatggtaagtgttccatacaggtataccattttttatcttttataccacatttttactataccttttctatgcttagatacacaaatacttaccattgtgttacaactgactacagtattcagaaaagtagcatactgaacaggtttgtagactaggagcaatcggctatataccatctagcctaggcctgtagtaggtgataccatctaggtttgtgtaagtgcactctatgatgttcacacaatgacgaaattgcttgatgagacattcctcagaatatatttaataaattgcttaatgaggcattcctcagaataaatccccattgttaagtaatgcattttgctaggtgttatggaaaattccagactgaaaaaactagggtgtcatccctcgaagactgcagtccaggacaagacacacacacatgataataactcttttgaaaggcaaattgtcttaattgctgtgctaaaagtataaactactgtatagagaaagaaaatattaattgcaactaatggctaagaaaagacctcttgaaagacatggggtctgaccaaccccacaagaagctatgaggagagttgcaatccagacaaagggaaggttgactcaacaacccctttccatgggaggaacaggcctcccatgtggccgggcctctggagcttggcaagcgtatgctgtggaatttaagacccatggctgagtggagatcattgggaagactctgggatttagattacagagtttgggagtgtatggatgctttgccccatagtttatcaggattatttcaatcttaaacaaccagggctgtggtttttgaccttctctgtagaaagacacatttgcatgtatatcataaggtatcccgatccctctttcatttgttttatttctttaatctacctaaattaagacctgaaaactcaagatcttccaagttatgagccccataagaacccatggcttccaggcggaggggaaagataccaccttttctataaactgagacaagatggcaaaagaattgcctagaagcctagtccaggtgctgttttctcagctactcaaagagatccttcttgctcctttaggaaagggggattcctagacctctccaaacctcaatcaccctgggatgcacagatgccaagggctcgggtgtaacccttaaaatccccgcttcccgggggtcagcggcaccatcagcagcaccgcagtatagaagttccggtccttccagctgctgggattctcagcttgaactcttccaggaaacaagttcttttccgcttctcttgcgaaatccagcagaccgtcccgcccttctctggcttcttatagcagcgagagccacaagccacagcgctgagctgcaggcgcggcgaaacttccctctacccgcccggcccgcggcgcgcaccgttggcgctggacgcttcctccttggaagcgcctctccctcaggtgggtcacttttcgccacaaggctcccgtcccttatctgcttcagctcacctccagtccctgctgctaggaccccactccccagcccatcgcactgaagaacaggtgcttgcaaactccccgccgcgccccggcatcactttagaggaaagtcacctgaggctgctccgcgattcagcaagcttctaacttcctggagtttaaggctcatccctaccccagggtgcagacaagcccaaagggggaaaattaaggggttagattcttctctgcatcttacttctggattggcgcactcttggggcgcccatcaaaaagtaggctggaagaatgtggctttagcagtcagtctccaaggtctcagatccgaggctgcttcttgaccaggcactaaaaatttgtcctgatacctgcaaccacttccatttttttatcttgatttaaatttcctcttgcaatttaaaggttatttttctggaggaagattgttcagaatataatttattgtgaagagtaaataaagcctcagttccgtttgtttgtccagagacagaattttattattctttttcccacctctagatggtaatttaggaactttctttaaaagattggtgtactgaggctgggtacggtggctcaagcctgttatcccaacactttgggaggccaaggccgatggatcacttgaggtcaggagttcgagaccagcctggccaacatagtgcaacccagtctctactaaaaatacaaaaattagccaggcgtggtggcaggtgcctgtaatcccagctacacaggaggctgagacaggaaaatcacttgaacctgggaggtggaggttgcagtgagctgagaaagtgaattggatagagaatgggggaggggaggaagaatactattcc

SEQ ID NO: 11438 - DNA, 6000 bp, Homo sapiens
taataggaaaactgattctctcagcacaatcctgtacagtccaattctgtttcttgtttgttttttgagacggagtctcactctgtcgcccaggctggagtgcagtggcacaatctcagctcactgcaacctccacctcttgggttcaagtgattctcctgcctcagcttctcaagtagctgggactacgggcacataccaccatgcctggctaatttttttttttgtagttttagtagagacgggtttcaccattctggccaggctggtcttgaactcctctcctcgtgatccacatgccttggcctcccaaagtgctgggattaaaggcataaaccaccatgcccaacccattctgttaagagtaggaaaatcagtgtagatttatctgcacttagggaaatgtttgtcttcccttacctgaatttgcattgtcccagcactgaaaaatgtttgtccttggagagtgtgtgtgcgcttggttcagtaagttaccagaaaactataagaagaatgaagatgaacattttctttgcatactgttgtagagacttgagggacctagacttgaggtgccaaatgggaccgttttcctgaaccacctcctacggaaaaaatcagatttattatgttttgcataattgtgtcttatgaattgctctgctggtgaaaggtagagttggggtttggagtgttgtggggtgggctgtggatgccagagggagaccaatccctgtgggtaggcattacagttttcctgcaagggaatgggactttttttttttttaatggggagggattaaagaaagcccattcactgaggagcagcagagaggtaaacttcagacaggacaactgctctgtgtctatgaagggaacctgaaaccgcctttgcaaaattatgactgagacaatgaaagagatttaacttaaccaactccatcttgcttatttttttatttttatttttattgagacagagtctcactgtgttgcccaggctggagtgcagtggtgctatctcggctcactgcaacctctgcctcccaggttcaagtgattctcctgcctcagcctcctcagtagctggtattacaggcgcccaccaccacgcccagctaatttttgtatttttagaagagatggggtttccccatgttggccaggctggtttcaaactcctgacctcaaatgatccacccacctcggcctcccaaaatgttgagattacaggtgtgagccaccatgcccagccagactccatcttgcttctaacctccaagctgtctttgttcattcctgggtgtaggctgaacgaactttgggagaaactaacttagtttgtagtttatagtttaaacaaagacagtaacagccctttctcaaaacaggcctccttcttgcctgggaactatactaacattagccacaggattaaaaattatgacttaggagtcatgcagctggaggctgtaagattctgaccctccctaaactgctcttaagatcagtgtttgagatattttgcagaccctgcacttgatggatcagctggcaccaccgactaataaactggcttatctgatgttgtggcctccactcaggaactgactgaaggcaggaagacagcttcaactccctgtgatttcacccctgaccaatcaccacacctggctcactggctaccccccaactcccacccaccaagttatccttaaaaactctgctctccaaatgctcagggagactgatttgagtaataaaactccagtctcccacacagctggctctgcgtgaattactttattgcaactcccctgccttgatgaattggctctgtctaggcagcaggcaaggtgaaccccttgggtggttacattaggacttaaaataataaattattaagaaccctagagagtcatttttttaaatggattatatctatcaaaacttacagtattacaaattaaaataaatgaaaatgtttattgaaaataattatttacataaataatgtcatttcatgaatatagctatattttcttttttttttttttcgagacggtgtcttgctctgtcactcaggctggagtgcagtggcacaatctcggctcactgcaacctccaccttgcgagttcaagcgattctcctgcctcagcctcctgagtagctgggattacaggcacgcgccaccatgcctggctaatttttgtatttttagtagagatggtgtttcaccatgttggtcaggctggtctcaaactcctgaacttgtgatctacccaccagggcctcccaaagtggtgggattacaggagtaagccaccgcacccggcctatagctatattttcaaaaataaaatattagtgagaagaatggcatagttttagatttttgtaaatctcttttacacctggcttaatagaagactgttgggttcttttttcttttttaattttttatttccatagggttttaagaaatgtggtatttggttacatgagtaagttctttagtggtgatttgtgagattttggtgcaaccatcgccgagtagtatacactgaacccaatttgtaatcttttatccctcacccccttccaccctttccctgagtccccatagtccattgtgtcattcttatgcctttgcatcctcatagcttagctctcacttaggagtgagaacatatgatgttttgttttccattcctgagttacttcacttagaataatagtcttcaatcccatccaggttgctgaaaatgccattcattcattcctttttgtgaccacgtagcattccattccatatataaatatataaatatatatttatatatatcacagtttctttcttttttttttttttttttttgagacagagttttgctcttgttgcccaggctggagtacagtgacgcaatctcggctcactgcaacctttgcctcccaggttcaagtgattctcctgcctcagcctcccgagtagctgggattaaaggcgtctgccaccacgtccggctaatattttgtatttttagtagagacgaggtttcatcatgttggtgaggctggtctcgaactcttgacctcaggtgatcctcccgcctcggcctcccaaagtgcagggattacaggcgtgagccaccgcgactggacggaagaaacggtgaaacttttaaggtggtagaattataggatctgatgactgattagatgaagcatggagagggcaacagtgtgcacagtgatgccttttcttcacaggcattataggagggacaggttggtaggaggaggcaacgggtttagttttggatttactgaccggggatgagtgttagctctctaggtagaggtgttccgcaggcaactggtgttgcgggacaaatcatagacgggagagaccgagcagagttcaggagagcctttattattaaggtgatcaccggctcagtcggactagggtccagaaagtctgagccccgaacaaagggatcaatcaccttttaagcagtttgtgttgggagttacgtgttgcatgaagtgtacttgcagaagcaagaacaaaggcagtaaattactcttacatttgttacaccatatgtcttacgtccttgggaatacatgcttttgtaacacttgctaatcagttttgtgactttacagcagcgctagggagggaagcaagaactcgctgtgcctcaaggaatgtgaaacgatggaacacagataagcctctccacgcataggggagaaataagcagttaatatactcttaacccaggccttgggtaggggaggtgctatattacattctacctcaaaggaaaagaatatacttcttgattagtatacttataaaattcattaatttccctttcactggatattcctactaattcccccagggccttgcagttttgtctcattcgctgctctatcccctagcttagcacaaaacctagttcttaacattgattaaataaatgaatccggtcaggtgctcccgtgggtgatctggaaggagttaaatttggtagtcatgggagacgcttctgtgaagccataggagcgaagattgattgtggcggcaggactgaactcagcttctgaatctttctagccgctaaacctacagactaagtggcgtccttggggaatgctgcctcaaacggctcgcgacgtcctaaaacatgtacatttattttggaaaatctgttttcgtaaaacctagcatacttaatcaccaacatttgttaacttcatggtggcatattaatacctgtcaggttgattttagttggagtgggacggggctgacctcaccgtcctacccttcggtatgaggccggcgtcttcacgacctcgcttttcacaaccccagtccccgagggcttatttggggctgtcggagtccccaagacgtggccccggagaagggtgaggtgccacagttcgaggtgccccagtaccctgcgtccggacagggggcggtgctcacgcccaaggccccgctgacgcgatgtaggccgagatcacctcaggcgctcgcggtgcaatcacagagcgcgccgtcgccgctcgagctcgccctgagatccctccgctcagcgccttcaacgccgtgtcccggcaccccgcacccgggcacacaaaaaacgggtcgcccgcgattctcagggattgatcgcctcttcaggtaagttatcttccggccccgtaccactgtgccacaggcgcagcccgcttcctcaggtgccctatcccgcgcaagaagaccacggcttcacagagtgttatttaaggggcgtggccagcggaacatcccgccccattctgtgacgcacggggtggcgcgcgtgggacccgaggggtggggctgggtttagtaggagacctggggcaaggccccctgtggacgaccatctgccagcttctctcgttccgtcgattgggaggagcggtggcgacctcggccttcagtgtttccgacggagtgaatggcggcggcggctgggatgctgctgctgggcttgctgcaggcgggtgggtcggtgctgggccaggcgatggagaaggtgacaggcggcaacctcttgtccatgctgctgatcgcctgcgccttcaccctcagcctggtctacctgatccgtctggccgccggccacctggtccagctgcccgcaggggtggtacgtacattctttagggtctgagtggggcgcgcgccgcagctgaggcggccgaagggctggcgtgggcggctccgtggccccgaccggctcagtggatggcaagggcgggggcgactgcggccatgcttggcgtggctttggtggcaggcgcgctgggggctggagtagtggctgcggcggcggcactgctgctggtggcgctggctgtagcacccgccattgccttgtgttggggggcggtgctggcctccccggctgtgtatctgatcctagacggggtcgtggttgcggcatttgtggttgtagcggtctgtactgaccgcagcagtggtgcccctagtggcggtggctggattggcggctgtgggtttgaacgacccggtggtcgttggggcccttggtgggggtcctgacggagatgctgttggcagctggcccgtcatcctggaggctgccctgtgtggttcagtgttctgtgggctgtagcagtgcccctaatggtggtttatacccatattaaggaggatgtgtagagtgtggtaatggtagtgactggagtgtggtaagggccttcctctgatgctaataatgtaacagtttctcggccgggagcagtggctcacgcctgtaatcccagcacttcgggaggccgaagcgggcggatcacctgaggtcaggagttccagaccagcctgaacaacatggagaaaccccatctctactaaaatacaacaaaacaaaacaaaaattagctggatgtggtggcacacgcctgtagtcccagctgcttgggaagct

SEQ ID NO: 11439 - DNA, 6000 bp, Homo sapiens
cccttattttgtctttaattcatctctaataatataggcaggtcacaaactttctgagacttagtttcctcacccagaaaaattaggacccaggtcagataatgtcaaaggtctttctccacattaatattttataatttcctttgccacacaaacatacaagttttcctggtgctatttatttacttatcttacaagttagagttcaatgtctgcagatgactggggattctcaacagctctcttaccagatttctgagtaagttttccaagagttttcccactttatttctctccatcactatgtggtagaacaggcatgtgggggcatttagccaattgctggtcaaaagtagaacttctccatgattagcagtgacaactatatgatttgacaactgcaaatcataactgcttctcactgcattctggtcaaagccttaattccttagcatgggacacaaggccctccatgattcacttcttacccacttttctaaacttatctctcactgaaacctttgggctttggttatactgtattaattaaagttccttaaatgcatgatgctcatttattcctctaaacatttaaacatcttgcctggcttgcctttccatcttttcctctcccatttagttaacgtctacttatcctttaaaattcagccacttctcacatactataggaagtcttctatgaaccaatatttctcccttctcaacccagattatgtagtgtgctgcagagaaccctgtggttcacagttactgaatactgtgatggtttacttgcctctcctaccactagactgggaattgcatgatgacacacctggcagagtgcctgacacacaggaggcatttagcaatatgctttccatacctttattttcagtagtttttactacatatgccttccgcatttgtagtttttttctagtttcttcaactgtttcaaattctggagcatagcacacatgaagcaatccaccgaagaaactctgttcatccatttttctcttggctgtcctgaatggaaatacaagatagcatagttttttaatctagatttacttgggatgaaagcttaactagtatgcaatatctggatctaaagagcaaagtccagcttttgctacgtgtatatatatcctgtggattgggaattaagatgctctgcttgtggacagtattcatcccattgatcgagtatgtactcgtagagcctcccctttccttccctttgagcctctttgttccctagtctttaaacaactaaggacccagctggttggcctgaagtatgtaaactgtggtcataaaatggagcttttctctgtggccctgaagagttggttcatacccaattaagctttttcagcactatgtatttctgtgatgggattcatgccttaaaaatcagatgaaagatactataatcataaaacattcaataactgaggaactattaaatatataacaatgagaaaatgagaagaatgttattcagtcaataaatacttactaaacatctatgactggccaggtactacaataaatttaactacttctatatccagggataatgataaatacttgttgagatttcaccatatgccaggcaatgtcataagcgcttcacttgaattaacacctaaaaacaacactgtaatgaaactgaagcactgggacattatgtaacttagccatgctcatagtctggtttgaggagcaaggattcaaatccagatgtcttacttcagagcctaccagactacgtactatagaaaacagaaaagctctagaaaatgtttccctaaccatgggagctggcaggttggttaagaaagtgaaattacatataacagcagcctgagaaaaccacacaagacccagtaaaatcaagtgcttttgtggtagactatgagttctactgatagcacaagaaagaaaatatgaattgtaatagccagagaaggatgggtctcagagcagattagtgaggagaacagagatcaatataaaaatagataaggcactgcatacttcagcctttttggagcagaggattatgtcacatagaaggctggaaaaaactgagtcagtttgcagaaaggagtaacagtagaaaccacaatagctaatgtttactgtattctgaccaggatacacctttatatggattatctcatttcatcctcatacaaccccaagaagtagataggtccctttaccatacagattttatggaagaggaaaaacttaaacaggttaaataacttgcccaagatcatgaagctagtaagcagtggaaatggaaaacttactccaaacccaactttttttttcttttgagacagagtctcactccatcacccaggatggagtgtagtggcccataagactcactgcaacctccacctcctgggctcaactgattctcctacctcggcctcccaagtagctggaactacaggaatgcaccaacacacccagcttgatttttgtatttttacaaaatacaaaatactggccatgttggccagtctggtctcgaactcctgggctcaagcaatctgcctaccttggccttccaaagtgctgggatcaaatccaactttttctttttttttttttgagacagtctcactcttgcccaggctggagtgcaatggcatgatcttggctcactgcaacctccactttctgggttcaagtgatacttgtgcctcagcctccccaggagctgggattaaaggtttgcaccaacacagccggctaatttttgtatttagtagagtgagggtttcaccatgttggccagactggtcttgaactcctgacctcaggtgatccacctacctcgacctcccaaagtgctgggattacaggtgtgagccacgtgcctggcgtcaaaccagaatttttttttttttttgagacagagccttgctctgtcatctaggctggagggcagtggcatgatctctgctcactgcaatctccacctcccaggttcaagcaattcccatgcctcagccacctgagtagctgggactacaggtccgcaccaccacacccggctaatttttgtatttttagtagaggaggggtttccatcatgttggccaggcttgtcttgaacccctgacctcaagtgatctgcctgcctcggtctcccaaagtgctgggattacaggcgtgagtcaccacgcccaggcttcaaacccaaattttttttttttttttttttttgaggcagagcttccctcttgttgccctgtctggagtgcaatggcgcaatctcggctcactgcaacctctgcctcccggtttcaagcgattctcctgcctcagcctcccgagtagctgggattacaggcctgcgccactagacccagctaattttgtatttttagtagagaggggggtttcaccatgttggccaggctggtctcaaactcctgacctcgtgatccgcccacctcggtctcccagagtgctgggattgcaggcgtgagccaccgtgcctggccaaacccaacttctactctaccaagctacaggacattaaattgttaagcatgggaatgatgtgatggatacagtgtttcagtaaagttaacttttaaaaaggctggaggaagatatgctagattacgttttggggtaattcagttatgaatgagggaaacttggggccaaaatgacagaaatatgaatggaagaaatgaggaaatgagtcatttcttaacttgcacattaccttgcactttgtaagttcataaatttaataagataaacttcagtaaagtcttctgctgggtattcatctagagcattgtactgttcaattgcaccatataaagcgaatcgctcaactaattccttcatgactcccacagcaggaactccttgtattaataagtactgagattccaaattgattgtatatacctgaaagaaatgcagagttattaaacgtatttcgcaaataagcctaggacgaatctgcctctatttttttttaaagagaactttgaaaacaagaaataatctgttcaacccagtcagcaaaagaacacaaaatgaaatttctgccattccttctgcataaagaataacagtccatgtgagaggctacctaaggcatataacagactaccttcagtcgacatttttttccagaaattgagtcggtagaagtcactgggaacaatcactcaacgaatattcactgagtgcttacctgtgccaagtagtactgtaaacacagaagatccaatgactaaaaccaaggcctattctcgtggagttgatgttctaatacttgaccaaaggcgtcgtgagaatctttggtaactgaccgagggttcttcacgccagctctaacgagagacagatctgacggaagccttgtcgtgcctttatttccgtaggctggtcatatggcgctagcactcacataaagctaccgaggagagcgaatgaaaccaaaatcactttaccttcacagcacgaggccgtcgtccctctcgatatttggcccgtgtgtcgcataccgccctctggacgtggtgatcaaataaactccctagctccccgccgctcgacgccatcttgcctactttgatcctcgcagggaggacaacatccgccctactgagctcccttttatccaataagagagcgggatgagttaaggagtgccaggattggctggagaatcgacagcgtcggccatcgtttcctgcgtgcgaagatttgatgaacgaggtgccgcccccgagcggctcggcggagaggcgcggtgggtgacagaagctttcttgtcccacccactacaggcttacggcaggatgcgcagcggggagagggggcggggccgcagggggcggggccgatcgatctcctccggctccgacgtcctcggcctgccgggtcccgggtcctttgcggcgctagggtgggcgaacccagagcgacgctccgggacgatgtggggcagcgatcgcctggcgggtgctgggggaggcggggcggcagtgactgtggccttcaccaacgctcgcgactgcttcctccacctgccgcggcgtctcgtggcccagctgcatctgctgcaggtaacctgccggccccgagccacctgatcttcagcctggggtcggacgaggccgaagcctctcagggacgcggcgggacaccggctgccacccgggcgccgccgaagcgcgcagagatcagggtccctcgacggcagggcccttctgggtagtctctggatcccacaagtccagtgcagccctgggctcgtcttatcccaggtcttttcacttggtgaaactgaacctagaaacgtcctaatattctaccactgtttttataaatattccttattccaggctggaaaagctcctgagaagtggtttgtttttattattttaaaaggtgttttccttgccagccatttccagttaacctgcgctgctgccgtccgggccgcgagagcgggacgcagagttgttggcggagcccctgtcggttcccggggactaagcaccgcgtcccatgagcgggaaaggttaatacaatgatggttctgccctgcgtcgctgacgcggaacacagctgtagtgtgttaggaacacataacgtagttaagatcacttgaagctctgcgatcagtcgcccttctggacgttgtggttaggatgtttcacagttctaaccactggtggagatacagcgtccatattttcataattaaaaatagaggcacatggtctcacgagtttgagtgtacttatgggggcaaaaggacggcgtatttgaaatcctcataaatcctggatgcatggtacccaccagtggctaatctatgcaatgaatagagtttgcaataatttcaagcatcccttctttccacttgagttacttccccatacctaggggaagatatttttggtccactgaaaacatgagttcagcagaatc

SEQ ID NO: 11440 - DNA, 6000 bp, Homo sapiens
gtagtttaaatgtatcactatgataattcaatatacttattgaataataaatgctattaaaataaaatgactatcaacttgactaaattagtcttgaatgatagataatgcagagaatttaaaaatatacaacaccgacatattctaggcaatgaaaattaaacctatcttctttaatctcaaattatgttttagaaatgtcaaagatgtcttcaaaattggaatattaaaagggcagcctatgcaaagtactcattttaaaatttatctttatagtactgttctgctgtggggccggatattcagacaaaaaaaatcacagctactgattaactgatattaaggaaggaatcatttcccagaatgagaacttagtaatacattagaattgctggaagtgtgaaacattgtgccatgaaacacagaaaaagcctcatccctgaagttatgccccatcactcatgtttgctggcatcatgcccaccttgaggacagtttttcttactgcttatacacactagagttttactcatctatggctcgtcaaccacaataataatttacttcagacagaaactggcttggtcagtggtttgagagaagtgcgcaacttaccacctcttccctttcttctttcctttctcttggggcagtacctgtatactctactctcttgcttccctgtgaatttcactgctcaatttaaatgtttcattttaattctatctgtggatatatatgtcctctgtattcactcattccctcctttttctctaccaattatggccctatttcctttgaaaatttctttctgaggaccagggccaggttcaggggcctgcaacctttgcagttgcataaggttccttaatcagaaggcccccaaacttggcttaatgctctgtggtcactgtcttgaaattcttaataattttacctttggccttaagttttgtatataaagtcttatggaacaagagatagtgcccacgattgcaggagatatgtacaacatgcattttcattgttctttgccacttcatttgaatattacatttgcagtgacccaggaacacagaatgccagtggacccatgacgcatgggagttcagaaacactcaaaaagagtacaaaaggtgtgttaagtttgtgtcagaataagtatggacactgacagccccaaaaggccacgtgctctgcttgaaccagaacttcttccacagaaagaagaaaatgaccaaggaactctatcacatacttttttatcttacattgttgtgttagccaattgtattaaaaatgatggcataaaaggaaaagaatagataaggcaaccccttgctctctttcttttaagtccctcctaactcatcagtaggctgaaggtagaatgttggtagagtatgtgcctgtcaagacatgaaataaaatctgttgacttagttttgatgcagtgttttgactgctctgccatggtaagaatgaaatacagattcatgtgtgaggtatctatttaggccattcttgcatttttataaagacgtacctgagactgggtaatttataaagaaaagaggtttaattgacacatgtttctgcaggcagtacaggaagcatagtgccagcatctgctcagcttctggtaatgcctcaaggagctcttactcatagcagaaggtgaagcgggagagggcaggttacttggtgagagtgggacccagagagacaggaggtggtgccacatacttttagacatcagatctcgtgtgaactcactcaaggggatggtgctaagttattcatgtgggatctgcctccatgatccaaacatttcccaccaggacttacttccaacactggggattacatttcaacatgatgtttagttgggacaaatatccaaaccatatcaaagtacaaaataccaaatgtgtaattttagtgatttcacgagtagcgtgctcttatgtttgcatttaaaactgtcattgcacaatataaagatcaagggtaaaattaatgctaataatttatttttttctttactcagaagaatattaaatagcaaataaaaacaccatgacaagttggtgtggggaggggaggaacgatggtagggagattacagaagaaaacagaagaaagagaagttttgtatcttaatacctttaactgaacttttcccctgttttctgaactagaggcacaacattttcattttgccctgagccccacaaattatgtgtctggctctgctgaggactttaaggttggaattgtgtgcctaatttttacaaactatggctgaaaagcttgccatcagtgctagtaatattcccaaattatggaaaagacagatcaaattggtgactttttgcaaactccttgaaaatattcttcgcattcttaaaacttttaagtaaaactcattctttctcaaacatgaataaccaaaataatttttaaacactctatttcttctttaatggctttgctttattttatcacaagtattacaacattattttccttctattggtcttgaaaatacgcggtatttctgctgtcctatgggttacacagactttgattggccagcatagtaactctaacagccatgtgttttctgggctgagttgggaacctgaccatcatttcagtcttcagggaaaatgtgctttaaataccaaacaacaaacttagaaacaaactttgtcccatagcttgtttgtaaatcaagagctttttgtttctagtttacattttgtgacagttcaaatatgatacccgagatactgaatttgcttcatgattgaaaaatgtgttaatgtttattgaaccagttttgagagcttggtatgctcttttcccttggattggacttgaaatttggtcaggaagaggtaggacaaatgggcaggcaggaagcagacagataggagaaagaaaagttccaattttgcacctcgattcagacatttcctgcttttattcttgcttttgtaattactagaaggaatacttaatattattttaagtaatttttagtcctttatctcctagagacctacaaacattagatgttttctgtgagactatcctgtgagaatagagaagaggttctaaatgctattcatctctgtgaaatttatttgctttcaatcagtaagaaaagttaaggattttaatttaaaaaggaaaaagcacaacgagaaaagtgaaaatgattccctctgatcgctaatgtcaactatggtcacatttaataattctttttctgcacattgagttcatttttcctgcctcttcctttgagtgcaaatttttttcagatgacattatcctaatttgatactagcaacgttagctaaaaacaataattggattttttaggtaacaacttcaatatgaactagctttgccttacttcagttatattcttagtacattatatatgttttccttttaactacatttcattcttatgtcttcctaccatgtaaaggaagcagtatattttatgtaatctaaatgattagttctagtaaatattaccatattttcaaaaataacgatttctacatttccatcagcaagccttctgtaaggcaatttttaaacgttttaattatagaacatgcatttttttaaccaaaggactgtcacagattttaagttataaagggatacctagctatcatttcttttattgaatctccatcttttatttgtaataattgtccctgatattatgcttatttaatttcattgcttttagaaaatggcggttttattttaatgatttttttctatcaaaacactattggataaagcctccttcccaggttaataactcttattaaaaattgttttcatgtgttttttacaaaagcaacttaacgcagagacttatgccagtattatagtcaatgttaataatgtcctgggaaactatgaggaaacgctaaatgatcaaagatcacatattcggaaatctctagtgtggagacgattccactgccatatatacagcagcaacaacaaaaccgcagacacccagtgaattttgatcacctactgtgtatcaggtttttttgttttcccttcaaaaaccacgatttcatcgtattctcacgataaatcctctgagataaaatgaaattctaggattaacctcgataccagtaacacctccaactcgccaacaagttttaaacccctaattggcacactgccttgtgtaagcagtatttcaataagctttgtgtaagttaaaaaaaaaaaagtgggagagcgtttaggggtcctttggtccccataacaactaaaagtcttggttctttctagaagtacaacagatgcagtaacagggaactaactattcagtgcctctgaccagatcccgcagcctttcctagtctgctctcatctgagcaggagtcctactcaaaggaacctggttttctttcctttactggatactacaaggcacaaatcggttacttctgtgggtgtcggattacttgtttgtaaactgagaaacctggacaaagttttctctaactttccctgaatcgtctctggaggtgagagggagttcgaggctaaatcaggaaagataccccaaccatcctcttgtgggtggggaggagcagatctgctgggttaaacttggtggtcaacaaactgaaagcagcgacccgcgggctgcgagcggaacagcgggaacgttggatcagagacccagaatcagagccgcagtcgaagccgcccccttttccggacgccccgtccgctcctggaaccgggttcacatcacgccctcagcaacacgttatgcgttggtgaactacatttcccagaatgcctttcaaccttcttcccagggctccaatgagcgccgtggtgacgccatcatccggcgcggtgtttagactccactgatgtcgtggcgctttaggggaagaagttggtgtttcgctgggccctggtactgaagacgcggtccgggtcgcccctagctgtttcctactcacccaaagccccgcacccgccttttctctctctcctctggcaggatgaggcgtgcaggcctgggtaagaagagggctgaggttcgaagttcggggccctagaaccgggagcgctggggcgcgggaggaaatcgaacctgtcttatgttcctggcatttggtccaaaaaacaggatgtctagaggggatctttggggtccatgtcgagtggaaacacaccatttgtcccagatctttggaatttccttaagtttgagtcagattcaagtttggatggtaggctagagaaagtagtggactaggggtgggtgtgtacaggtggcatctcagtggtcgagtgttttagtgttattgactgagcgtggttatggacgctgctatgttttccaaagcccgactccggtttctgtttccctactggccctggatcttagtttcttcagaagcggaatttgaagagtgggtggttgcacccaaagcacgctagtaatggtcgttaatctggtaacagtgagttacaaaggtaaatgtatgtgtcattattgttaaaggtcctggaactggaacttctgggtcaaaggcgatttcttaatctgaaccttgtgccacggttaaggcagtagaacgtggttaaggtttggcgacttaacatttgatctttacctttggggttaggaaactggctcatcagcaagaataagttagacacaaggaattttaatggacccttatagtaacgcacagctactagaacggcattttctggttctgaagctttctcttaggacacgattttttttttaaagaagaccccgctaaattagagtgcagtatacttcagaaaataaatgaaacatttgaaaaaagatattacctttctcagtcattataagattgaaaaaagaaaaaaaaaatccccaaagtgtcagatatttaaagtcagtgaaagttgccaataaccgtagac

SEQ ID NO: 11441 - DNA, 6000 bp, Homo sapiens
ctgctgttctcatgataatgagtgataatgagtaagttctcatgagatcttatggtttcataaggggcttttcccctttgctcagcacttctcctttctgctgccacgtgaaggacatgtttgcttccccttctgtcatgattgtaagtttcctaaggcctctccagccatgctgaactgtgagtcaatgaaacctctttcctttataaattacccagtcttgggtatgtctttattagtagcatgagaacaaactaatacgtaggtactggggagttaagacttttggatgacacaatttaatccataacagggccttttcagtcaaaattcagtgccagctactgttaatggtaggaaagagggtaatctgggaatagtgaagagggacaaatatcaggagggcatgtaagcctgtaatgataagaaaaaatgaaagatacctagccagttcacactttatcttcttagatgatgtttcacatcatgctgttatttacagatgaaatggagcccagggagcatctttgacttctttatttctaggttcatgacagtttaatatttttaaaatttcatattttgaggaattctagaatgaggaggggagcttaatcaagtaagtatgactccaaatgtaaattgaaatatacttttacaatatgtatccatagtgtggtaggtttggtaaactgaatgataggccccctaaatatgtccatgtcctgatcctaatccctagagattttgaatggtactttatgcagtacagacttggcagatgtgatcaaattaagtatctggagatggagagagtactttggattatctaggtgggctctaaatgcaatcacacatgtccttataaaaaggaggtagaggaaggttacagacagacaggtcatgtgataaaagcagagtcagatatatggtgctatgcccattggctctgaaggtgaagaagggtgccatgagcccttagacaagacaaagaaacatcattctcctgtaaagcctctgagagagaacagtcctgctgacactttgattttagccccacaagactcacttcggacatctggccttcataatggtaagagaacaaatttctattgttttaagctaccaagtttgtggtaatttgttatggcagccacaggaaactaacacagagtataattcatcgttttaaatgcaaaaatatggtcaggtgggtggttcatgcctataatttcggcactttgggaggccaaggtgagtggatcacttgagtccagtagttcaagaccaggctgggcaacctggtaaaaccccatctctaccaaaatatacaaaaattagctgggcatggtggtgtgtgcctgtggtcccagcgacttgggaggctgaaatgggaggatcaattgagccccagagatcaaggctgcagtgagctgagatcacgctactgcactccaacctgggcaacagtcttaaaaataaatacataaacaaaataggccaggcgcaatgactcatgcctgtagccccagcactttaggaagctgaggcaggaggattgcttgagcccaggagtctgagaccagcctgggcaacatggcaaaaccccatctctaccaaaaaatataaatttagatgggtatggcagtgcatgcctgtggttccaactacttgggaggctgaggtgagaggatcctttgagcccaagaggaggaggttgcaatgagctgagatcacaccactgcactccagcctgggcaacagggtgagaccctgtctcaagaaatacaaaaacaaaaaataaagtaaaataaatatgtcttgatacacacacataagcacagcaagacatgaaaaaatacagtagaatgttaacaatggctaactctattgataggattatcagtgattttttggccattactatgattttctgaattttcaaaaatgtcaagaagaagtataatggactttttctattaaaaaaattaatggaatattgttcaaccttgaagaggaaggaaattctgacacatgctatataacatgtatgaaggttgaagacattatgctacaaaacacaaataccatatgattccatttattaggtacctagagtagtcagatttataggagcaaagtagaatggtggttgtcagggggttgggagatggagtggttgtttaatgagtacagagtttcagctttgcaagatgaaaagagttctggagattggctgcacaacaatgtgaaagtatttcactactaaactgtacatttcaaaatggtcaagatggtacattttatgtatattttattacattaaaaattttttgtttcatttacattataaaaggagagctttaatgatgcccttaaaaataaatacgtggtacatgatgtaattttgttctttacatgaggttgtattttctcacctccttttacactccccttgtggcagctggggccatcctccacaggagcttcagacttgtccccttgtcataattttctctaacaattctcctggttttccttttgtcttttttttttttttactttttgctgatctttcttctctgcctatgaacatggtcaagtcttctgggctttgttgaaccttttgagagtaggttaaatagttgcttctttctgtaatgcttctttcttaagcttctacaacataatttgtatgttggacatacattctccttacagacagactcacacacctcaaaacactcctcttgaattaccaatctcaggtgtttttccagacacccataccacaagtctatgtgcaatatggcacaactccctttttccgtcccaaccccactaattttaccttctatgtattcctctagtcctagcccatccccagcctgtctcgtctggacatcctggtagttcagttggaacccatcctccatactgcaagcagtgttttagtccattttgtgttgctgtaagggaattcctgagactagaagaacaggacggaaatgtatttctcacagttctagacgctaggaagtccaagatcaaagtgctggcaggttacggcctggtttctctgcttccaagatggctctttgaatgctgtgtccttcaaaggtgaggaatgctatgttcttatatggcaaaagagcagaagagcaagagagagtgaacccactccccaaacctctttttatggcagcattaatccatttatgagggcagagcccttgtgatgaaaatacctccccaaggacccaaccttccaacactgatgcattagagattgtatccaacacatcaattttggggggcacattcagaccatagagagatctttctatatcgaaaacctagtcatgctgcttcctgacttaaaacccttcagttaaggtgcatacccttcagcaaggcgcctaagacccaccatgacacagcccctacctgctgggccagactccttccactagtcgtgccactgccccaatcccatagctcaagatcaagttaccttttgatatggtttgaccgtgtcactacccaaatctcatcttaaattgtagttcccataatccccacatgtcatgggaaggacccggtgagagacaacggaatcatgggggcggttactcccatgctgttcttgtgatagtgagttcttatgagatctgatggttttacaaggggctttcccccctttgcttggcactcattctctctcctgcaaccctgtaaagaggtgccttccaccacaactgtaagtttcctgaggtctcccaaaccatgcgaaactgagtcaattaaatcttttggtttataaattacccagtctcaggtatttcttcatagtggcatgagaattctcagtattcttattgagccctgggaacagtctgctgccttaacaggttatactgaagtaaacatttatgtgtctctttcccaatagccctgaagctgtttaacggttggaaccagttcttaagtcatttcggggtttccagcaccaagcacagtgcctagcacatagtaggaaggcactcaatcaacgttaatgaattaaactgattagtaataagtgctttttgctgccatattacatccacaacctacaatacattaaaagtccttttccctgatcaccactgtcttataaattttgattacaaggacagaagaatgaaatcctgatgaagaggagtaaggcctggaggtcatataagcaaattttcattaaaatgcttgtttatttattttagtagggcctatttgggggaagtcttttgacccgggccttttgacttctaccgttttaacaggtagggctgaaatggagtagtttcatgaatatacgttctgcactacattcacttgttgggttcttaagagttcaccgattttgatctaaaagtaggcgtgccagcaatatttgcaatctcgccttctaagtcaatgcttttggatcaaagtctttttggatccagtgtaaagtggagctccttcaaagggaacgcacaggggaaaaaatatccagcaaagtatgtgtcctagtggagttctcaacttccccaggccgtgcaccatctgtcgttacttgcccctcccatcggtccgagggcccagtagcccctggtatcagcagaagccagcagcttccctggtggggccacctgccctcaggtgacgggcttgcacacggccaagttacctctgcccacgccgcagaggccgccgctgctggacagcgcagcggggtcacgtgtccctgtccagccactgccccaggatctgagccctccccggctgcagggcagaggccgctggatcacgcgcaccccggcggccaaggctgggcccagccaatgggcgggcagcatccacatgacccgcgccggcgggagggcgtggggaggcaggccaggaacgcacgctgcctggccgtatcgccgcccccaccgccgccgccgccgggactagaagtgagccgcccgggtcccaaacgccagccagccagtcagtgggtcccgcagtcgcccgcaaccggggcgaatcatggcggccgccaaggtaaccgcgggcccgaggccggggggagcgcgcctgccggatcagcctgggggtgcgagaggctcgggcgctcacgtgtctgggttggtgccacaggcggagcaaaatggggtgccgggcagccgttccaccttgcggctgctggagggagggggccactcctcccgggcagcacaggcggtcggtgcagagaccgaggcccgacctcgcagcggaaactttgtgggccggacactcccacttggccggggagggaagttggtgcctgacggggctgagccagggccgacgaggaggagcgggcgcgactggggcctggtgcaccctgggccggcaagcgctgggggtcctctctaccttcccagcgcgctcctgctcctgaccccgctggttgttgactccggcttcttccaggggccagagcccgggctgaagcctgatcctattacgtttcaagggctccgccctcccgcgggtggggaagttactttgacttccgttttggaaactgcctaggagacttggtctgcgcctttgtgaataaaaagtccagggactctccccctccccgctttcccatcattcccatcttccccctccctctctccatctgacaacacttagatacccgcctcggagcatttgagaggcttctttttgggaacgatgaaacagattgtcctgggagcctgtcactcctgtgaagttgtacttgaaaggggttctgtgtaatgtgaatcattcactaacccagaggaaaggcaactccaacacttgacctttcctctttcaccatttcttgaaacctggacaccatttcagtctctttggactgcatttcaacttctctggcagaataccatatttagtcccaatcacttgaatcatttggaatttattgcttttaatttaagttcacgaaggcagccc

SEQ ID NO: 11442 - DNA, 6000 bp, Homo sapiens
acttgggaatataaaggaagtgaccaaatcagtgcttgggaagtagatttggcttctttgtttctcacaggacaatctcagccacccctagttagcaccattaactcctcctgagctctgataaaagaatcaaaatttctcaataatttcatccaaaattattaatgaaaataagaattattttgatggctctaacagtgacatttatatcatctgttttatctggagcattctataataagtttatattaagcaaatcaataaaaacctcttacaaaagtatcatcggatactttcctgaacattaaggagaaatctatagaactgaatgaatgagaaccaacaagtaaatatatgtgatcattgtaaccattgttggtgtggggcatttgtcagaactccaatgtgattattaacataggtgagaattaatccactgtgactttgcccattgcttagaaagaacattcatagtttaattatgccttttttgaccaagcacagtggctcatgcctgtaatcccagcactttgggaggccgaggtgggtggatcacctgaggtcaggagttcgagaccagcctgaccaacatggtgaaaccccatctctactaaaaatacaaaaattagctaggtgtggtggtatgcacctataatctcagctacccaggaggctgaggcaggagaatcacttgaacctggaggcagaggttgcagtgagccgagacgcaccattacactccagcctgggtgacagagtgagattccatctcaaaaaaaaaaaaaaaaaattatgcctttttgaagcacatacattttataacatacaactgaatcccttattatattattagttttgatttaatgttttcaaaccatctcccctgatatttctgggagatgggaaacatgttttcttacacctcttgcattccattctcaactcccaactgtcttactgcaatgaacacttaataagaaacagtcaattggtcaattgattgggcaacaggctaaacacactcattccttgtctgttcccacttctttctttactttcccttcctgagtaacttatcctaaagtcattaggtgggtggcagccagatggtggccacacattaaggtagaaaagagagtgtcatgatggttccaagtcagagacctagtagggtgaggatcaagtaggtgttcacgtggagaaacagcccggcctgtgtgtgggagtccaagcaagcagagaaaatgtcgacacagaggggtggcctgaaaaagcagccagagcctaaacagggcatggagaacatatttagggcatgaggtgaggagggcatccatgagtgggaagggatgggtgaggtttcactacataaaggggattgatgaaataagtaaataaagtatactggaagccaggtgtgtcacttttgcagaaaagagtcatggattcagaaagggagaaaactagcaggaatcctatgaaattagattaaaatggatgtatccatgtatattcatacccttctagatagataaatggttagataggtgataaaaagataacaagaggacaagataattagatagacataaatgtatgtatgtgtttgtgtgtgtgtacaaaaaaacatatactccctacttctctccactgatagggctaggtaacaatggcatttcaatagcaatgagcacacttagtggccagatcttggcttattaataccattttccactgaaaggaaccagagctttttagagaaatggctgattccagggccaggattaagaatgttcaagataagcctaggatacattttgtgccaggaagcaagaagatgttcaaatgatttccaagtaatgtttggaaatgatatttgaaaatgatttccaaatgatatttccaaatgatttccaaatgatatatggaaacacttaaagactccactaaagaactattagatctgataaacaaattcagtaatgttgctggatacaaaatcaacatacaaaaaccagtagcatttctgcatgccaacagtgaacaatctggcaaaaataaaaaatgtaatcccatttacaataaccccaaataaaactaaatacctgggaattaacttaagagaaagatgtctacaattaatattgtaaaacactgatgaaggaaattgaagaagacacaaaaaagaaggatattccatgtttatatattgtaagcattaatattgttaaaaatgtccatactacccaaagcaatgcacagattcaatgcagtctctcaaaataccaatggcattcttcaaagaaatagaaaaaaaaaaaccctaaaatttgtatggaaccacaaaagacccagaatagcgaaagctaccttcagcaaaaagaacaaaactggaggaatcatattacctgacttcaaattatactacagaggtataataaccaaaacagtatggtacttgtataaaaacagacacagaccaatgaaatagaatagagaacccagaaacaattccacacacctacggtgaactcattttcaacaatgttgtcaagaacatacactgggggaaaagacagtctcttctggtgctgggaaagctggattttaacatgcagaataatgaaactagaaccctgtatctcaccagacacaaaaatcaaatcaaggtggacgaaagactgaaacctggctgagtgccgtggctcatgcctgtaatcccagcattttgagaggccgaggcgggtgtatcacttgaggtcaggagttcaagaccagcctggccaacatggtgaaaccacatgtctaccaaaaaatacaagagttagctggacatgctggtgcgtgcctgtagtcccagctacacagaaggctgaggtggcagaatcacttggacccaggaggcggaggtggcagtgagctgagatcatgacaatgcaccccagcctgggcaagagagtgagactctgtcagaaaaacaaaaaacaaaaaaacaaaaaacaaaactgaaatctgagacctcaaacgatgaaactgctacaagaaaacattgtggaaactcttcaggatattggtctgggcaaaactttctgaagaactaccccacaagcacaggcaaccaaagcaaaaatggacaaatggatcagatcaagttaaaaagcttctgtaccacaaagaaagcaatcaacaaagtgaagacacaaaccacagaatgggagaaaatattttcaaagtcacactctgacaacagattaatagccagaatacatgaagcgctcaaacaactctgtaaggaaaaatctaataatccaatcaaaaaatgggcaaaatttgaatagacatttttcaaaagaagacatacaaatgccacataggcatatgataaggtgctcaacatcactggtcattagagaaatgcaaatcaaaaccacaatgagatatcatcttaccccagctaaaatggtttttatccaaaagacaggcaacaacaaatgccagcgagaatgtggagaaaagggaacccttgtacactgttggtgtaaattagtgcaaccactatagagaacaatttggaggttcctcaaaacattaaaattaacattaaatagagctaccacaatatccagaaatccccatgctgggtatatacctggaagaaaggaaatcatatattgaagagataacatcactccaatattcacaatagccactattcacaaatgccaagatttggaagcaacctaagtgtccatcaacagatgaatggataaagaaagtactccaattatacacaatggagcacaattcagccatgaaaaaagcatgagatcctgttatctgtaataatatggatggaactggaggtcatcatgttaagtgaaataagccaggcacagaaacacagatattgcaagttctcacatacttgtgggatctacaaatcaaaacaactgagctaatgtctgggccttagtcagtgttgtacccaagtactgggagcacagcttttaaaatacatcatgaatgctttaatacaggaatgaatagatgagaggcacaaactggttgggtgttcttctgatacacagtatcttccttgacagattcagtacaactctcaacaggtaagtctcttcatgttatgttaccttatgaggaattaagtggcagaacatgatttctattattttcctttgcagaacaagaccaactttattagttgggacacagtgtggctgcatttgagtcccaagcaaccattagtctattgctatcaccacagagtcagaggggatgagacgcccagcaatctcacccaagacaactccaccaacattcctggttacccaccatgtgtacagtaccctgctaggaaccagggtcatgaaagtaaataataccagactgtgcccttgaggagctcacctctgctaagggaaacaggcatagaaacttacaatggtggtagagagaaaagaggacaataggactgtgtgagggggataggaggcacccagaggaggaaatggttacatttgtgtgaggaggttggtaaggaaaaattttagcagaaggggtctgtctggctgggcttggaaggatacgtaggagtcatctagagggcacaggtacactccaggcagagggaatttcgtgggtaaagatgtgtaggtgtggcttgtgaggatggatttcaattattctagaatgaaggcagccatggaggggcaggtgagaggagggttaatagatttcatgccaatggctccacttgagtttctgataagaacccagaacccttggactccccgataacactgattaagcttttcatgattcctcatagaacatgaactcaaaagaggtcagcaaaggggtgtgtgcgattctttgctattggctgcagctatagccctgcctccttctccagcacataaatctttcagcagcttggctgaagactgctgtgcagggcagggaagctccaggcaaacagcccagcaaacagcagcactcagctaaaaggaagactcacagaacacagttgaagaaggaaagtggcgatggacctcatcccaaatttggcggtggaaacctggcttctcctggctgtcagcctggtgctcctctatctgtgagtaactgtccaaactcctctctttgtttccttggacttggggtgctaatcgggccccttttcccttatctgttttgaagatcaaaagagatgttcaaggagaagtagctgaagtgttggacgctacaaacgcatagaagttattattatcttatgcagatctatgaatgaataaataagcatttctcccatccaccttctaattttggtgactaggagggtttagggacagcatttggtagtgggaatgatttgattagcttagatctgacgaagactaatcaatgaaaacatggcagcggcagattacaaactgctgatcatgatggacagtgtgatcctcatccccttcccaggctctggggattctgggtacaggaaggagtggcttgcatttttgtctcattaattcgctttctgggttctgtgtctgctggaagggatgtgtagctgtattgcccctgtagacctggttcctgctcccccgccttccaacccaggatatcatttacataacgcaccaggggacaccaagacttcatgggaagctgtcccctggctcttccctctttcctgtgccatgcccctgaaaatcccctccctcctatgagtcactcctccaccctgtcatacacaggatggtttatcttgcaatgattaacctctagagcaaaggagacctggaggaagtttcgaggatttattctttgctttaatctttttcctcccgtctctgggaggctaggattaatatagagctttgtttctcacctaatgggaatctactagcagcctgaaaaggcaggagccatgaaagccaatttggattttacatatttttcccctttatgttacagtacagg

SEQ ID NO: 11443 - DNA, 6000 bp, Homo sapiens
aggcctgagctgcattgctagttccccactaactctgtgtgtccttgggcaaggctgggcttatgtcaaaagattatgaccctgggctctccagctacagaatctacatatgaatcctggctctgctagagcaattagtgacgtaaccttggatgggtcagttaaccttcctgtggcttagtttgctcatctgtaaaatagggatcataacaacatcaataccatgggttgttagacagattgaatcagttaatgcagggtaaatacttagcatgacacgtattcactatcatttccttgagtaaaagctgagtgtgagtgggtgtgagaatgtgtgaaaccctttcactgcaatctcagttaagaaacccatccataatttaaagttcagggcctaaatgggtggttatcttctcccagttgcatcctatcccacctttgctcttctcctgcctgtaggagctgttggtctttgattgggctggaagacctggtggaccctaagtgatctataagagaatgagaatagaggacagggaatgtcttcaaaactcctagagggacacagaggctgagaggcaggcagtcctgcaggggtcttctgattgggacaaggaggaccttggtcttcataggccaattctggtcaatttcccccatggacagatgaggaaacagatccaggaatatccaaggtctcacacttcccatctgtcaagtcttgttgattctgttgtattcatgtctttcaaagagagagagagtttaaggaaagaaagaaggatcaactgtgtctgatatcactgggagcttaagtaaagggttcttttacttcatagcatttttcccaatttgtaattcagtattatttttgtcactgtttagtatctctttgtcctattagagagatagcttcatcaggacaaggattttgattctttaatatttagtgcttgccacatgccctgaacacagcaggcatacagactaaccaacatacagtggcatcgaagtgagacacctacctcctccagtgcctagagtacatgtccatggacctgtcactctcctcaacaccacccctaagcatgaggcccgaaagcattgctaatcccctcctccagccaccaaaacttaaaggccaggtgtggtggctcctatctgaaatctcagaactttaggagacagcagcaggaggatcacttgaggccaggaatttgagacgagcctgggcaacatagctagacaccatctgtactaaaaattagctgggcatggtggtatacctgtagtaccagctactaaggaggctgaggtaggaggatcacttgaacccaggaggtggaagctacagtgagctataaccacagcactgaactccagcctgagcaacagagtgagaccctgcctcaaaacaatttcaaaaataaataaataaaaacaaaacttagataccacgtggtcaccccaacatgcaaaatcaagttttcccctactgagaagaatggggacttgagagctgagttacagagagataatctgtcttttttttttttttttttttttttggtttacatcctcaagatcatgacctgtgaaatttgaatctaatacacaaatcattccagagcaatgttgcttctgcctaccacgagtaattcacttggccactggaagtcagaacaagcttcccagaagagaggtaccacttggactaccaatataaaaggatgaaaatatcggagtgaaggtgttccttgcatcactgagtccctggacagcctgtccactcatgctgatatctgagcctaatgcttctctgaatgttgagatttaactttgatccaatgaaaccagaccaagaaagaagaaacgtctttcattgttgataaggacatgatttttctcacaattttatgattatttttccttagctgtcctataattatctgcttatttgtctcttctccatgtgcttagggtacaaagttgaccaagaccaagaataatgtctgggagcacaatactgacagcacagctttaaaaacatgatgaatgctttaatacaggaaatgagtaggggagaggcaagtgttgcttgggtgttcttccaatgcatagtatcttccttgacacagtcagtgcagctctcagtaggcaagtccctacatgttagaagatgttactttctgtggaattaagtggcagaacatgccttcaattattttcctttgcagaacaacaccaatttcattagttaggacagagtgctggctgcatttgaattccaagcaacgattagtctatcactgttggtatagattccaaccagtcacaccacctcctgaagtttgtagggcaggtaaatcttcatcttagaataaaaatcatcttagccaagtaagtgttttagaggaaagaagaaaacataatcgtttccataagagttttgtttctaaaaaaataagaaaggctctttgtttaggtgagctaatgaagttgttgatagttatcagatgacactggaatctttacttgtcagaatgtgttctgtgcacctctcggtgtggcaacatagagagggagatcctccagcaatgccattgatatggtcagaaactgcatctttctttctccctgctgagatggagtcctttgttctagaaaacccagggggtgccactgggagtaacccttgagacaggaacacgaatctcaaccaatttctggttgcagccttgagtcttactatttgccatagtgatgcttagcaaggaatggcaggtgcaccagagcagcagaggacctaatatctcccttcctgttaactttttataatattttattgtgatcagtatcagttgggaagctacttgcagtcactgagcctcagtttctacatctgtaaactggggatagtagcatggccctatttaatgtgctcagcgaagccactgaaaggagacagaaatgtaccagaattccctggacttttatcctacttctcctggggattgtcacccacctacccgtgtctgtcctttgttgctttgacgctgtcacttcttttcttaggtacctctctgtagggctccattattccagggattccagagttacagcacatgcatacctccatccaagcatgtttatttgtctcctgcttcactaggctgtccccaaggaacatgtggctcccggcacatacctggcacaacactgcacatgacattcacccacttggccttgaatctgacaaggaatctggcatgatgttcacctgctgaggccaggtgccgagcagccctggaggcttaggggccagagggatgggaaaaggtgtctttctggggtgagtatcagtttctgcaggagtgctgaacctgagaaagaataaagagagaaggaagtgaacaagcacagcttaaacatcatctgtttctactgagttttaacaactctgagattttgtttgtcatggaatccatttctcaggccaagcagacacagaacttgggtgtgagtgatgataatgagctgatataattttcacaccctcatcactgagatctctcccatcaggaatgggtcacagggctcacaggtggcagcaactgttattacaggcctcatctctaccagctcctggcacctgctctcctcccattagaaaatcctccacttgtcaaaaaggaagccatttgctttgaattccaattccaccctcaagaggctgggaccacctcattggagtccttgatgctgtgtgacctgcagtgaccactgccccattgttgctggctgaggtggtttgggtcaacctggccatctgggcagctgttctcttctcttctttctcccctactgtttccagacatgcagtatttccagagagaaggggccactctttggcaaagaacctgtctaactttctatctacggcaggacttttgaaagctacagaggaagaagcacaaattgatgctattccactaagccatcagctccatctcatccatgccatgtctcttttttaggggtcctcttgccaacagaatcacagaggacaaatctgaaagtgcagagacagcagctgaggcacagccaagagctctggctgtattaatgacctaagaagatggagtggtcaccagaaagtcagaggaagtgacacacaggggcccagcaatctcagccaagtcaactccaccagcctttctggtccccactgtgtgtacagcaccctgatagggaccagagccatgagagtgagtaagaccagactatgcccttgaggagctcacctctgctaagggaaacaggcctggaaacacacaatggtggtaaagaggaaagaagacaatagaactgcatgaaggggatggaaagtgcccaggggaggaaatggttacttctgtgtgagggggttggtgaggaaagactctaagagaaggctctgtctggctgggtatgaaaggatgtgtaggagtcttctagggggcacaggcacactccaggcataggtaaagatctgtaggcatggcttgttgggatgagtttcaagtattctggaatgaggacagccatagagacaagaggagagttaatagattttatgccaatggctccacttgagtttgtgataagaacccagaacccttggactccccagtaacattgattgagttgtgtatgattctacatagaatattaactcaatggaggtcagtgagtggtgtgtgtgtgattatttgccaactgccgaggtggagaagcctcttccgactgcaggcagagcacgggggccctgctactggctgcagctccagccctgcctccttctccagcatataaacaatccaacagcctcactgaatcactgctgtgcagggcaggaaagctccacacacacagcccagcaaacagcagcacgctgctgaaaaaaagactcagaggagagagataaggaaggaaagtagtgatggatctcatcccaaacttggccgtggaaacctggcttctcctggctgtcagcctgatactcctctatctgtgagtaactgttcaggctcctcttctctgtttccttggacttggggtgctaatcaggcctctctttcccttatctgttttgaatagcaaaaaggatgttcaggctggccgtggtggctcacacctgtcatcccagaactttgggatgctgagcaggtggactgcctgaggtcaggagttcaagaccagcctggctaatatggtgaaaccccatctctactaaaattacaaaaattagctgggcatggtagtgcataactgtagtcccagctacttgggtggctgaggcaggagaattgcttgaacctgggaggcggaggttgcagtgaactgagatcatgccactgcactccagcctgggtaacagagtgagattccatctcaaaaaaaaaaaaagagaaaaaaaagaaaaaaaaagattttcaaggagaagtagcttaagtgttggatgctacaaacatatagaggttatgatggatgttttgcagatctataaaggaataaataagcatctcccccattcatctttagtggaaagaagggtttagggacagcattgattgaggataatctaatagacaatggtttgtacccagcttaccaaaccagaatttggattttacatttttccctttaagttgcaggagaagagggtgaatcttctcaccagtgagatcctggcatcctagagcaggtggagagaagagtcactccctactgtgtgtactggaggcttcccgcctgtcacattttacttctaactcaatttcacagttattaagagtaaggaatcatggtcacatggaaacagaaaatacaaacctcgttttaattctttcacagaaaagttagcaattcagtgagttgtggtaacatagtttccatctactggcaatttaacatgaattggtgtggcttaaattcatcctttttaaagccagatttttt

SEQ ID NO: 11444 - DNA, 6000 bp, Homo sapiens
actgacgagtttgctaggggacctcactttgtcccagagtaggggcagaactctggccactacccattcagaaggcctgggctgcactgctagttcctcactaactctgtgtggccttgggcaaggttgggcctgtgttaacagattatgaccctgggctctcaagctagaggatctaaatttgaatcctggctctgctaaagcaattagtgatgtaaactttaatgggtcagttaaccttcctgtggcttagtttgctcatctgtaaaatagggatcataacagtatcaataccacatgattgttggacagattgaatcagttaatgcaggggaagtacttagcatgacacgtattcactatcatttcctggagtaagagctgtgtgtgagtgggtgtgagcatgtgtgaaaccttttctctgcaatctcagttaagaaaccaatccagaatttaaagttcagggcctaaatgggtggttatcttctcccagttccatcctatcccacctttgctcttcctcccgcccacaggagctgttggtccttgattgggctggaagacctggtggaccctaagtgatctataagaggagaatagagaacagggaatgtcttcaaaaatcctagagggacacagaggctgagaggcaggcagtcctgcaggggtcttctgattgggacaaggagaaccttggtcttcacaggccaattctggtcagtttcccccatggacagatgaggaaacaggcccaggaatatccaaggtctcacacttcccatctgtcaagtcttgttgatgctgttgtattcatgtctctcaaagggagatagagtttagggaagaaagaaggatcaactgtgtctgataccactgggagcttaagtaaagggttcttttacttcatagcatttatcccaatttgtaattcagtattatttgtgtggctgtttggtgtctctttctcctatatgagtgctagcttcataagggcaaggattttgattctttaatatttagtgcttgccacatgccctgaacacagcaggcatacaggctaaccaacatacagtggcatgaaagtcatgaaagtgagacacctacctcctccagtgccaagagagcataaccatgcacctgtcactctcctcaacaccacccccaagcatgaggcccaaaagcattagctaatcccctcctccagccactaaaacttaaaggccaggtgtggtggctcccatctgaaatcccagaacttcaggagacagcagcaggaggatcacttgaggccaggagtttgagatcagcctgggcaacatagctaggtcccatctgtactaaaaattagctgggcgttgttgcatgcctgtagtcccagctactaaggaggctgaggtgggaggatcacttgagcccaggaggtggaaacaacagtaagctataatcacagcactgaactctagcctgggcaacagagtgacaccctgcctcaaaacaattttaaaaataaataagagcaaaacttagataccacgtggtcaccccaacatgcaaaatcaagttttcccctactgagaagaatggggacttgacagctgagttacagagagataatcttcttcttcttttttttttttggtttacatcctcaagatcatgacttgtgaaatttgaatcgaatacacatgtaattccagagcaatgttgcctccgcataccatcagcaattcacttggctactggaagtcaggataagcttcccagaagagaggtaccacttgggctaccagtataaaaggatgaaaatatcagagtgatggtgttctttacaacgttgagtccctggacagcctgtccactgatgctgatatctgagcctaatgcttctctgaatgttgagattgaactttgatccaatgaaactagaacgagaaagaagataagtctttcattgttgataaggacattatgtttctcatacttgtatgattatttttccttagctgtactataattatctgcttatttgtctctgctctatgtgcttagggtacaaagttgaccaagaccaactttggttggaagcatagtactaagagcacagtactgagagcacagctttaaaaaacatgatgaaggctttaatacaggaaatgagcaggggagaggcatgtggtggttggatgtatcttccttgacacagtcagtgcagctctcagtagtcaagtccctacatgttagaagatgttaccttctgtggaattaagtggcagaacttgccttcaattattttcctttgcagaacaacaccaactgcattagttaggacacagtgctggctgcatttaagtcccaagcgatgattagtctctcactgttggtatagattcaaaccaatcagaccacctcctaaagtttgtagggcaggtaaatcctcatcttagaataaaaatcatcttaccaagtatgtgttttagaggcaagaagaaaacatatttgtttctgtaagagttttgtttaaaaaaaatataagaaaggctctcggtttaggtgaggtaatgaagttgttgatagttatcagatgacactggaatctttacttctctgaatgtgttctgtgcatctctcagtgtgggaacatagagagggagatcctccagcaatgccactgatatggtcagaaactgcatctttctttctccctgctgagatgagatggagtcctttgttctagaagacccatggtggtgccgctgggagtaacccttgagacaggaacacaaatcccaaccaatttgtggttgcagccttgagtctcactatttcccatagtgatgcgtagcagggaatggcaggtgcaccagagcaggagaggacctaatatctcccttcctgttagctttttataaagttttattgtgatcagtagcagttgggaagctacttgcagtcactgagcctcagtttctacatctgtaaactggggatagtagcatggcccctacttaatgtgctcagcaaagccactgaaaggagacagaaatgtatctaaattccctggacttttatcctacctctcttggggattgtcaccaccttcccatgtttgtcctttttggtttgatgcttgctgtcacttctttccttaggtgcctctctgtacggctcttttatcccagggattccagagttacagcacatgcataccaccatccaagcatgtttatttgtctcctgcttcactaggctgtccccaaggaacatgtggctcccggcacacacctggcacaacactgcacatgacattcacccacttggccttgaatctgacaaggaatctggcatgatgttcacccactcaggccaggtgccgagcagccctggaggcttaggggccagagggatgggaaaaggtgtctttctggggtgagtatcagtttctgcaggagggctgaatgtgagaaagaataaagagagaaggaagcgaacaagcacagcttaaacatcgcctatttctattgagttttaagaacgctgtgattttgtttgtcatgcaatccattcatcaggccaggcagacacagaacttgggtgtgagtgacgataatgagctgatataattttcacaccctcatcactgagatctctcccatcaggaatgggtcagggagctcacaggtggcagcaactgctattacaggcctcatctctaccagctcctggggcctgccctcctcccattagaaaatcctccacttgtcaaaaaggaagccatttgctttgaactccaattccacccccaagaggctgggaccatcttattggagtccttgatgctgtgtgacctgcagtgaccactgccccatcattgctggctgaggtggttggggtccatctggctatctgggcagctgttctcttctctcctttctctcctgtttccagacatgcagtatttccagagagaaggggccactctttggcaaagaacctgtctaacttgctatctatggcaggacctttgaagggttcacaggaagcagcacaaattgatactattccaccaagccatcagctccatctcatccatgccctgtctctcctttaggggtccccttgccaacagaatcacagaggaccagcctgaaagtgcagagacagcagctgaggcacagccaagagctctggctgtattaatgacctaagaagtcaccagaaagtcagaagggatgacatgcagaggcccagcaatctcagctaagtcaactccaccagcctttctagttgcccactgtgtgtacagcaccctggtagggaccagagccatgacagggaataagactagactatgcccttgaggagctcacctctgttcagggaaacaggcgtggaaacacaatggtggtaaagaggaaagaggacaataggattgcatgaaggggatggaaagtgcccaggggaggaaatggttacatctgtgtgaggagtttggtgaggaaagactctaagagaaggctctgtctgtctgggtttggaaggatgtgtaggagtcttctagggggcacaggcacactccaggcataggtaaagatctgtaggtgtggcttgttgggatgaatttcaagtattttggaatgaggacagccatagagacaagggcaggagagaggcgatttaatagattttatgccaatggctccacttgagtttctgataagaacccagaacccttggactccccagtaacattgattgagttgtttatgatacctcatagaatatgaactcaaaggaggtcagtgagtggtgtgtgtgtgattctttgccaacttccaaggtggagaagcctcttccaactgcaggcagagcacaggtggccctgctactggctgcagctccagccctgcctccttctctagcatataaacaatccaacagcctcactgaatcactgctgtgcagggcaggaaagctccatgcacatagcccagcaaagagcaacacagagctgaaaggaagactcagaggagagagataagtaaggaaagtagtgatggctctcatcccagacttggccatggaaacctggcttctcctggctgtcagcctggtgctcctctatctgtgagtaactgtccaggctcctcttctctgtttccttggacttggggtgctaatcaggcctctctttcccttatctgttttgaagatcaaaaaagatgttcaggccgggcgtggtggcttacacctgtaatcccagcactttgggaggctaaggcaagtggactgcctgaggtcaggagttcaagaccagcctggctaacatggtgaaactctgtctctactaaaaatacaaaaattagctgggcatggtggtgcacgcctgtattcccagctacttgggaggctgaggcaggagaattgcttgaacccggcaggcggaggttgcagtgagctgagatcatgccagtgcacttcagcctgggtgacagagtgaggctgtctcaaaaaaaaaaaaaaaaaaaaaagatgttcaaggagcagtagcttaagtgttggatgctacaaacatatagaggttattgtagatcttatgcagctctataaaggaataaataagcatcttccccatccatctttagtggcaagaagggttttgggatagcattgattgaggatgatctacttgacaatagtttggacccaaggaggataaggaaggaaagtagtgacggatctcattccaaacttggctgtggaaacctggcttctccttactaaactagaatttggattttacattttcccctttatgttgcagtagaagaggatgaatcctctcactggtgggatcctgccatcctagagcaggtagagagaagagtcactccccactgtgggtagtggaggcttctcacatgtcacatttcacttctacctcaatttcactcttactaagatttgggaatcataatgacaggaaaatagaaaatataaacc

SEQ ID NO: 11445 - DNA, 6000 bp, Homo sapiens
caggagagcaggggggttttattctacctgtcattgccttcatgccccagtgctggaaacacactgaagccattgctcccccttcagatgatctgaaaatccctgtttcagttcactttgaaaacacccctcactctcaacaacagagggttggttattctgcagaactcattctttaacagcaggcctgctgctgctccagctgcaattcttttccccttcatgaaggctgccaggaatgaaaaggggagggaaaagaagtaggtggtggcaggaggctgggccagggaagtgtgggaccccacaggctccagcctgaggactcctctctcggcctctctcccctgttgtgaatgcttctgctgaaagccactgggtgagtgcagggacagagagccactgagctggctcagggcctcgtggtggtggtggtggtggtaggggggctgctctgggttctcgagaggcttctccaactctgacatgatcatacctgaggatattatcgaaattcagatatgacttaggaggcctgggatacggcccgagattctgcatgcctggtgatgccagtgttgctgctctgttgccacactggataaaagcatctagaaggtattccaggccagatggggtgggcattccctccctcataccttaactctttgacatggattctgccaccaacagaatcctggacgttttctcccaagagatgataagaaaaattcacaccaaaatcatgatggaatttcaaaatctgtttggatattagaaaatttctccaaaccctggcctttccttcctctcccaactcttgagctcacaggtgttgcttcactgactaaaatcctgacagagctccaattctactacctcccagacaactttatttgcaagctgtttctctactcagaaacaggggtgtcccttcagccgagcttttccaacaatgctgagctgggggctttggtacatctccccctccttctcagcctcagctctctaggtcctgaagtttgacctgggggccctgtccaccgtggggcaaagctgcagacttgttgatgagaggaggatgtgggtcttagggaaagagaaaggtgagctggggacagctggaccagattggagagaccacagggtccctgaaaagcagggggtaagggggtaggaggctatcatatagggaggtccctttggtatgcagactttgggacagaaagcacagttttgtctgaaccctccagaaggccctgaaagcatgggacataagcattgtgttggcgataacagctgcaggtgaaggcaggtgaatgacaaggaagggtgcttagggttagatatgagagctccaaaccaaggggccctgggcaggtccttttgttctactgttgcccctctctcctttccaaaaccccaaagctctgtggtgagctctggagacctcagctttgttctgagagcctctgagaggatttaggtgtctcttcatgggcctggggtgggaatgggagagacagaaagaaaggggacactaggtacggcctctggaaatgatttgaatccctgacccttgaaatatgtcagacccaccctgtgtgaaattccacgtctgctggaaatgtgacggaaatgtgtttagagggtgctggacctgcacttcgaaataaaacaaggctgacagcaagacttgagaatttacctaatgatcatctagtctgataactctcaagagaggaaggacagaaaccctcagagccctggggatgcttcccataaatccagggacaccccccctagacttacaagatggggcagggctgcaggtatcctcacagatggggctggttgagggaggatgcgtgaccaacctagatgaactcaaactctgactcttaatggctcaaaatatagtgtcttgcagttggtgaatgatgacatatttctctggtcaattgagacccttagaattgtccctgggactcatctcaacccatccttctgactgagaccacaggggaagtccaaattacagggaagataatttggggaacaaatccttgaagaagcaggaaagatgagacccaaggacacagatttggaaggcagagtaaacttggataactgtaggtccacttctttctctacaatgttagaaaaggaagtaaatattaagataagagaaagtagtatctgtggggtttcacatcagtgtctctattttctctttggagtaagaggttttcgtggtgtcttagtctgtttgggctactataacaaaataccttagagagggtaattcataaataagagatatttatttctcaaagttctggaggctgagaagtccacgatccaggcaccagcagattcagtgtctggcaagggcttgttcctcttagatggcacctcttgtgtatcctcacacagtgggaagggatggaggggctccctggagcatcttttataagagcactaatctcattcatgaaggttctttcctcaaggcttaatcacctctggtttgatacagtttgtttgttcccaccaaatctcatgttgtaatttaatccctatagtttgatggtgttgggaggtggggtctagggggaggtgtttgggtcctgggggcagattcctcatgaataacttggtgccattcttgtggcagtgagtgggttatcgcttctgtgaaactggattcattcttgagggaatggattagttccctcaagagtgggttgttgtaaagccaggatgccccttgggtttggtccctcttcccctttgaccttccctgccatgttttgacacagtatggaaaccctcaacagaagctaagcagatgtgcaggctgcagagctgtgagtcaaataaacctctttataaatcacccagcctcaggttctcctttgtggcaacacaaaatggactaagacacttggtaagggctccacctcttagtactatcacactgagtacagcacttccacctttccacctcttaatactatcacattgagtacagcacttccaccttatctgtgggagatatgttccaagacctccagtggatgcctgaaattgtggatagtaccaaactccatatatactatgttttttttccccatatgtacatccctatgataaagtttaattacaaattagcacagtaagagattaacaacaataactactaagaaaatagaacaattgtggctgggcatggtggctcatgcctgtaatcccagcactttgggaggccgaggcaggtggatcacaaggtcaggagactgagaccatcccggccaacatagtgaccctgtttctactaaaatacaaaaaattagcccggcgtggtggtgcgcccctatagtcccagctactcagcaggctgaggcaggggaattgcttgaacctgggaggcagagattgcagcgagccaagatcgtgccagtgcactccagcctggtgacagagcgagagtccgtctcaaaaaaaaaaaaaaaaaaaaagaaatagaacaactggaacaattgtaacaatatgctggcatcactactcttgctttttggggctattcttaagtaaaataagagttacttgaacgagtattgatagttgatctgataaccaaaatggcgattaagtcacaaaccagcaaggagcgtctacagcgttggataccctggacaaagggatgattcacatcctgggtgggatggtgtgagatttcatagtgctactcagaacagcacacaatttaaaacattaattttgtatttctggaattttccatttaatatttttggacctctgttgactgtgggtaactgaaactgtagaaagtgaaatcgcagataagaggggggactactgtattaggttctagcatatgcatcttgatcatcattcagaccataccacatggtcttctgagtgtgagggtaaccagatgagtgagaatttaggctaaatggggacggtttgaaacagctgctgggcattggggaaggcagctgattaggacaaatatagagatggtgaacttgggcttgtagcattgtggtattttggctggggaacagagggatttctgaaacttatccttgatcatggtcgcctgtcaccatgagggagataatatgcccaaggaacaatggcaagtgggggtcaaaaatctgaatttctatctagtcagttctggctctggccccaaatcctatagtatgtaattctggtaaattctgctgggttaccttccaaatgttctcttcttcctcagcttgtaaggcctaagagcatcagactaaagcaagcctcgatgcttgctctgttcatttcatccatcacatctagccccataacctaactacctctcaactttaccactgtgatgggagaagaggacatccagacacacctgtgatcatccaagggcatggaggaagagaaaagaagaccgcaagagaatgcacattccctctcagcatcagcactaatttgcttaagatgatgctgtaggagcaccaggcctggcagccatcagctggggaagcaatacctttcaaaggaaaattaacaaaacatcccagtctactctcttacgttcagcctttgggaaagagagacggagggaaggagggaaagagagagatgaagatgtatcctggtctctccaacctgagagttcctctccactccagcagtacagaaggggagggcagaagagagagccacaccacacacactcactgttattattttacatagatgatttcattaagtagtaaagaggtgcaatcagagtcttggtatttaatcagtcagatacttggagaggaataaaaaagcttgccttcagtgatccttggattaggagtgacaaggtggactggagctccctctgaaggacagtgaacaacactgatctcttgtcctctgctccaaaacaggatgtgtggcaggttcctgcggcggctgctggcggaggagagccggcgctccacccccgtggggcgcctcttgcttcccgtgctcctgggattccgccttgtgctgctggctgccagtgggcctggagtctatggtgatgagcagagtgaattcgtgtgtcacacccagcagccgggctgcaaggctgcctgcttcgatgccttccaccccctctccccgctgcgtttctgggtcttccaggtcatcttggtggctgtacccagcgccctctatatgggtttcactctgtatcacgtgatctggcactgggaattatcaggaaaggggaaggaggaggagaccctgatccagggacgggagggcaacacagatgtcccaggggctggaagcctcaggctgctctgggcttatgtggctcagctgggggctcggcttgtcctggagggggcagccctggggttgcagtaccacctgtatgggttccagatgcccagctcctttgcatgtcgccgagaaccttgccttggtagtataacctgcaatctgtcccgcccctctgagaagaccattttcctaaagaccatgtttggagtcagcggtttctgtctcttgtttacttttttggagcttgtgcttctgggtttggggagatggtggaggacctggaagcacaaatcttcctcttctaaatacttcctaacttcagagagcaccagaagacacaagaaagcaaccgatagcctcccagtggtggaaaccaaagagcaatttcaagaagcaggtgagaaggacacgctctcttcctgtcactgatgtttgtgtcctgatgatctcctcccggggcaggtccctcacctttctgggaagtacaacttctgcatgttacaaagtaggtaaccaggttctaggcagatgtgttctgaccgccactcccaacccttttctttgttctctcttgctctcaaaatctatcccaatgtccatccccatcaacttgatggttccttccagcgaacaaggacaagagtgctagtccgttgt

SEQ ID NO: 11446 - DNA, 6000 bp, Homo sapiens
ggtagcgcccgcgcctgtagtcccagttactcctgaggctgaggcaggaggatcacttgaggccaggagttggaggccagcctgggcaacgtagctagaccgcatctctaccaaaaaaaaaaaaaagaaagaaattatcaggcatggtggcacacatgcctgttgtcccagttactccagaggctgaggcaggaggctcccttgatcccaggagttagaggctgcagtaagctatgatgatgccactatactccaacctgggcgagagagtaagaccctgtctaaaaaaatcctaaaattggccaggcacggtggctcacgcttgtaatcctagcactttgggaggcggaggcaggcggatcacaaggacaggtcaggagttcaagaccagcttggccggctgggcatgatggctcatgcctgtaatcccagcactttgggaggccgaggtgggtggatcaagaggtcaggagttcgagaccagcctggctaacatggtgaaaccccatctctactaaaaatacaaaaattagccaggcgtggtggcatgcacctgtagtcccagctacttgggacgctgaggcagaagaatcacttgaacccgggaggcagagattgcagtgagccaagatcatgccattgcactccagcctgggtgacagatgagactcttttttttttgagacaaagaccagcttggccaatatggtgaaaccccttctctaccggaaaaaaatatatatatatacacgtatatatatacacacatatatatacgtatatatatacacacacatatatatatacacacatatatatacacacatatatatacacatatatatacgtgtatatatacatatatatacacgtatatatatatacacacacacacacatatatatatatacacacacacatatatatatatacaaaaattagccggcatggtggcaggcgcctgtagtctcagctactccggaggctgaggcagaagaatcgcttgaacccaggaggcagaggttgcagtgacccgagatcgcgccactgcactccatccagcctgggcgacagagtgagactatgtctcaaaaaaaaaaaaaatcctaaaatcctaaaatttaaatttaaattttaaaaaagtctgggatggaggagggtcctgagtaaggctgggggtgaaatggagaggggctttaaagccaaattggggggatacatgagagggagctcatgtgagtttcccccaaacactttgctgcttctctaaggcccgagtgaggattttcaggaacatcctagttcagtatcaccactcatcccatcctttctctttctctccctcccttaagatggtctcctgatcctggctgataagctccagggccccttttcctttgagctgacggccgagtccattggggtgaagatctcggagggtttgatgtacctgcaggaaaacagtgcgaaggtgtccgcccaggtacaggggagagaagggtggaggtgaggcccggggcggggacggtgtgggtgtcagagaggcagtataggggatctgggaagagactctggggtcagagtggggacgcagtgtggtttccccccagggtgactgtgtgaggtctcttcccggtgccgcaggtgtttcaggagtgcggcccccccgacccggtgcctgcccgcaaccgtcgagccccgccgccccgggaagaggcgggccggctgtggtcgatggtgaccgaggaggagcggcccacgacggccgcaggcaccaacctgcaccggctggtgcgtgggatgaccaagagttgggggcgggggggcccggggccggggatggttgtgggggtcgcgctccagctcgccccgccccctctcgcccgcccaggtgtgggagctccgcgagcgtctggcccggatgcggggcttctgggcccggctgtccctgacggtgtgcggagactctcgcatggcagcggacgcctcgctggaggcggcgccctgctggaccggagccgggcggggccggtgagcctcgggggcgtcggggggcagcagggggcgggaccgcggccgggaggggcggggccgcgcgcgctagctggcgcttcggggctgctctgctcgcaggtacttgccgccagtggtcgggggctccccggccgagcaggtcaacaaccccgagctcaaggtggacgcctcgggccccgatgtcccgacacggcggcgtcggctacagctccgggcggccacggccagaatgaaaacggccgcactgggacacgacctggacgggcaggacgcgggtgagacccctgcatccctgagcctgagccccgcccactgccctgaagcctctcccctctcctggtagttcccgcccgtgcctctgctcttagcgttcattgattaattcactaattcattcaacgagcatttattgagcgttgccctgaaagactgggggtaacagatcaatgagggggtctgtatcctttcaggccagtaggggagacacgaaaacattcttaaagaacagtgggaagccccttataatgggcaaagggcagtgggaaaatgggggagggggcaatttgggggaggctgggaagccagggtggtgggtgacattgagctggctccgcagggtggagtttgccaaacagagaagcaaggcacagacactcattgttttcttctctccttctatctgtctgtctctgtctctctttgtcactcttcccgcacccctcttcctggctgctttctgcttctgtgtacttctgatttttctgttttttcctgttatcctctctccccatctgcctgttttgtttttttttctctctgtctcactgtctcccatcatgatctctccccccatgtctgctgtcggatctctctccttccttctctccctgccttcctgtcactcatggtctttctcccttccccaacccggcatccacctgtgtctccctccctttcctctctctttctgtttttatctcaatttcttttcctccctctgtctccctctgcttctccctcccatcctgctctgtccctcttcttccttgcagatgaggatgccagcggctctggagggggacagcagtatgcagatgactggatggctggggctgtggctcccccagcccggcctcctcggcctccataccctcctagaagggatggttctgggggcaaaggaggaggtggcagtgcccgctacaaccagggccggagcaggagtgggggggcatctattggttttcacacccaaaccatcctcattctctccctctcagccctggccctgcttggacctcgataacgggggaggggtgccctagcatcagaagggttcatggccctttcccctcctcccccctcagctgggcctggggaggagtcgaagggggctgcagagagggtagagaagggactttgcaggtgaatggctggggccccaaatccaggagattttcatcagaggtgggtgggtgttcacaatatttattttttcatttggtaatgggaggggggcctgggggtatttatttaggagggagtgtggtttccttagaaggtatagtctctagccctctaaggctggggctggtgatcagccccaacagagaaaatgaggagtttagagttgcagctggggaaggggtttgaaggaagttggaagtggggaggggtgggggcatctggtctcagaaatggaccagctggatgcagggcaggggactgagggtgcttgagtaggatgtgagacttcatgggcctgggttctgttgagttttttcagtatcaatttcttaaaccaaattttaaaaaaaacaaggtgggggggtgctcatctcgtgacctctgccacccacatccttcacaaactccatgtttcagtgtttgagtccatgtttattctgcaaataaatggtaatgtattggaccccatgtgtggcttctgtgctgtcaccatcagtgcctgagccctggctcctagcagaggtctcagagcctctgtgactggctcattttctgccggcttttcacttcccttggcacctgtcccccaggaggcgggcctagacaataacctctgatctccaaattgcccaccctctgggcctctgagcatcttcgtttgtacaacagggagaattgtggggaccaaatagaatctgtgtgaaaaagcaccttgtcacctgcaaaatgctctttgaacatgaggcttttttttttttttttttgagatagagtctcgctgttgtcgcgaggctggagtgcaatggcgcgatctcagttcactgcaacctccgcctccccagttcaaatgattctcctgcctcagcctcctgagtagctgggattacaggcgcctgccaccacagtcagctaatttttgtatttttagtagagacggggtttcaccatgttggccaggctgatcgcaaactcctgacctcaagcgatccaccagccttagcctcccaaagtgctgggattacaggcgtgagccaccgcacccggccacgaagcattattaaggtgaccacaccactgccccctgccttcaggatgggaggccttgttctctgagtgtcagtctctggctaccttgccacgtccttgacaatgtctgctttcaaatatcactttctccttccttccttctttctttccaccgcctgaatgaatcttttgttctgcggcaagccaagagaaaatggtaggattgattcccaagtgtgaaagcgggggcggaagtggtgtcttccaagaggagtctgggtgccctgccgaagaggggaagatgcagcgagggagagacctagaaccgcgatcaaagctgcagcagctgctggggctggcggcacaaagggaggagggaggagcctgggcgctgagaaagttcttggggaaagttgagctgagccaagagtcgggcggtggctgggatgggcgggagggcccggcccgatttcccttgctgctccccttgtggcctggtgagtgggaagtgaaaccaaggataggaccagtggagggaccctctaatttatgggaggagacatgaggggttcatggaaccccagcgggggcaactgggcagtcaccaaagctggaggggacagagggctgggatctccaatcatgggaagggagagatggatggaaggaaatgaagaactctggataggggagacgcggctagaccccaggggctgtgatcagggagggaattggggagtgatgccagagagggcaggtctccgggagtaaaagtgtggcttctctctgcttggggttacccctggctcatcggagcagggagctgtcggggcttgttggaggggccgtggtccctgatcgcgagttgtaatctgaaggggcggggctggactcccggttgattaggaagctcgggcttcagaaggaactctgcagttagtgtttgcgcctttctccttatctttgtgtcatagtctctctgtccctctgtctctctctctctgtttctctgtgtgtgtgtgtgtgtgtgtgtgtgtctctctctctttctgtctccctctccagccccaccctttcagtctcctccgggtgcactgataaggttggaaagtggaatggtgggtaagtccagggatctgggctttataagtagccacacgtctcccccagcccctgtcatacatgggggtctgccccgtgctgagacagagaaaaaagaggcgcgggaatttataacccaatggctcttacccattgcaatgccactcctggaagtccaacctcccttcctcctgcctgggttcatacacctgtgtcctgtctgatcctcattcccactgtatggcttcccttcctggtcctgggatagggctctttatccccatctgtgacagccagaggggctctggaggaaaccaggttcccgaccatggtctgacctgactgtgttaatgagctgattgatctgatctc

SEQ ID NO: 11447 - DNA, 6000 bp, Homo sapiens
gagagagaggcatgccccattctctctcctctccatcagggaagggtgagaaacccctcttgcaggcagcacagcagagcctgcagcgccaggtagctgcagagctgggaacagtgccaggaaggtgggggtgggggtcaggtgggctaggaaagggtgttcctacactgtgcccccacaggagcctgtccgggagggtgcccccccaaactggaagaagaaggagaagctaccccaggtctccaagtcctggcataactacatgtgtaatgtgagcctctggagagggccacctgaaacccccctcccctgccatgaatcgggggcgggacagaggccccgcatgggagggggagcagggagggggagcggggcagggggtgctgctcacggggaaggcaggccctcaccacctccgctgggatttcaggaggtgatccaggacttccaggcctccgtgctgcaggtctcagactccccctacgatgaacagtgagtgtggctcagggctttggggtgggagagagggcagaaccggcactcttggggtgggctggggggctctggtgctgcccacgcactgatccttcttgagcaccccaggcagagtcctgctcccttctgggtagggtggctgcacaaatgcccacagtgcactacgagatgcccaatggctacaatacagactacggcgccgagcgactccgcatccctgagggcctgtttgatccctcgaacgtcaaggtttggctgtgtggcgaggactggggtgggtgctggctgcagtccctggatcctggggcgtgggggaggctgggaaggattgcaggggtctggggggaagggggagagagcccacagccccagtcacctctctctgcagggcctgtcggggaacaccatgttgggtgtgggccacgtggtgaccaccagcatcggcatgtgtgacattgatattcgcccggtgaggccaggccggagctgaggctcggcaaaggggcccaggggaagtggggagacggggttggggggctgcccccgcagctcactccttctccctgctctcagggcctgtacgggagtgtcattgtcaccggcgggaacacactgctgcagggcttcactgacaggctcaatcgagagctttcccagaagaccccaccggtaggagcccacccctgacccagagccctggacacccgtcctggctcagctgtccaggactgagtcccttcatccttcccatgtccttccttctgttctggccaccagagcagaacccctgcccctgtggcttcccaagtcttcccctctcccccaagccctgtcccttcccagaacctaggtgtctgcttcccccagcccctttttacccccagagcatgcgactgaaactcattgccagcaacagcaccatggagcgcaagttcagcccctggatcgggggttccatcctggcctcactggtgagaggaaagggacctggcctagcactgactgtgggggagaggggagacccagacagtgcccgccactttgactgcctcttcgttcattcattcattcaacaaacatttagttttgagaaatgtcagtcaatgaatgttcccagaagggtgaacaggacacaaatcggggggcaggggcccggtatggtggcccacacctgtcatcccagcactttgggtggctgaagtggggggatggcttgaggctaggagttgaaaacccagcaggggaacatagcaagacccatctctacttttacaaactggggagaagaggctgcgcacagtggctcatgccggtaatccctgcagtttgggaggccgagacgggtggatcacttgagctcaggagttcgagaccagcctggccaacatgacgaaaccttgtctctactaaaaatccaaaaattagccaggcatggtggtgcatgcctgtaatcccagctattcaggaggctgaggcaggagaatctcttgaacccaggagacggagactgcagtgagctgagatcgtgccactgcactccagcctgggtgacgcagtaagactctcaaaaaaaaaaaaaaattgggagtagagggacaggtagttggagagattggtcaggatgagattttggtgatacacccactgtgctcagtcagcagaggggagaccctgatgttttggggcaagggagtgatgtggcaatgcaggcatgattggaaagactgccaggcatgagtctttggggtcggggtatgagctggggtcaaggggaccttacaaggaggctgttttgattgtcccggagtcatagcatgggtagcagtggggatggggtggacagcaaggggcaactagtaaaggaggcaggcaggttggttctggggcaggaggtggtaagttcagtctggacctgctgctgggttcgaaggaaggtactgagcagggagctggagttgcaacccgcatctggagggtatcagtcacacagaggggacagtggggccatgacagacaaggaggacatccacgagaaaggaagtcccccagggagacagaaaccagggtcagaaagacagaggctggcagtctgaacttagctcagggctgaagcatgtcagccacacagttcttgtttttttcctttttttgtttttgtttttgttttcgagacagtctcactgtcgcccaggctggagtgcagtggagcaatcttggctcactgcaacctccatctcctgggttcaagcgattcttctgcctcagcctcccgagtagctgggattacatgcgtgagccaccacgcctggctaatttttggattgttaatagagatggggtttcaccgtgttggctaagcttgtctcaaactcctgacctcaagtgatctgcccatcttggcctcccaaagtgctgggattacaggtgtgagccaccatgcccggcctgaaattaagtattaataatatatcctggacaagtggagtggctcacacctgtaatcccagcactttgagaggccaaggcgggaggatcatttgagcccaaaatttctagaccagcctgggcaacaaagcgagacctcatctctacaaaaaatttaaaaagcaactggcaatgtggcgcatacctgtagtcccacctacttgggaggccaaggttggaggatcactggaacctggaaggttgaggctgcagtgagctgtgccactgcattccaacctgggtgacagagcaagatcctgtctcaaaaaaaacccaaaaaaattgggtgtgtattttccacttagagcacgtctcaatttggaccagggctggtgagctacaggaagctagtggccactgcattggacagcacatgtgtgtaggctgagaaagatcaaagaagcccagccgtggtagctcacgcctgtaatcccaacattatgggaggctgaggtggaacgattacttgagcccaggagtttgagaccaggctgggcaacatagtgagacaccatctctacaaaaaataaaaattaggctgggcgcggtggctcacgcttgtaatcccagcactttgggaggccgaggcgggcggatcatctgaggtcaggagtttgagaccagcttggccaacatggcgaaaccctgtctctactaaaaatacaaaaattagccgggcgtgttggcacgcgcctgtaatcccagctacccagcaggctgaagcaggagaatcgctggaacctgggaggcggaggctgcagtgagccaagatcgcaccactgcattccagcctgggcgacagagcaagactccatctcaaaaaaataaaataaaaataaaaataattaaaattaaaattttaaaaaaatagagagaagggacactctgagatgctcattgcaggaaccctcaaggggcaagttgtaatgccgaaggctgcagatggggtgccacagtgttggaatggtgaggtggagggaatatcttccttgggaaagagggagactggcggtgttccaaagccctgatggagtgagaagaggacacctggtggggaaggactgtgtgtgtgtagggggtgttgagtgccaggtgcaggttgcctggcctggggctgtgcgtgccatccccccagctcaggaacagggcctagctcagggcagagactgctgttcaataatacttgttgaatgaatgaattattgattgaatgatatgaagaggatactctccctctgaatatgaaaggggacagaccgaggaggggaggatgaggtggggaggggcttcagagggatgtgaacccaaggggtggttggggcctgttggaggattcccaggggctgcacctgcctgtccacacctccctccaaggccaccctgaccctgatattaccccctccacccagggcactttccagcagatgtggatctccaagcaggaatatgaggagggcgggaagcagtgcgtggagcgaaagtgcccctgatggcactcctccccacacacctgctcccaagctcagatggaagtcccttaacccccatgccacattgcccccctcctcctttccctcttgtcctcattaatggtgatgtttctgggttgaaagaagtaaaaatgttttaagaaaaaaaagtttggcctccgtggggtggggagtgggcacaggggtctggagggaggtgaggggagggagtctcacttctacacccatgccgatcccacagtgggtgctgggacacagccccaggggccatggattcctcaggtttcctaggggttgtgacccagggagggccacatgacgaggaccgggggttgggggagttgctgggggctaacagttgtggtgggaggtgggaggggctgcagggtgcagtggaggggcacggcctggggtgagtgtggcaggaggtgggtggagcaggaggtgaagcctggatgggcggaacaggaggtggggcctggtgggcggggcctcagcgtaggccttaggtctcaggggagcagcacgcctgagcaccccaggacctgcgctcaggtgagatgcgctatgccttccttcctggggctcttggtggtgacagacatggggcggggactagggcgctggtgcatcccagcagctcggaacttctctggacctgagtaggagctgatgtttcccaggggaaacccgaaagggaaacttggtgggaccctgagccctcctcttcagagctacttgtcttggggccctcggaagggtttggggacctgcgccccctgcctgtttagcagtttatgcctgtgacatgtttctggggtgaggctaactggcctttcatcagcctcagaacccaaagaggtagaaacccatgtgatccaagtccttcggtgaccaaacgggccggtgcccagggaggaccatgacttgtccagggtcacccagctctgcccacaccttggcggggactctgatcactcctccccactgacccacatatccctgaccccaggacccctatctgggagctctcgctggtctcatctgaccatgtgctcccacctgtgcccctccttctccagcagccagcaggagtctgagaacgacctttcaaaagagacacacatgcacaccaccagaccagacccccaagtcacaccactgtggtgcctccagcttagaatgccactggggcaagtgtcaggacagggaggacagctgatatgtcacaggaccggggcactgggggactctgaaggccagatgaggaaggggcagatgtcttaggggtgaatcttccacctgggcatggcggggcttaggaaggggtccccaggatccagggaggggtaaaagcaggagaggggagggggcacccatgtctctgccctcccccactatcggcccccttcccccacccctgatgggaactaggaggccaaagtccgccccaaggtcaaaaaattgattgttttgcagggaggaggcaggcgtggggctgtggagagattggcaggggagagcacagccc

SEQ ID NO: 11448 - DNA, 6000 bp, Homo sapiens
acagtgcctggctaagttatttttttttggtgggagtgggacggagtctcgctctgttgccaggctggagtgcagtggcgcgatctcggctcactgcaacctccgcctcccaagttcaagtgattctcctgcctcagcctcccgagtagcctggctaagtttttaaggtttcatcattgtttataaaaatttatttgagctttacaactctattggtaatgttgaaaactctatcaaattccttttgtaacagagctgtaagatttcaggtcatttcaagtgttgtcctgctgaaactcaccttcaaaactgtttaaattatggcacttattaaccagggccgtggaagaagccaggcaggtgagaggtgctgaagcttaaacttcatgaactttggggtaaacctgaactttggacccgacacagttaggtggcccagaagaggggagactgagatgtggaaagagtaatgagaagttcaacaatttacggagaaaggggtgatttgctgcttgttatttcttacaataggaaaagctgtaactccaggattactcaaaacaactgtcacaatctgtacaagaaaaagtaaacttattagccgggcatggtccccgcgcggggtcccagctcctcaggaggctgaggaaagattgctcgagcccaggaggtcaaggctgcagtgagccatgaccgtgccactgcactccagcctgggcaatacagtaagaccctatctctaaaaaaaagagccacgtgcagtggctcacgcctgtaatcccagcactttgggaggccaaggcaggtggatcaccttaggtcaggagttccagaccagcctgaccaacatggagaaaccccgcgtctactaaaaatacaaaattagcccggtgtggtggcatatgcctgtaatcccagctacctgggaggctgaggcgggagaatcacttgaacccaggaggcagaggttgtggtgagccgagatcgcacctttgcactccagcctgggcaacaagagtgaaacgccgtctccaaaaataaaataaaataaaatacaaaagaaaagaaaaagaaaactccagtagctgttggtggatgctatgcgcaagtaccgacaatgcaccgtgtgatagcagtatattgctctgggctgggaacaaaggtgacagcctaatattttgggtagggaacagcaaagtgctctaataatgaggaagggagggctgagtttggtttggtctgcagaacaggcatggattcaggtagtaacgtgaatgttcacccacgttctgtaatttagtggctactgaatttgcttgcctgggaagtggttctgggtggtctaagggtggaggacatgacttcacacacacaggatagaccaagggtggttcctgagaattgaagtgaaaatctcagatgccatctccacgtaaaggggaaatcatgggattttttttctaccaggttgtaattcaccagatgacataaaactatattaatttttaccagattctctttgaggccaggaaccatgttttacaaatcttgaaaactagcaatgtgatcactcggcacgtagtagatgctcagtaaagatttcattttttcattctttgactggcatacactagatggtagaaaatagattactgcctggtgtggggtgtgggctgatgacctgacatggaatagaatgttttctctctttctttctttctttttttgtagacagggtctcgctatgttgttcaggctgccctcaaactcctggactgaaacgatcctctcatctcagcctccaaaagtgctggcattacaggtatgagtcactgtgccccactaagatgagtgttttctattgtttaattaatttatgttttgagacagagtttcactctgttgcccaggctggagtgcagtggcacgatttcagctcactgcaacctctgcctcccagggttcaagcaattctcctgtctcagcctcccgagtagctgggactgcaggcctgcaccaccacacctggctaagttttgtattttcagtagagaaggggtttcactatgttggccaggctggtctcgaactcctgacctcaggtgatccgcctgcctcggcctcccaaagtgctgggattacaggtgtgagccactgcgcccagcctatttatttatttacttatttatttactttatatattttttggagacagagtgtggctctgttgcccaggctggagtgcagtggtgcaatctctgctcactgcaacttctgcctcccgggttcaagcgattctcgtgcctcagcctccctagtagctgggactacaggtgtgtgccatgatgcccagctgatttttgtatttttagtagagaggggtttcaccatgttggctaggctggtctcgaactcttgggctcaagtgatccacccgcctcggcctcccaaaatgctgagattacagacctgagctactgtccccagccagaagacataacttttagaggctacaggatctgggtacagagtgagagtggcaaaaggcagggcaggggtttgggagagggttgcagagaaccccgagggagaagctgaataagagaaggggagactgggcctgcatcggggagggaggagggaattcccagctccagcctggtctgcctggctccagtgaagccggctgtttcctgccctcggtgaccggcccaccccccccaacccgggcgcaggacccaggcagaacagcaaggaagggcaggggtgtggggaacacctcttgcagcaggaagataagtaagccgggacaagaggttatcacaggcccggctgtcctttctgggacgtaagggcgcttggcagccccccaagcatcctggactccaacgtctctcttgctgggctccaacgtctctcttgctgggctcctcaagattctgtcctccggctgggcgcggtggctaacgtctgtaatcccagcactttgggaggccaaggtgggtggatcactttaggtcaggagttcgagaccagcctggccaacatggcgaaaccctgtctctactaaaaatacgaaaactagccggggttggtgccctgtgcctgtaatcccagctactcgggaggctgaggcaggagaatcgcttgaacctgggaggcggaggttgcagtgagcccagatcacgccactgcactccagcctgggaaatagagggagactctgtctcaaaaaaaaaaaaaaaatctgtccccgctaattactgtgggagtctaagtcctttccttctgccccttggaggggctgactcctggagcagcaccccctccaatccatctatccagtaacccatactgttaagttccctgaagtagaagggggttggtgggaggagcacggctgtgctggaccctccccgctaactgatgggagggtgaggggagttggcagtgagaggaagggcccctcccagccatcccgagggcccccaggagccagacaggaaacagctcaggaaagacagcagccgcagccgcagccccagcctcaggggtcatggctgcgggcggcggggaagcccccccaaaacacgagagtgagagtgagaagggcgatttggagatctagccggacccctcaccctctcggacacacccaccttttttttttttttttttttttttgagatttcgtctcactctgtagcccaggctggagtgcagtggcgcgatctcagctcccagctcactgcaacctccgcctcctaggtcccggttcaagcaattctcctgcctcagcctcccgagtagctaggattacaggcgcgcgccaccatgcccagctaatttttgtatttttagtagagacggggtttcatcatgttggccaggctggtcttgaactcctgacctcaaatgatccgcctgcctctgcctcccaaaatgctgggactacaggcgtgagccaccgcgcccgccacacccaccttttctttaccgttgtttcctcgatttttctctactccctagcgcagcttagtgcgcgcctcctctggacatttttcagggcttggttgcgcgcacagtaggtccccaacactgaatgtttatggggtgactgtgtgaacgttcgctgcaaggctatccaaactgggattgctccttgaggccccctgggcggccgtcaattctccaaagcttctactcccttttccttccttttcccccaaaacgcagtccctgcgcccactagagggtggtgggcgcatccaagagcggcatctagagtccgcagcaaggtcagagcgggctttgtgtgcgcggtgaacatttacgtgcacgcctgggcggccctccgtgttgctgctgggtgtgtgttttctctgctccctggtgccagccgggttcgggcctgtcccgggggtccctgggccccagccccgacatgctcggtcctggacagcgcgcaccgccacggcgcacatctgggcggtcccggggttcctcacccgccgcccctcccccttctccaaactttctctcaacttcccgacctgctccactcggtgcccctctccgcttccctcatgaattattcagtagcgtgagctccaatcagcgcgcccggggctcactcgcggagcccccgcgttgggagagctgcccccgccccccgcgcgcccctccctcccgggcccggcgccgcccggcccagttccagcgcagctcagcccctgcccggcccggcccgcccggctccgcgccgcagtctccctccctcccgctccgtccccgctcgggctcccaccatccccgcccgcgaggagagcactcggcccggcggcgcgagcagagccactccagggagggggggagaccgcgagcggccggctcagcccccgccacccggggcgggaccccgaggccccggagggaccccaactccagccacgtcttgctgcgcgcccgcccggcgcggccactgccagcacgctccgggcccgccgcccgcgcgcgcggcacagacgcggggccacacttggcgccgccgcccggtgccccgcacgctcgcatgggcccgcgctgagggccccgacgaggagtcccgcgcggagtatcggcgtccacccgcccagggagagtcagacctgggggggcgagggccccccaaactcagttcggatcctacccgagtgaggcggcgccatggagctccgggtgctgctctgctgggcttcgttggccgcagctttggaaggtgagtttccttgcgggggggggcgcaccccgtcactcctgggacctcccccccaacatctgggcctcggagtggaggggccggcctctgactacccctacccgggcactgcagtcccaaacacttcggaccgatagtgctggaacgggaggggggcggggaagaggcgcccgacgggtagtggagttttcttttgtttgggaaagagatggagtctggctacgacccgggacattcccctgcccgggctccccgaactctcactgctgattacatacgcccctggctgcctttcctttcctccctaccccactattcaaaactatctgcaaagtttctgtcccagtcccacctcccgccgtacatgagggaaggtttctggagaagcaacagcagacaaggcacaacttttcgtgctaggccctaaaacgacccccagcgccaattccttagcgatcacaccttgatcctccagttccacactcctgcaacaggatggcctcctttgcattcacacagcaaacccccaaaccgctctcccgcccactgctcctgcccctggtatagggtggctccttggtttctacaggctgcaccccatccctttaaatgcggtctagaccccggccccaggtgagtcccgggcttcccttgagacctaggagcgggtagaaactgacctacacagcccccaggtagaaactgacctacacagcccccacatcgccctaactaacccagtc

SEQ ID NO: 11449 - DNA, 6000 bp, Homo sapiens
cttcctctcaatcccagtcccagccagtgagccccggcctggagacagctcactgctgactggggaggtcacagcgccctggggcttccaggctgtcctgggccctcaatacacatggccctcacactcagcatctcacctcctacctcaaaggaaccaggggccacccatgcttggatacgctcatcttccaggccacctacccacaaacgtgatgccaagtgggcacacccctgccctggagcgccccaagtcccaccactgaccccgagccttcacctccagcccattccctccctctcccatcttcaacccctcctcctcaaccggcactttccatcaaagagctggcgacgctcatgtgtctactcggcttcacagctccttctccttcacagcaactcacgtgatgtgtcactttttcacctcccatcctctccttgaaccccaaaatctgacacctgcctggtcatcctgggggaccacccacccacgctctgggccccagagcggctccagtgtgccttcctcctcctccttggacctgagccctgtccaccctgtggcggtgccgactaccttcatcgagtagaaagagaccctttgcttgcttccttgacaaaactgcaggccttctccatgtccaggaatcctccggctccagctcggctgctctccctgcctctatggaggtggctggccctcttctctgctcagtctatgcactcttcctgggattttgactccaaacaaagggctctgatgatcacccacaagcaaatgactcccagagtgactccctcaacacagaacctgctcccgggctccagaactggccatgcagccagcgcctggtgaggccgggtgtggtggcgcacgcctgtaatctcagcactttgggaggccaaaggatcgcttgatgccaggagttagaaaccagcctgggcagcatagccaaaccccatctctacaaaaaattaaaaaataagccaggcgtggttgcacatgcctgtagtcccagttacttgggaggctgcggtgggaggactacatgggcccgggaggttgaggctgcagtgtgcagcaagccgtgatcgcgccaccactccagcctgagtgacaaagcaagactgtctccaaaaaaaaaaaaaaagaaagaaggaaaaaagaaatcacccactggccctgtggacactgcaactcaaaaaaaaaaaaaaattcccatccaagtctgcttctcctgcagattctctctacgcaaatggaaccgtctatgcagacatccaaaccagaaacctagaagttattttaaacctctttcctcggctggacatagtggctcacccctgcaatcccagcactttgggaggctgaggtgggctcatcacttcaggtcaggagttcgagaccagcctgaccaacgtggtgaaaccatgtctctactaaaaatacaaaaattagcagggtgtggtggcacatgcctgtaatcccagctacgcgggaggctgaggcacaagaatcgcttgaacccgggaggtggaggttgcagcgagctgagatcgcgccattgcattccagcctgggcaacagagagagaccctgtctcaaaaacaaaaaacaaaaaacctctttcctcattgccttatcagctgtttgccagattctgataattttgcataatatatctctttattcattaaccacctgttaagcataataataacagcagcagccccagtagctatcacttgttggacacttactatgagccaggcacgtgctcagctctttgcaacacttgaaccatttaacccttacaacagctgtatgggacagtatcatcatccccaatttaccaacattcagagattaagaaatgtgtccaaagttcacatagctaacaagtggccaggtcaggagtcaaagaactacccagcatcaaaaagcatgaccttgccaggcgcagtggctcatgcctgttatctcagcactttgggaggccaaggtgggtggattgtttgagcgcgggagttcgaggccagcctgggcaacatggcaaaaccatgtttctacaaaaaaaatacaaaaattagccaggtgtagtgggacacacctgtagtcccagctattcaggaggctgaggcgcaaggattgcttgagcccaggagctcaaggctgcagtgagctgtgtttgtgccactgcactccagcctgggtgacagagcaagaccctgtttcaaaaaaaaaaaaaaaaaaaaaaaaacccaaaaccaaccaaacaaaaaaaaatatgattatgatcactgtactactctgtctcccctccaaatgccaggcagtgctctaggttttagggatgccaaagcttacagtccagtggcaaacacaaatgattaatgaaacaaacacagtaagtacagcatggagtaggctaggatacggaagtataaagtgctgcagagcccaggacagaaacacccaacctggccttggagtagtcagggaagacttcccagaagaaggtaagtctaggttaaggcctaactggtgaatgacctggctaggggagacagcggggtatttcagaccttgaggccaacatgaaaaaactgatggctgggagactgcgatgcctttgaaaaactgagagggccaagcgcagtggctcatgcctgtaattctagcattttggggggccgaggcgggtggatcacgaggtcaggagatcaagaccatcctggctaacatggtgaaaccctgtctctactaaaaatacaaaagataagctgggtgtggtggcgggcgcctgtagtcccagctactccagaagctgaggccagagaatggtgtgaacccgggaggcagagcttgcagtgaaccgagattgcgccactgcactccagcctgggggacagagcaagactccgtctcaaaaagaaaaaaaaagaaagaaagaaaaactaaaagggccaagcgcagtggctcatacttgtaatcctagcattttggaaggccgaggcaggaggatcacatgagctcaggagttcaagaccagcctgggcaacatagtgagacacccatctcaacaaaaaatataaaaactagcccagcatggtggcctgcacccacctgtagttccacctactcaggtggctgaggtggaagaatcacttgagcatgggaggttgaggctgcagtgagttatatagaaccactgcattccagcctgggtgacagagcaagactctgtctaaaaaaaaaaagtctttgctggctctccagtgtttccctacagagttcaaactcctgggcagtgtgtataatgcctttcaaaatgtaacctttccccagccttcgatcctttcttattactctgtaagatccaaactgtgaacttggcttcctaagcgacttgctttttcttgcttcactgcctttgcacgtgaggttcccactgagagaaaccctaactagactttcaagactcaattcaagctttttcatttttccttcaagctttcacagtcccctgcctcccagaacctgggctagatgccacgtctccctgttcccaggcgctgtgcttccctctgccatagcacaaatcacaaatcacagtaaaatacagtgttaggtctgcgtttctgccccccttccagaaaaagccaatgcttggataagaggggtctttctcctcttcatccccagcgcccggcttggagcaggcaccaataaaacgtgaatgaagggtcaacgccaggacccgagggctgaggaagggatttacgaggaatagctggggccgggcgcggcagctcacgcctgtaatcccagcactttggaaggcccacgcaggaggatcgctttgaggccaagagttggagaccaacctgggcaacatagcgagagcccgtcaccacataacaaattaaaaattaaccaggcgtggggcctcatgcttgcagttccagccactccggaggctgaggtgggaggatggtttgatcccaggaaatcgaggctgcagtgagctatgactatgccactgcactccagcctaggcgaaagagcgagaccaaaaaagaggaatgactaggtaagaaaattctaggactgacttgggaaggggaagggggcgaaccgcgggggctcacatacccgaagttttcttctccaccattggcacaacacaactgtcggaagaaactgctgcgcacgcgtactaaccccaaggctttagtaggggcgccatcacttccggtagcttgtacttctgcgcgtgcgccacagctttgactcattacgtggcgtttccttggagacaagaaagcttttcgccatgttttataggggcaaaaccacttccggcctcagtgtggaggtgtaaatcttgtgggagccacgaaatgggtcattttaaagatgtggtcacggtgttcttacaagaaatcttattttcctttggtccttgtgaagatgctgtgatcacaaaggcagcccctggagcttctccgggcagaagaggaggtgggctggactgtcaaagaaagtggctggcttccgtgggcaatccgaggttcctagtggccctctgcagaaagctgaactcccagttcccccaggcctccgtcccgcggcggactcctaggcttcctccctccctgtcgccgccagcctctcgctctccccgtcttccgcccgcactctctgggcagggctgcggccaggacccgcccccgcgtcccgcccgaccctccgccaggggtcacttcccctgtccaggtttcagcttccacatgtgtcaagcggctggctcagcccagagtccctgtctcccgcccgccggcccgagccgccgcccctcccccgcctcccgtgcgcccgggacaatcctcgccttgtctgtggcgccggcatctggagctttctgtagcctccggatacgcctttttttcagggcgtagccccagccaagctgctccccgcggcggccgcacagcagcccgagcgccccctttccagagctcccctccggagctgggatccaggcgcgtagcggagatcccaggatcctgggtgctgtctgggcccgctccccaccatgacctcctcggggcctggaccccggttcctgctgctgctgccgctgctgctgccccctgcggcctcagcctccgaccggccccggggccgagacccggtcaacccaggtgagatcccggggaggcccggcacggccgagggggcagaggctggcgtgcctgccagcctggcccggagagggtcggaggctcgaggaggtgtctggcccgtcccccgcccagcgtgctcttgaggctgagtcgcgccaagcccctcgcccatcactaccctgaactggggtttccagcctccctatgcaaagggactcggaattcctgggcaccactcccaccctgccctccttggggtcagagtgttcctgggtgagaagagtttaagaatgggaaggaagaaagggagggaagtcgagtgagagggaggacagcaaagcacgtgaggcccggagctgggcggtggatctcaagtgccatttccctctggtaacagagaagctgctggtgatcactgtggccacagctgaaaccgaggggtacctgcgtttcctgcgctctgcggagttcttcaactacactgtgcgggtgaggagagggaaaggcccctgggagggggtcccagcaggaggggtgggctgaagtctggatgcccaggtccccacggtaagcctggtcaggagttccccccacaactccccaccccttgcctggcacggggcaatcttctccacagaccctgggcctgggagaggagtggcgagggggtgatgtggctcgaacagttggtggaggacagaaggtccggtggttaaagaaggaaatggagaaatacgctgaccgggaggatatgatcatcatgtttgtggataggtaacggggctggggatagggagcggggtaagga

SEQ ID NO: 11450 - DNA, 6000 bp, Homo sapiens
ccttgggaggccagggcaggcggatcacgaggtcaggggttcgagaccagcctaatcaacatggtgaaaccctgtctctactaaaaatacaaaaattagctgggcctggtggcgcacacctttaatcccagctacgcagtaggctgaggcaggagaatcacttgaactcgggagacagaggttgcagtgagccaagatcacgccattgcactccagcctgggcaacacagtgagactccgtctcaaaaaaaaaaaaaaaaaaactataaaaataagactctttcttaaaagatacaaataattttaccctatgtttgtctacttcggcaattcagattttcaggtttattctacagcagggtgtaggtgtagaagaaacagcctctctaagtgttgccagtctagttgagaaaacagtacagacaggaagatttataaacacctgcagaattatttagcaacaaattctagtgcatacagtacagttatcctctgggaagtctctgaattaagaaagtcaggtggggccaggcactgtggctcatgcctgtaatctcagcactttgggaggccaaggccagaggatggcttgaagtcaggaatttgagaccacctggcctgtctgtgtaacaaagatgtttaaattagccaggcatggtggtgtgtgcttatagtcccagctacttgggaggctgaggcaggaggatcactgaccccaggagtttgaggctgcagtgagccatggacatgctactgtgctccagactggagtgacagagcgagaccctgtctccgttttttgttttttttttcccgagactgagtgtgcaatggtgcaatcttggctcaccgcaacctctgcctaccgcattcaagcaattctgctgccccagcctcccgaacagctgggattacaggcatgtgccaacacgcccggctaattttgtatttttagtagagacggggtttctccatgttggtcaggctggtctcaaactcccgacctcaggtgatccgcccggctcagcttcccaaagtgctgggattatagtcatgagctacggctcacggcccaccctgtctctttaaaaaaaaaaaaaaaaaaaaaaaaaaggaaggaagacaaagtcaggtggggtcttcggggaaggctgattgaaggtgagttttgagctgatttttttaaagggggagggagtcctaacttttttttttttaaacaataattgtacagcaggcagtttagttaaaaccacaacggcagcactttgggaggccagggcaggcagatcacttgaggtcaggagtttgagaccagcctggccaacatggtgaaactccatctctactgaaaatacaaaaattagccaggcgtggtggcgggcacctgtaattccagctgctcgggaaaccgaggcaggagaatcgcttgaacccaggaggcgaaggttgcagtgagccgagatcacgccattgcaccgcagcctgggcgacgagtgaaactccgtctgaaaaaaaataccacagcagatgccaaaactgagtcacgctgcctttggcttctccagggccccgatttcctcatttcagttggatggaccagttgactgtaatactgataaaaggcatgttctgtcactggggtgttggcacagctggggttcaccctgtcccagagctctggctagggtgctgggagtgactggagctgaaagggaggcttaggactgtgaccctcccaggatcacagaggcattcagagagtggaaggggcctctgggacacagtattaggaaagtattaggaaagaagcatttctcaccctcttctctgcccctccccagagctgctgcccaaagggagcaaggaggaacagcgggattacgtcttctacctggccgtggggaactaccggctcaaggtgaggtggggaccccgttcccttcaccctcctctggggctgcaggaccttcttactgtgtcctccagggtggagccctggacagcgggaaggctgaaggggtgcagaggtgcagagcggtgtcagatgaggactccgagggaagatcagagtggcgagggggtggggaggaaggtgacgtcaagagactgggtgcaggcccaagccttgcgctgttatctcccgcagagttggggttgtttgtggactctactccgtggggtggggctggagggagggagtgggtggaggtcgagggaggagcccccagggctgaagaagggaaggcccttcacgtgggcagggggagtggtggatactgaggtgtagccggcccagtggctcacgcctgtaatcccggctactcaggaggctgaggcgggaggactgcttgagcctgggagtttgaggttgcagtgggctgtgattgcgacgctgccgtccagcgtgggcaacagagcaagaccccgtctcttattaaaaaacaaacaaacaaaaaaacactgcggtgtgtatgacgcgtgcgcgtttccccgagcgcaggaatacgagaaggccttaaagtacgtccgcgggttgctgcagacagagccccagaacaaccaggccaaggaactggagcggctcattgacaaggccatgaagaaaggtgacagcctcggcccctttgttcagccccgctcttccccacgcctgggcactttggtctctctgtaaatgaacccctccaggcagcccctcagccccaccccttccagttcttagagccccttgccctgcgactccaggtaggggtgtgcctctgttgaggggcagggctggcggaaggggacggtcagggtttccgcaggggccgggctcctgacactgtccctttccttccccagatggactcgtgggcatggccatcgtgggaggcatggccctgggtgtggcgggactggccggactcatcggacttgctgtgtccaagtccaaatcctgaaggagacgcgggagcccacggagaacgctccaggagggcctgtccatcctcgctgtcctttccctgttctccccctgccccccgtctctatcctctgtggccttcagctaatttctgctcccctgagattcgtccttcagccccatcatgtgctttgggatgagtgtaaataaaacggggctgtggcttgggaacccccgtgtctgcgttgaggggaggggtgggttctgaacgctgggcacagggggcggagacgtcactcctggtcctctcctgcccctgccctccaggttggcacggggttctttgtccaccccgcagcccagagcccacacccttccttcctccctttcctgaagccatgtccttgagagtgccgggcagctcggagacatggggcttttccatggtcccagagtcctgggagaaggcagtgacctgagcatgggcgggcagaacttcggggccaggccgggcttcaggcctgcattctcctctgacccactcagctacttctgtggagttttccacagcaggcccccttggcttcctcctccccaccctcccctccctttgtcttcctgtggcctccccttcctcctacctcctcctctgggggagggggagcccagtaggggaaggaatcctgcatctggcatggagtaggcgggggtcccgggagaggtcagagcccagggagccccagctctcgcctgtgggctggaaggtcaggactcagccccacctagccagcttcgccccctcgtgccaggctcggcatgggcctgttttgcttcaccgcatacctctcgttccacagcccaggccagcacaggagtagggaggagacacctgaggggaggccggagaagcccagcagggccgtggggccagggaggtgcgcagccagcgctgatggcccccagggacagagccctagggaaccggagcaggagatgagagtgtctgctctgggacaggtgctctgcactggctcgggatggggaccagaggctgctaatccatcatcattaacgaatagagtgggtgacagtccctgataactgggaacaggttgcagagcttagccacaggatcacgctccaggctgttggccagcaggaccaggctcgatgctgagtcaaagatcaacttaggaggaaatttgagttttgggtgagagcgactccctggtggcctcagccctgtgacactcacatccaggacagttcccggtgccaagcgctggttatgtgtggggggcttgactccctggtcccaacgaggtctcagtgtgttgcccaggctggtcttgaactcctgagttcaagcaatcgtctcagcccagcctcccaaagtggtaggattacaggcgagagccactgcgcccggcccctggtcccagttctcaccacagcccctgcagtaagcagtcgggtatgtcactgacagagcagaagctcaggggactaaaactccccgcctgagttccctggtgaatggatggtggggccgagttccattccaggctggatggagcccagagctgtgggtctcctaccctcccatcccctcattccagcttgatcttccttaagagactcatacgccccaaccccttggtctgagtatcttagattgttctcgtggttcctccgtccttcaccactgaaggctgctgttcattctctctccgtctctgtcccttattgctctcacgtctgtctctgtcatcttttcactccttgtccctcttactccgttctttggcccccaatgaaagctgagtcagagacagacgcttcccctcagttcccagtgcctcccttgggggcccctccttggctgtatccgtcagtggctccagggtaagtctgccccccccaccctcgtggggcggggagcccggggcagcccagaggctggggggagggggtggacttttggcccgtttcggttattccctccatctcgtcaacagctgccgcgcgcaggcttagctcattcctctgacctgccaggaagcagagagacccacagagcaggagggaggcagaaagtggagacggacctgagcccgaggaagaggcaggcagaggctgaggctgattccaccccagcctgcctggacaaccctccttagccgcagccccttccagttccctaggggttctgcccctccccctctctggggcaccagccccccagggtcctgcatcccaccatgtcgatggctgtggaaacctttggcttcttcatggcaactgtggggctgctgatgctgggggtgactctgccaaacagctactggcgagtgtccactgtgcacgggaacgtcatcaccaccaacaccatcttcgagaacctctggtttagctgtgccaccgactccctgggcgtctacaactgctgggagttcccgtccatgctggccctctctggtatggggtggggagcgctccagggagagagggcggcggggaagctgcagagaccccaggggagggcgggtacttccgtgaggatgcagggagccctgaattaagctctgcgggtctgagttcccgcagccaggagtgctgggggcggcccatgcctagaactggagtgaagaccttgccacacgtggccccctgcgctagtgtggcgcttttagctgttacaggtgcaggcaccagaatcagaccccctttcccagccctgtgctgtgggcaaatgatgaaaccagcttcatctcccacctgtagggttagggtgagagtcccagttcacaggtgactgagaaagtgcagaatgttagcgtgatgttaacacacataggcactcagtacggttgagcatgttttgggggtgggattgctggggtgggcagggggaggaggccccatcttggattcttagaggttgatcaacttccaggctccacagactccccagcctcactgtcggggggcactggtctccttgtccggctgatgtctataaagggcccctgtgaagggaggcgtcttgcaagttgcaggttgagcgtccgctgtaaggaggcggtgtgtgt

SEQ ID NO: 11451 - DNA, 6000 bp, Homo sapiens; identical to SEQ ID NO: 1271

SEQ ID NO: 11452 - DNA, 6000 bp, Homo sapiens
atgctgctgttctctcaaccactgtgtgttgggggcgggggtctaaaaccagctgtaaccaagtgtctatgtacgggaactggtctaggttccccagcttacaggttaccttgtgccatacctttgaaacaagggacttgtccaggcttccttctaatggccaacctacctctaacgctggccagcctaatttacacaaagttttaaattttcctagtgtcatagtactccatagtctcctttacattttgttctgaaaattttcaacatagttcctggtagggtgggcttatttgtgcctgacctatgcttcttcgagacaaaacaccacactcacgccacacgcacacaagaaaacaacaggtaaaaagggcacacacacacttttgcagtttccaccaaaccaaaatcaaaaccaaaatcagagtatccagaaatccaagccaggtcaaaaccaaaaccaaagtatcaagcaatctaagtagagtcaaaaacaaaaaccaaagtgcgggtacaggtacaccgtgggtgatcaggcgacgcgtccactcaaatggaataggcaagttcccaagaccaatcctgtcaagctattcaaaccaagtcaaaaccaaaaccaaagtgtcgataaaggcatgctgtgggtgatcaggccacacttccactcaaatggagtgggcaagttcccaagaccagtcctgccaagcaattcaaaccaagtcaaaaccaaaaccaaaaccaaagtgccgataaaggcacgccatgggtgatcaggccacgcttccactcaaacagaatgggcaagtttcaaagattagtcttaccaagttttagatgtccagactccaagtgcccattccttcccggtgttcagccactgcgttgattctccacgggggcctgccacacactgctgtggtgaggtgtcccaccggggcaaatgcctacccgggagcgctctcaggatccgtgtcgcttggtctggtcacagtctcccacagggatgttccacaggacaggcttaagctgcctaaggagctgcctccaccatccaccaatcacctcgcttcccagtcagggaaccaagaaatgtagcaggacgagccacagacaaaactcctcagacaccgagttaaagaaagaaggggtttatccggccaggggcattggcaagactcctgtctcaagagccgagctccccgagtgagcaattcctgtcccttttaagggctcacaactctaacggagtgtgtgtgagagggtcgtgatcgattgagcaagcagggggtacttgactggggggctgcattcacccgtaattagatcggaacaaaacaggatagggattttcacagtgcttttctatacaatgtctgcaatctgtagataatataaccaattacgtcaggggtcgatctttaactaccaggcccagggtgtggtgcctggctgtctgcttgtggatttcatttctgccttttagtttttactttttctttctttggaggcagaaactgggcataagacaatatgaggggtggtctcctcccttaagaagagcgtccccaggagaaacaagcttgaccactatgctgtcacagagtttcctctgaccactgagtctgccatgaagaagatagaagacaacaacacacttgtgttcactgtggatgttaaagccaccaagcaccagatcaaacaggctgtgaagaagctctatgacactgatgtggccaaagtccatgccctgattaggcctgatgcaggaagaaggcataagctccactggctcctgattacaatgctttggatattgccaacaaaattgggatcaactttgttgctgacccaacaaaactgggatattgccaacaaaattggggtcatctaaactgagtccagctggctaattataaatacatgtatcttttcaccaggttcatgcctctttgtcaacttctggttgggctggggaggccattcaaggtactgaggttgtaatagggcctgggcaagactcctgttctacttatccttttggaacactcactctgccactccaccatacttgatcactccagagatctttatgaccagagctagttgtcctaagaaaaccagaacttgtctccatggtagaggtaagaaaacaagaagctgccgggtggcggtggctcaagcctatcactttgggaggcccaggcgggcaaatcacttgaggccaggagttcgagatcagcctggccaacatggtgaaaccccatgtccactaaaaagacaaaaattagccgggcatggtggtgggcacctgtagtcccagctactcaggaggctgaggcaggagaatctgggaggcagaggttgcagcgagccaagatctggccactgcacttcagcctgggtgacagaacgagactccgtctcaaaaaaaaaagaaaaaagaagaggctttacaagaaccccttcttttatccctggaagaggctgtgtgtgaaaccaatgcccacagtttgaagggcattagcattcatcttaggggagtgtgggttggctggctttcaggtagcactttgacctcacacacccatctactatgtccaactggtctgtctgcttccctcagccttaaccaataaaggacaaggacttaaaaaaaaagagtgggagtgaggggaacaaagggcatcttttttttttttttttttttgagacagagtcttgctctgtctaccaggctggagtgcagtggtgccatctttgctcactgcaacctccatctctggggttcaagcagttctactgcctcagcctccctagtagctgggattacaggtgagctccactatgcctagctagtttttgtatttttacttgagacagggtttcgccatgttggccaggctggtctcgaactcctgacctcaggtgatcctcctgccttggcctcccaaagtgctggaattacaggcgtgagccactgcgcccagctttttttttttttttggggaaatggggtcttctctgttgcccaggctggagtgtagtggcgtgatcacagctcactgcggccttgatctcccaggctcaatcgatcctcccacctcagcctctggagtagctgggaccacaagggcgggccatcaaggctggctacttttttttttttttaattattatttgtagagatgaagtctcgctatgttgcccaagttggtctccaactcctgggctctaaggattctcctgccttgccctcccaaagtgccgggattacttctccgttgcttagtcaagaacactatgaagaacttttgagtagtaacttcaacttaccctttgggtttgtatgtatgctgttacttttttttttttcttctgttgcacaaaggtattattcaccttatgcagtttcagctccacccaggtgcaagcagctcttaatcacccttaagttcagcagccactctaagctagcctgaggagataaagtccacacttgacatacagttctttacattcctccaatgtcacacaggcacattcactttcaaaatgcagaatagtttggtctgcatttttctgccagtcttatctgcatttagaacctgtggtggtggtttcttttttgccaagataaccccagggacaagcttttttttttttttttgaccctggcacaccccaggacttttataatctttttgcccaacaacccattgttgaattttacttcgacatgcctgtactttacttcttgaaacaactaatttcattctgcagtttaaaaagcaaatccagtaagaaactcagaatcacaatcgtatgctctttcatagttatcctagcgttaaaaaagatgcaaatttagatgagaaccgtgtgtaccagggggctgtgacatcattttaaaagtaaacgatcacacagtgaacaatgccgtgctcccattaatattcaatacgtactgtacaacatttcaaattagagtttagtttcttcgctaccaggatcctagcgccataggctgtaagtattcaaatgcttctcgactgtgattgagttggctatgacagtccgtcaatgggtctgcaggatcccatttagttttagcaactgtggctggtgtccaggaatgcgttcatgcgatctgaaagtaagcctctggcttaggacagcggggggaaccaatttgatcttaggagggtccctgcagagtgtttgagtcgcgaggcgggccggggcaggccgcgtgctcccaggcgcttcctttaccaagatggcttcggcgccccggcccacaggggcggccatcttggtaagggctggagaggcagcctgaaggaggccaccgctggccctgctgtcagattcgaaggtcataataagggagtgacccggcgacgactcgccccaacgatggcgaggcggcgagagctgaagcgctgcctgcagctgctggcgtcctcggcggagccagcgcggcgggctcgggttaggaagaacccgagcgcctgccgcggtcgcccctcccgctacgcggcggcgctttgcgcggggactctgtggccggaagccgcggaactgaggcggcgcgcgctcccggccaccccaagcgcgaggtgagtccgcacccccgcgctcgcaccccgccgctctggccgcgcgcccgcggcccgggatcccgagtgtccggagctccgtggtttctgttggacctcgcgggaggcggttttctcccgcctgctgtgctctgtgacctctctgctgcctcctccacggtctctgggcggagcaatccacactgctgagcctggggtggtttggaattcttcggcgaagtggagcgggctgagagtgggtttcccgtccccgagccctccctcatctcggagatgccgcacttgtgagcgacagggcttcatttgaattttcgcacctcgcgagttgcggagcctgcatctctgaagctgcctcggtgaagagccacagcattattttttttctctttgggagagtagctgtctgggatttgagatcctatcttccctgcaaattaccaggttgcatcttcactgataggaatacatgtgggtttatcttcttttggttgtatgtaaatgaatgggtcgacaacttcctccgagcaacttattgttgcttcatctatagtgtttatcttctaaaaatccattccaacaggtttctccccttttattttggaataagtgtacttatttaactatggaatggaaatgaagagcaaaaaaaaaaatggggctagctggggaggggtggtggaaggctgtgctttcttgagttttctgttctgtggttgtttgcttcttataaattgggtattattgtgggcttttcagaacacgtattcagataggtttttgttgttgttgttttgtttgtttgttttttccttttttttttttttcaagctagagctcgatatggtagatactcttccatgggttccgggatcacatgcattcattatacgtcagttaaacctggaaaatattaagggagtgagtaaagtttaacagccttttaaaaagtcatttagttcttgtctttgcctttactgtacgttgttatatatacatgttataatatgactgactcacctggttggctttggcttagcatgaaatgtttgctacttgataattctgattaatttgtccaggaagtcattcctgagatgcagttcttcaaattgagaaataattcccatgtttgttaaaaaatggaaatctctaacatttccatttctattttcagttacattggttatgaattagccgcagacatggacatcgtttagaaagaagttatgtaatctttaaaaagaagattacctatatcccacaatagtgtgatttttgttgcaagaaaatactgggtctgttaaagaagaaatttagggtaaaagtacttatttaaaataataatttaaggagagattgaggggttaaatttgtttcaagt

SEQ ID NO: 11453 - DNA, 6000 bp, Homo sapiens
taaactagaaaatctagaagaaatgcataaattcctcgacacatacaccctcccaagactaaaccaggaagaagttgaatctctgaatagaccaataacaggctctgaaattgatgcaataattaatagcttaccaaccaaaaaaagtccaggaccagatggattcacagccgaattctaccaggggtacaaggaggagctgctaccattccttctgaaactattccaatcaatagaaaaagagggaatcctccctaaatcattttatgaggccagcatcatcctgataccaaaacctggcagagacacaacaaagaaggagaattttagaccaatatccctgatgaacatcgatgcaaaaatcctcaataaaatactggcaaaccgaatccagcagcacatcaaaaatcttatccaccatgatcaagtgggcttcatctctgggatgcaaggctgcttcaacatacacaaatcaataaacgtaatccagcatataaacagagccaacaacaaaaaccacatgattatctcaatacctgcagaaaagacctttgacaaaattcaacaacccttcatgctaaaaactctcaataaattaggtactgatgggacgtatctcaaaataagagctatctatgacagacccacagccaatatcatactgaatgggcaaaaactggaagcattccccttgaaaactggcacaagacagggatgccctctctcaccactcctattcaacatagtgttggaagttctggccagggcaatcaggcaggagaaggaaataaagggtattcaattaggaaaagaggaagtcaaattgtccctgtttgcagatgacatgattgtatatctagaaaaccccatcgtctcagcccaaaatctccttaagctgataggcaacttcagcaaagtctcaggacacaaaatcaatgtgcaaaaaatcacaagcattcttatacgccaataacagacaaacagagagccaaatcatgcgtgaactcccattcacaattgcttcaaagagaataaaatacctaggaatccaacttacaagggatgtgaaggacctcttcaaggagaactacaaaccactgctcaatgaaataaaagaggacacaaacaaatggaagaacattccatgctcatgggtaggaagaatcaatatcgtgaaaatggccacactgcccaaggtcatttacagattcaatgccatccccatcaagctaccaatgactttcttcacagaattggaaaaaactactttaaaattcatatggaaccaaaaaagagcccgcattgccaagtcaatcctgagccaaaagaacaaagctggaggcatcatgctacctgacttcaaactatactacacagtaaccaaaacagcaaggtactggtaccaaaacagagatatagaccaatagaacagatcagagccctcagaaataacgccgcatatctacaactatctgatctttgacaaacctgacaaaaacaagatatggggaaaggattccctatttaataaatggtgctgggaaaactggctagccatatgtagaaagctgaaactggatcccttccttacaccttgtactaaaattaattcaagatggattaaagacttacatgttagacctaaaaccataaacaccctagaagcaaacctaggcaataccgttcaggacataggcatgggcaaggacttcatgtctaaagcaccaaaagcaatggcaacaaaagccaaaattgacaaatgggatctaattaaactaaagagcttctgcacagcaaaagaaacaatcatcagagtcaacaggcaaccaaaagaacgggagaaaatttttaccatctacccatctgacaaagggctaatatccacaatctacaaaggacttaaacaaatttacaagaaaaaaacaaccccatcaaaaagtgggcaaaggatatgaacagacacttctcaaaagaagacatttacacagccaacagacatatgaaaaaatgctcatcatcactagtcattagagaaatgcaaatcaaaaccacaatgagataccatctcatgctagttagaatggtgatcattaaaaagtcaggaaacaacagatgctggagaggatgtggagaaacaggaaagcttttatgctgttggtgggagtgtaaattagttcaaccattgtggaagacagtgtagtgattccttaaggatctagaattagaattaccatttgacccagcaatcccattactaggtatataccccaaggattataaatcattctactctaaagacacatacacatgtatgtttattgcagcactattcacaatagcaaagacatggaaccaacccaaatgcccatcaatgatagaccggataaagtaaatgtggcacatatacaccatagaatactatgcaaccataaaaaagggtgagttcatgtcctttgcagggacatggatgaagctggaaactgtcattctcagcagactaacacaagaacaggaaacccaacacctcatgttctcactcataggtgggagttgaacaatgagaacacctggacacagggaggggaacatcacacactggggcctgtcggaggtggggggctaggggagggataacattaggagaaattcctaatgtagatgacgggttgatgggtgcagcaaaccaccctggcacttgtatagctatgtaacaaacctgcacattctgcacgtgtatcccagaacttaaagcataataaaagaaggaaggcaaggaaggaaggaaggaaaggaaggaaggaaggaaaggaaggaaggcaggcaggcagccaagaacatgtaaacaaatatctgtggctttacaaaaacacaggaagaatagatgagaaatcatgacattgtttactcacacaggattggctagaatgtgtggaacaaaggagggaagaaaattccctgagtatacgttttcagatctttttaatattctttaattttttcttttatccgcttttaagttctggagtacatgtccaggatgtgcagatttattacacaggtaaacgtgtgtcatggtggtttgctgcacaggtcaaccccatcacctaggtattaaggtctagcatccactagctgttcttcctgatactctccctaatattctaataccaaataaatgtaattaagccagcaaggatgggaagggggtagggggtggggaagactcatattaaaagcaaactcatctctaaaccagaaataatagcaatatctatacaagtaaatacatgtactcagaacagtgcctactacatgtaaacactgaacaggtgttagcaacattgccattattgtgttagtatattaggtacctggtgctaccggcaaaaccagtttatcatccaactgtctccagtgttgctactcaaagtttggtcctccagtagcctatcaggatcacccaggggcctgttagaaaggcacatctcagaccccaccccagacctactgaatcagaatctgcgtttttaacgggatccgcaggtgattcctatgcacattaaagtgtaagaagtactgggctacagacaggtatgtgacaaaataatttcataggatggcaaaggccaagtggcaaatgaaggacaccagaaatgcacgtcccaggagcccaactcctccttagtaaattaccctattaagatttgtttagagatgttcaaaagcgtggagaaaagcaaatttggtttcctcagctagggacgcggagagtggtctggtgcccttgaagagatcgccctcgtgtggagtagggagggaatctctagcctttcctctcggatgaagaacagcaccagcgctcccagccaaaggcctggcccaggttctggaggtggggtctccttggcagaagcctctggtgtctgcaggcgtgcatttacagctttaagaccaaacagctagtccgccacgtgtcactacagtgtgcacgcgcagaaatgcacaaagcaaaaaaaaaaaaaaagatgctcttaatgaaccaactataatccttgctaaggcataaagccagagggaagtatgtatctgaaatcattttctacccctcaccctcttggagcccggcactctggctgcggtgctctcttgtatcccagttgctagatgcaaaacaagctatttcctatctaatttttttttttaagagacggagtctcgctttgttgcccaggctggtctcaaactcctggactcaagcaattctcccagcttggggtaacgtgttacattattctacttaataaaaagcaaaagttgttttataaattctaacttaaatgcccagaaaataacttatcatgcattgccttgtcgtgcaatagtcaatatttgcaaaccaagtgttaaccaaaggcagttcatcaaagatttttgaaaattaaaaaaaaaaaaaaactcatactcacattgtcctcaggatttcctgttttcgaaatgttcctgtacgaatcggagtctctataatgattgtaattgaaaagataagtcaggttttttgtgtttttttttcattttaaaatcataatacgcaatgttttccacttgaacgctataccttgtgtattgtgcttgcttcagcctcgagcctctactgatgttccacctcaaggcgacaggaatgccacctggagaaactcctgggcggtatgggaagaaagccggtctcatcagagtatatttgcggggatcgacgaccaaggtgttaaattccaagcacgctttggaaagttctaggtgcttgggaagagatccgtaggcggcagggatgcccgcgccccggcgtcccagcgcggagggtggcggcggggcctggccctagcggggcggggcgggctcgggttaccgggagtcgcggggcgcggccggcactgcccgcggcgcctcctcctagagccgcacctggaggcagcgcgcgcgtcgaagaggcagcggctgtggagcgcggcggggcggctccgcccagggcagcccgggctggtgagtgcgcgcgggcggccgcggggccgggggtcgcggtccctcgggaggggactgagctgaggcccgcgggcccacccgagcaggggccctcgctgtcaccgcctctgcccctgtctcccaggccccatgtcgcgctttttccctaaacgaaccggtgacagggctgacctgcccgcactctgctggtccctacgccgggaaggagaaagtctcacgaagctctttcctttgcaacccctgtccccttgccctctgcagctccacacagcatttttacttcccgtttgcctcctcgaatcccttcggtgctaatccagcccttcgccgtttccagtttgggtctggcctgtttgtatccaaatcgaattacacaaaaccaggccctcagttctgcctctggccctctttccggagacgggccctgcctcctcctgtgccgggctgggcttgcccggcattggccgcccggagctcccagggagcaaggctgtggtcccgaaactgggccctccgctcagcgccgggcaaggctcaaaccccgggtctctgacttatccggtcacgaagggactgctcagagcctaacagccctaaaatttggtattggccccctcccgggaaatccttctccctaccaatcaggcatcgcggcaggtgctctgccatcatagaggctctgacacgctgaactctcgaagctcgcggcagtgtttatttttaggagagatttagttgatcgggaaccaattgacttggttgactgcctcatctagtgcgcacctgggccgggccccgccgggaaggcgtgctggacgttctcagtgagctccgagacctacagaagaaacagctgcaaggatccgatcagctagctgtgaagaaagcctcagatacgctgtggggtgggcaaaattcttttcctagcttcgatgagtactgtggattctagaatttaaacaa

SEQ ID NO: 11454 - DNA, 6000 bp, Homo sapiens
tgcagaaccaactcacttaggaggtgcttcctgctgaagcaggaggcacctgcatgctgttaaataaaacttgttgcttttacatcagtaactcaggtcaggtagaagaaagtttagaaaagataacagacaacataaaaatattaaagggccttcaaaacagagttcctcaagattccttttcagcacaactatttcaaagcttctccagttaaatttggccatgggttgctcaacttcttctgcctataataaagctcatattagtttgtttatttgcatactgtattgttaattctacatctgattttgtgttttctaggatacaacaatttcaaaccaaaacagtactacagcaaaggtatcagctacataactttcctttgaatgcagcagaacaaaattttaggctacaaatgctgttctcccatagtctcatagcaaccctgaccaatttaagtcccaactcagggatttaggtgtacataacctcctgaccgactaacaatcctaggtagggccaactatacacccctggtcagcaagaagcagttggaagatgagacctttaaccacatgccaaagattagtcattgttgctgtcagggtgtgaagaaaggtagagtcctaattcaggagaaggagtcaggctggcaggaccaggggaaagcaaaacgagaaagcagatagataagctataagtctgcctttcttcatggtccaggacacatagccctcatgtgtaaatcactcacaatcttcctgtgccgagctaccacctgactcttggctgacagaaaaatgcaagttagctcactgcaacctcggcattaccaatactgcacaaagtcttcttcaagcgcagagcacaagcaccatcctataaaatccctagcaagcttttgactctttgcagtcagctcctctttcgctgacctgcctgttgcacccttgcaatacattttcctacgttctcaaataaatctgcctttctttacctacgactgtcttggtaaattcttcttactgcctgtaccactggccccagatagtttctgatcacctgtgacactcattacattaaatgtggtttcctggattggatcctgggggagtaaaaaagacattagtggacaactgatgaagtttgaaaaattctttagtttagtcagtagtaacacatcaatactaattttttttgttttgacaaatgtatgatggttatagaagatgttaacattaggggaaactgggtgaagtgtatacagaactctttgtactttgcaattcataaatcaaaatatgttttaaaatgaaaagtttaagaggcctcagattactttgagattaatttactgagcctattaaatccatctattgtacaatttaaataaatttggttatcttaaaatttttctaaaatgattattgaattcattagcgaaaacaaaacacctatttgtgtttataagcaaaagtcaggttttgaatttggtattaaacaatatcttttcagaaaaggagataaatattggttgggaatgagttacaaagtctcatcttgccaataagatgaccaaaactttgtattcccattgagaaaaacaaaaaatattatagttagccaatgagatgtctaatatagttaatatatggttgactaaatatagtttcctttctggccttctgagcattcctaaatcccaagtgtcacagtctggcacatgtgttcaaagccacagagagaaagtaaaacaatgacaaattatgtaggtaacttagccataattataccaccacagataaagctcaataatactacctcagatagacagaaccattttatattacagggattcttttccaaatagccctggtagagtagacctggaacatgttgttcccagagcatctggctctttcctcagatttgaggaacaaatcagaaaatgaccagtgttgtagtcaatgtgatacagtcatctgaacattcttccctgattttgaacagttgtgccttcaatgagatgctattgtttaaacacttttgtttgaggaggatttaaaaaaaaatcacaattatcttgttgcccaatcagatctcactggctctgccagtcacggccagttccttctcaggaaggtaggcccctgagctcagctgactggcagaagcagtgctaggctgtgactgaaggtgagcagtggcggctcacttctgtttccttctgctcaagagagattctgcgaatgagttctgataagtgaccagatgtggttctgctcaccctcggtggtctccatctttaaaatcgagtgccacagggccaaggaaggaaccttcttaaagttcaaggagttactctagcactgaaggtttcctgaggaaatgtaaccaccatgccttccactggtgggcttgaacaagaagcaggagagaaagtgaggagaggcagacagaagcaacagaaagtttagcgcggaagttgagaaagggcctggccaattccaatttctaaggccttcaataaacaaaaagaagaagagatgccaatattggtttactaagtcatggtatgttttagatctttaattaataaagctgcatgtgaacatatctctaatctgtcaaggcatatctcattttgaaataacattaagagctgggcgcggtggctcacgcctgtaatcccagcactttgggaggccgaggtggcggatcatgaggtcaggagttcaagaccaacctggccaacatggtgaaaccccgtctctaataaagatacaaaaaaattagccggacgtggtggtacgtgcctgtaatcccagctactcgggaggctgaggcaggagaatcgcttgaacccgggggtgcagaggttgcagtgagctgagatcacgccattgcactccagcctgggtgacggggcaagactctgtctcaaaaaaaaaaaataataataataacattaagagtctaatttgaatattcgtgaatatgaagctcaagctaaatagtcttactattcactactccgtccccaggtgcctacccagaagaccgcaacagaatgagagtaaaagcttagaaaaacgggctaaagagaacaaaaagagaagtactgagaggaagatacagaaacaaagtagaaaaaaaaggagagagaggaagctggaagacctggagcaccgctcatcgtggtctcagacgcaccaggtagcagtgtatggtcaccttccactcacctagccctaaggggtatctatgatgctttgttgcttagtgggagaaatctgcaaccatccattaggaacccgctgcaacccccccacctcccggttcaagcgattctcctgcctcagcctcctgagtagctgggatgacaggcgcgtgctaccacgtcaggctaatttttttggtatctttataagagacggggtttcaccatgttagccaggttggtcttgaactcctgacctcacgatccgccggcctcggcctcccaaagtgctgggattacaggcgtgagccaccgcgcccagttcttaatgttatttcaaaatgagatatgccattaggtgctcattgagcactgactgtgctggggactgaggaacgggagccaagataaacataaagattgtctctgtctgcatagaaaatgaaatgtattttttgcactctctggacagcaaacaaggagataggtctcgaaagagaaagggttcgcttactacaaggacgttcaataacagttgtcaaccctgacggaataacctcagtggcaagtagcctgcaaatcatattcgtgcttgaaattcaggtaagtccttggaagctggtttttcatatacacgaatatgaccacattccagctgtccaggaactttccaggtactgaagaagccaggaaggagatcacactaccttggggctcccgtaactgcgtgccaagaggaaagtatcacctaagccgaatcttaaaggggtcagcttcttgaagaaagataccaacgatgccttaaaaagaggactgtcgaccgacagcgtagaagaggtgaaagtgtaggtcaccgagggcctgtccggccacgcctttccttttaggtataaacttacttcatttttcaaccatggctgcgatggtaactttgaaaataaacctaatttccatacgaatatttggtgattcacactttcgaggcaccccacagcacggtagccagaagtctgttgttttgcaattttaatcaaaggcccctaacacatgccttgaaacacaacttcatctgtgccaatacattataaattcataaaaaagttgagatctgttaagggaaggagaggtcagcttcggtgtagtgagctcagctgtggtgagctcggggtcaagtgagggtgtctctgaggccagcgcccccaagctgcgcaggagcgggcgtgggcgcccccgggtcagggctcttcgcagtcgcgcgggtccggaagcgcggcgcgggcccaacgagcgcacgcgtacacgcgtgcgcaggggaagaccgagtgccaggggctgaaccgcagggaagggggcgcggcgcacgcagtatggcgcccaacatctacttggttcgccagcggatcagtcgactcggccaggtgcggcctgaggagaagcctcccggtctccgccccggcccgcccctcgcctccccagccgccccactccgtttccgccccagagtctcagccagcagctcaaccgccgccgctccgccccgccccgccccacggccgcccgggcccgcctccgagcccggccagcgcgccagccccgcctgcccttcctcgccaccgggctgctctggtctcgtcggtcccctcctccgccccgtcgtcctgactctctctccctcctttcctcagaggatgtccggcttccagatcaacctcaacccgctcaaggagccactcggcttcatcaaggtcctcgagtgggtgagtgcagcccgcgccggccaggcccgcctgccgctcggcgcggcgccctaggcggggagacggggacctgcgagccgggacgcagccctgccgcgcgggctttgaggccgccgccccgggactgggagtggacggcagggagggcagggaggccgcggcctgggccgcgcggggcggagacgccgcggcgggcgtcgaatcacgagctcctcggccgcctggctcccaggggagccaccctcccacaccggagctcccctctgggtgtccccgtggagtgggagttcaaatttccccttggctccactgcctcccgcagaggaagggaaaacttcctgctgcggtctaaccgaaacccggcggccggcgtcgcgctctgcggagaggctcagcggttacgtccctgccggtgcccactcgaggtctagctccctgggaagccgattttgtcttgtagacgtgatttggcgagcattccgttcttaatttgtttttaagatgggctccgagttaaaaatagtaaaaaaataaactgtgggccagggaaactaaagaaagtccttttaacaaaacgcatcgagtcagatcggttcacttaataacacgttaggaatggacatcgagtttgtttggggtatttccaaacaacatcctgtttagaaagtcagcttttagtcctttcctgagaacactcacaatcattaacatcaaagaacgcttattaattcgaccttggcaatgatcagttacttggaggagttggtgaatataccaggcactgcgggcttccttcaaacttcgcggcccactacatatttctgcaggcaagttgtgtttatagacagcagcatttacatccatagctttttcgcccttttccttagtgatagagtggtgaagaagaataagaactttcaatttcctgttctaaataacctaccgaggatgtttttaaaagcagcgtagaaactcagtttctctgatgggtacctaatgtgatttcctacttggaccattgt

SEQ ID NO: 11455 - DNA, 6000 bp, Homo sapiens
ctaacctaagcctcacacttacataaaagttaatgcaaaattgatcatggacttaaatgcaaaacataaaactataaaacttttagggaaaaaaacttaggagaaaatattcaggatctggagctacataaaggtttcttatacttgacatcgaaagcacaatttacaaaaggaaaaattgatgttagacttcattaaaatgaaacttttgttctgcaaaagatcctgttaggagcatgaaagacaagccatatacagggagaaaatacgtgcaaatcacacatctgacaaagcagaatatatatctagagtataatagaaaacaagaaaacaaacaaatggacaaaagcacttgaatagatacttctacaaagacaacatacaaatggccaataaacacacaaaaagatgttcagcatcattaatcattagggaaatgcaaattaaaactgcaatgagataccacttcacacccattaggatgattataataataaaataaaaactcccagaacataacaagtgttgatgaggatgtggagaaattaaaactcttgttcactgctggtggtaaggtaacatggtgcagctgctatggaaagcagtacagtagttgctcaaaaaattaaacatagaatcaccatatgatccagcaattctacatctgggtacatagtcaaaaagaattgaaagcagggtctcagagacctgttacgaaccatgggtatttgtatatgggtatttgtacacccatagttcatgacagtattatttgcagtagccaaaaggtggaagttatcttgtgttctatcaatatatgaatggatatcaacagatgaatgaacaaaatatacataaaatggaatattattcagccttaaaaaggaacaagtctgatatatgctacaacatgaatgaaccttgaggatgttatgctgcataaaatattagcaaaataaatccagttctgaacaaatacgtataagacttatatgaggtacctagagtagtgaagttcatagagggagaaagtagaataatggttgccaggggctgctgtgaggaacagtggaatggggagtcacagtttaatgtgatagaatttccatcttctaagatgaaaagagttttagagatcagatgcacaacaatgtgaatgtaattaacactgctgaactgtatacttaaaaatgatcgagaggtaaattttatgttacgtatattttataacaaacttctaaaaaaactcaatagtaaaagagcaaacaatccaattagaagatgagcaaaagatacgaagaaatatttcttcgaaaactgaacacacaactaccttaggacccataattgcactcctatttgtcccaagacttaagttcacataaaaatctatacatcaatacttatatctatttaatatccattatatacttataggtaggagttacaaccaccaccatttttatagatataaaaagtgcagctcagagaagttaattgtttactcaggatcacatatatactaggcaagtagtagcatcatgactcaattctaagtcatgattccaaagctaagagtttgaagttcccatatggtgggtggtcttacagtacttttaaaaagtcagagcataaaagggaaatttcatcttagttcattaatcattttgcaacacttactttgaatatcgaaccattggggcacagacttttaccagctgtccagaatgaaacatttctatgggatctttttttctttcctgacatattgtcgtttgcatgcagtcactcttcattaatacagatatgtttcaaatctgaaaaagacaataagcttgtatagagaaaatatgttttcactatattaattccattctaacaatttcaactgccaacaacatatattttttatcaggcttgtgggctcagaaatttttttattaatagcttattttcacagtatccaatatgatactatagaatgctgcctctatttgtaagataaatagatgtggaaaactacccaagatagttgtggaaacacaagatgcagaaaacgagattttttttttttccctagtttaccatgttgtaagttttcatgttatttaaaaattttttacatgttactttgttgggattggtaagccaagaaatttggtttgaattattttatatatgatactcgactggcatttggaaatatcttgttttattcaggaaagttaaatggcattaatagagcaactcttaagtagtcagtgtttcaaaagatatgctggtgcttttattgtaattcttgaatcctgttctgtctgtgaatcagaagataaacaaacgttaattatttttaaaaattttaatgtgatattatctagtgaaaatttcaattataattctacaattgcattgtaaatcacttttataccccaagaggtacaggtacgagtgatgaaattatggagtttgtaaatgttttacatttgctatacttaaaatcctactatttcacagtgttggctacttttcatattccagtccttggcctcagtaacttagaaacaggtatgtatgaaggaaaaatgaagcagaaaataacaacaacaaaaaaaagaatcagatatgggccaactttagaatggtctaattgctcaaactttagagtctttaacctttaggcaaggagttgaaattaaaaatagccaaggtacttaaggatgtcaggatcttgcaagaaaccgctggaagcaccaatatttaagtaacagaggaaaaggggagagcaaaagagactgaagatgaactttggagctgggaggaataaacctaaagagtgatactcagaaaacgagagagaccattatgaaggaaggaggggataggtatcttaaacatcaaagtaaggcaaaaataaagcgcaatggcaacaaggtcattagtgattttagcaagaattacttcatttttatccactcctgcagtcatagtaaatggcatacagaaggcctcaatatttatttgctgaaagaataaatcagtaggtttcaggggactgggctcacacctgtaaactcagcattttgggaggccaaggtgggaggcttgcttaaggccaggagtttgagaccagcttgggcaatatagtgagacccccatctctaaaaaaattataaaaatcagctgggcgtggtagcaagcgactgtgatcccaactactccagaagcttgggcaggaggatcccttgagcccaggaggttgaggctgcagtgagccacgatcctgccactgcactccagcctgggtaacagagctagaccccaactcaacaaaacaaaacaatcagtagctttctaccttagttgtacactacaatgacccgaggagcttttaagaattagcatgcccaagccataccctagaccaattaaatccaaacgtctgggctcaggatgcaggcatcagtgtttttattaaagctcttcaggtgatttcaatgtgcagctaagcttggaattactggaataagtaaatccaaagattccaaagcacctggtacaattgtttgtttaaatgggttcctaccttacctattaactccttttagaatatggattgagtcttatgtttgtaaactcatgagagcatgcagagtagaggggtcaaaactttcgctgtatgaatgaatattactcactcttctaaaatcttccactggggggaataaagccaaggaaggaaaaacaattcctaattcacaagtaatgaatgaatcacccctattcccatcatgactaagatcttacatactagggaaaatcctctgagacaaagagagcataatgcagtgtagcataagacttgcttacctgaggtgttatgagtatgaaatgcattgagttataaaatacttagaacagcgataagcacaggataagtaatagcacctttttgaaacagaatgtagaaaaccacgtagctctggaactggataaaattggtttcctggatacatacctactgtacaaaatgaaaaagtcatcttccagcttctttttgcgaagaagcttaagactgtcttgcatacttgtggttgcctgaccctgttaatttatcagtatttatcttagaagaaagaaatctaggtcaaaaacgcgaacgtattagtaaagaagatacaatgggaaccaacctgatgctcttacagcgtcaatactgttagttgagatgtggaccatctatcagtttgtaattaagaaaaagtctggcacgtgactgaaactgaggaagaagtagaaaaggcaaaaggtcaaaggtctcatgggaaggaaggagggtagagacagtgagttttattggtccttttatggttcagacttccttcttcatcgactctccctaattctcttcactgttcatccccagcaacttttcttcccaagcatttcctgcgggcttttattaccccaggagtgccaatcaaggcgtggaacagataaagctgtgtagcaactaacgcgtgactcttgtgagtgtggagggcaaacgaagctccctgaaacctccgctctgctctcctgccttacgccgcgcggcccctgttctgaggtttaatacttgcttcacagataagcgctgcggccacgttccggtgcccaccttctccttggctagggcacgacgccagcccagggggcgcggccctgagctgctgcgagagacagctgaaagcgccggcccgacggccttggctccctcggtgcgctgggcgcagagcactcggaccctgggcgcccactgctcgagtacctgcgcggctcctagccaggcttagcccaggcgcgggctgagagtcagttcgccaggtgggcctggagccatgggctgggtgggcgggcggcgccgggattctgcgtcaccacctgggcggagccgttctgctgctgacgacatcaacccggcacctgccaacatggaaggtggcggcggcagcgtcgctgtagctggcctcggagctcgaggctctggagcggctgcagctacagtccgggaacttctgcaggacggtaaggagacggggtctgaccaggtcgtggggttgggggtctgcgctgctccgcacctggacagcgaggtggacccaacccgttgctttgcagaaagttttccagtctggacgtgaccactcccctccgcccggccccctggcttgggtactgttctagccaacctatttactctgggactggctccctcttttctggagtcttggggacacttggtttctgtgtgttcctcatttcaactcgaccccccccccccccatgcctccagcttccctgaagtttcgggagcccaaaccctgtggaccgcgttggcagccaccggctgctgccgcagttcttgacgaaggggtgtagcgttcgagctcttcaaaagtgtaagctctagaacagacggcagacgcataatgaaatagggccttgttttaaagtagagctggaaacgcttactcctttaacaaatggactgtacaggtgacccctcttacaggctggttttttttttcctcctttatgaggcagttatctacagtgacacgtgggggagggtttgagacatttgttcaggttgggattaaccatttgtacagaatctagcagtcagattttattgctagtcagtttggagagaagttgcccaaaataagaaaagttagatataatatacttgaaaagcatattcagttgtgtcaatccagttaccatgtcccgaatctcttatccttcagaataaagttcacatttataagcataaaaataaagcccttctcacctgttcttaattttttctctagtggccatcgcattctaccttgtactaaaatcatttgtatacttgttttaatctcttctgtattgcaaactttttttaatatcccacagtgtgaatagcagtatcttgcatacagtaggtgcagaatgttttttaaattcatcatc

SEQ ID NO: 11456 - DNA, 6000 bp, Homo sapiens
catgctccactgaagctagttacagccctgctaatgatggatgtgaaatgtatatggttgtacttacttttccctgattactagtgaacttgaacatattttcatatgttaattggcacttcaggttttctgtgaattttgccttttgtttattgatttgtaggagttcttgatatcttctggatattaatcttttctaagacttaactgggcaaataccttgttcagtctagagcttgtcttcacttttgttgtggtgtcttccatgttttaattttaataaagatggatttgtcagtcgtttcctttatgatatgcacatttatgtgacttgttgaagaaatacttttattccaaggttataacagcatactttttcttctaaaagtttaaaattttaccttttctatttaggcctttggtcaattgaaaaaatgtgtgtgtgattgctgtgaaatagagatctaaattttatttgttctacatggatagccagttgtctcagcaccatttattgaatagtccatcttttctctaatgccacgtaacctctattatatatcaagtttcaatacatgtttctaggctttctgtcctgttccattggtatatttatttcccacagcacaaacatataactgccataattactatagcttgataataagtctttatatctgcaaaatgtttccccattttttcttcttcaaagttgtcaacaaatgttgcatgttctcactaatacgtgggagccaaaaaagtggatctcatagagagagaaagtagaaagatggctacccacaggctgggaaaagtagcagggagtggggatggagagctgttgattaatggatacaaacgtgcagttagatggaagggataagttctagtgtttcataacacagtagggtggctgtagttaacaataaattattgtatagttcaaaatagctagaagagaaaatttggaatgttcccaaaacagagaaatgataaatgtttgaggtgatagatatcattattaccctgatttgatcattacacattgtatgcatatatcaaaatatcacatatatcccataaatatatacaattattatgcatcaatttcaaaaattgtcttgacgtcttgacttttcttggccctttgttcttccatacaagttttaggccaagtttgtccagttctatgaaaaaaaaaaaagaaaagctttttcattgtaatagcatttatgtaatagattaatttgaagaaaacatctatatgatattgaactttcacactcatgaagatttatggcttcatatttttctttttttctttttctttttttttttttgtttttgagacggagtctcgctctgtcgcccaggctggagtggagaggtgcgatctcggctcactgcaagctccgcctcccgggttcacgccattctcctgcctcagcctcctgcttagctgggactacaggcgcctgccaccaccacgcccggctaattttttgtattttttagtagagactgggtttcaccgtgttagccaggatggtctcgatctcctgatctcgtggtctgcccacctcggcctgccaacatgctgggattacaggcgtgagccaccgcacccggctatatttttcttaggttttgtttttgtcctttaataatgttttctaattatctctataaagttcatcattatatatctttagataagatttactccagctaggcacagtggcttgcgcctgtaatcccagcactttgggaggtcgaggtagcaggatagcttgaggccaggagttggagaccagcctagacaacatagaaaaaacccatctctacaaaataaaattaaaattaaaaaatttactcctgtaatcccagcactttgggaggctgaggcgggcagatcacgagatcaagagttcaagaccagcctgaccaacatggtgaaacccccatttctactaaaaatacaaaaattagccaggcgtggtggtgcgtgcctgtaatcccagctactcaggaggctgaggcaggagaatcgcttgaacccaggaggcagaggttgcagtgggctgagatcgagccactgcaccccagcctgggcaacagagtgagactccatctcaaaacaaataaataaattaaattagccaggtgtggtggcatgtgcctgtagtctaagctacttgggaggctgaggcaggaggatcacttgagcccaggagttcaaggtttcggaaagctatgattgagccactatactccagccttagtgacagaaccagaccttgtctcttaaaaataaaaaacaaaaaggatttatttctactaatctttgtagcttttgttgctattaccaatgatatctttctttttattacatttactacatggttattattagtatataggaaggctatacactatgtaatatatatcgtgtaataatttgcctttgttcagcttgtatccatcaatcttgcaatactctcttatttgttctaaaataaatcatttttatgctgatcaataattctgagcctctacctttaagtgcaatattttccagttcttccatcaaccacatctaaatacaaaatttaatcagtgtatagtggttctgaataaatattctgtacatctgttaaaattataaaaagcagtattatacagtaaagacatgacaaagttaggctttctggattctagctggcttcaataaaagccaataaaaattaaaaattgagatttcaccacaagtgaaaactcaatctattcatttgtaaaataggaataaaaatactaagctatctatggttgttatgaggattaaatgggataaacccaataaaacacattgcaaagttacagcccatactaaacactaattaaagttagctaatgttgataaaagcatgataagtggcaccacagctcattcagttacgcagttagcacaggtgtgagccagatttaaaaacacaggttagattaatttctaacaaacgctaatgacctgtccacattcttttggaattgtcttatagcaaacataattcattgattgaactgtcattgaaccactatttattgagtcattgttctgtggtagattcattctaggtactgggcatacagcagtgaattcgccaaagtccctgcctgtgtggggctttcattctaatgagaaagccaaacattagccaagtaaataattgtgtatttttaaattatgatgctatgttttaaaaagtacatgcaaattaaccaagggacttaaaaaaatactctgagagaatgccacaagaggggctaattgagattaggaagtcaaagtggttctccttgagaaagtgatgttgaagctaagtaacagccaaaccgagagagagagagaagtgcatttaagcagagaaaatgatgtctgcaaagagtgggcaaatttgggactacaggaggccaccatggtgggagtggagaaaacaaaagtaagagcagagtcagatgaggttggagagttgtgcagggggagatcatgcaaagactttggaggcctgttttccctctgtgtaatcatcagccccacaaagaggactagtgtgaaaagatcattctgattaatgagtggtaaagagatggggagggctgcgagaggaagcaagaagtgcagcaaaggtaagagtgaagatgaagaaaagtgatggctttgggatgtattttggaggcatgctcaatagggtttaaggatggattggctgcgggtggggagaaggtctgcaagaagaagtgtcagagatggttcccaggtctctgacatgagtaaaggggaatattctttactgaaatggggaagactagagatggagcagatttgggaggaaagatcaagaggtcttaatctcgatatgtgtcgtgtttgagatgcctatgaggcatccaagcaaagatgtggaataggcagttaaatatgtggacctagagagctggggttagaaatctgaatgttgctgggagccataggactcttatttagggtaagagggtagcaagagaggagaaggaaattcagaacagaatcttaggaaatgccaaagaaagagttagaggagaaattggcaaaaaggatgaggtgaaaaacaagtgtgttaaaaatttttttttagcatttcaagaagagaagattttagcccggcatgatggctgaggcctctaatcccagctactcaggaggttaaagcaggaggatcacttcaggccaggagtttgagaccagcccgggcaacacagcaataccccatctctaaaattaactaattagttaaataatttttaaaataaaaagaggagttcatgaaagtgtagtcagcaatgccaaatgcttttaagtaagatgagagttgaaagtattcattgtgtttagcaacatagggtttattgctcttaggaagagctgtggtgggggcagaaattggaatgcagatatggcctgtggctgggagttgggtgagtgttcctaatgagggcctttatcataccaggagttaacctatacaccacacttctgcagcccatgacagattccatggagtcatccagccaaaaaacaccaccactaaactctcatctaaacaggttggtgaaatgtcaaggagataacccttgagaagattctttttttttttaagtacacgtgagcatctgctgtgcaatctctgcaaaccaatgaaattacgtacacacaagtgcattaaaccacccactggtggtttaatctcacaaggaacttgaggaagcaatcttcatcatcacttctgctgatcaaagtctcaaaggtcaagaccacattgcagtcttttcattgttgtaaaagttaatgagagttaattattaaagctgacagaaaggtaatttgtccactgtcttacatagcctatatatagacatccctatgcatatggatgcacacagagcctgtagacctgagtggatggacactgcctcttagaactagaacttagaactttatcttgaaaatgtaccactgttgcagaagctcctcacagagtatgtgtcaggtaggaaccaaatttatgattgttatattcaaactggttttctgttccttgaaaatggtattttttctgatcaaagcctatttaggagttattatgttcttgagtttattccatgtgtgtgaatattttgaatgaatccactaataagatatgcatgtatgtctggagcgctagcaatgtagaataaatatttaagtagactttaacaagtaaatggttgtaggcatcattaagtcttaaatagccttttcaaagatattagtgttcttgttttaattattcagataattcctttaattctccactcaaatctgactttatagatagattgtctgctctgagggttggcaaaaaaaaaaaaaaaaaaagcaagctttaaggaaagagtttctccaggagagagaatcacctactagaaaggattcagaaaggccatctggtcccagccaggcatagggatatgtatctatagtcctagctactcaagaggctaaagcaggaggatagcttagcccaagagtttgaggtcagcctaggcaacatggcaagaccttgtctcttaaaaaaaaagggagggggtaggggacatatggtctagaagtgagagatttatctgctagacatcctagaaagtccaagactaagggaaacacggagagaagaaaaggcaatgagagtaagaaggatagagactggaaagagaagagagatggggagaaaatggtcactggaaagtagcagaatgccctatgccacaagtagtataatataatataatacattagtaatgtatgggtacttatcccatacattactaactctatcaagataaaatctattttattctttaaaatgtcaggaaaagattatacaactttctttatatatgcaagtgaggaacaatttatcaaattat

SEQ ID NO: 11457 - DNA, 6000 bp, Homo sapiens
ttgttttcaaacgaaaataataaatgctgcagggagataactgtcacacattctttgagacagaacagccaacaatttgcaatcccatctgccatttaaactgctgcagaattctttggtaaagactgctttatgctaaagcaggtagtgccagcttagtacaaatgatagacgagagagggttgtgttgacagccagagcaaagccctggacaggcttactaacagaagagattcattcctcctcaacttgtcacatcttcacaaatcagaggaaattgtatgaaatataatagacgagaagaatttgtgagtgaaacttggaattattcccaaaattaagtcaagtggtggtatttctttttctctttggctagaaattcatattaaggtagaaaaaagtggacatttaagatttaaggaagtttttaaaacatggagactagtcttcatttactttcattcgagacacacttattgagcacatgtaatgtgcctcattttatgcaaggcaacattaatgcaaaaacgaatgttacacaatacttgtccttgtctcactgtctattgggggagataagggcataaacaaatagttacagcattatgttatatatgctgtaacaggcttttacaaggaggaggagagagaggctcatggagaaagtcatgtttaagaggagtcttcaaaggtgtgcagttcactaagttgacaaggtcaaggaggacccacgtagtgaaaggaaagccatgaaggaataaagtatgtcatacacagggaaggagcagagggcagccattgaaggcttttgaataagggaatgacatgatcaaagttttgactctgaaaaaatccttctgcgggtattaggaaggattagactgaagagaggaagagtctggaagtaggaacacttgtcgggggctctggcaggcattcagactgaaatctaagggagggcaatgaggttggagcaaggggacatgctggctagttgctaggaaagtagaaatgacaggacctagtgatggggaggggagggaatgaaggaacgagaggtgcccaagattcccaggctaggctggcttcatgggcatgtgatttgtgcaattgcacagcaccccctaccccactcaggagagtcccatgctaggtttaatgctctttcactgtctttacattaataataatagaggggctccacatttgtgccctgctaatcatgcagccagtcctgttcccagatctccgtcttgagctaaggggtggattatggtgccaataattgaaatgggaaacagaagacagaacacattttgttgtaggagaggtgggtggagagatttcagttttgccacagatgaatttcatttacctatgggtcatcaaagtagagatattcaatggcctgttggaaatggtatgtaaattccaagtgaggtacaagctagagatatgggaattagaggttgaggagagtccaagtgatgcacccctggatatggatgagtaaagggagcagaaaagagagacagaacctttggtagcaccaatgtttaagggatcagagaagggcaagataaatgggagaggaggggtcaaagtcttgtgggaaaattctggaattatgtcctggaagctaaggagaaaggagtctcaagaaggagggtgtgatcatctgaagcataagccacaaagagatcaaataagatcacaatgggaaaacgtccattgcattcagattagaaagtcaagggcacttaccaagaataaatgtgtgcgcaaagaattgcagggtgcacagagcttcccctccttcctaggaagacattgtagatgccacgcccattccaagctcttggatacgaggggcggagaggacgtgtcactttctaaagaacaaacacaacaggtggaccctgtttctaaagggttaacccgccttccccgagtgcagggcatgagagttttagccgtgggcaccgtttggtgattctccaaaggaaggagagggagtatagagtctttatccttcattccagccacattgcctagagcaggagtatggaacaaagctcaagctttgattgagcaaaccctagaatttgctcaatccttcctttggcttcatagctcaggttcttgaaagtatagtttgctcttatgctctgctttccccaagttcctcctccattccatggcagtgtggcttccatctccaccacggttcttggtaactgaccttgactttttttttttttttttttttttttttgagacgaagtcttgctctttttggccaggctggagtgcaatggctcaatcttggctcactgcaatctccacctcccggtttcaagcaattctcctgcctcagcctcccaagtagctgagattacaggcgcctgccaccacacctaatttttgtatttttagtagagacgggtttcaccatattggacagactggtctcgagctcctgacctcgtgatccacccgcctcacaccccttacaggcatgagccaccatgcctggccacccttggctttctaattgctgaatgcaatggacattttcccattgtgatcttatttgatctctgtggcttatgcttcaagatctccctcttgaaactcttttctccttagctcaatctttgattccatgagcaaatctccagagctcaagctttgattccatacaatgtagagtttgtgttgtttttacttaaaacaggaggaggctgagcaagtatatgagagcactgaacttagtagatgagaggagggcacacttctaggagagaagcacaaaagatacaggtgggaagggaggtaggcaaattcatagatgaagtggtcagaaggtgagtgttacacacactcctccccctgcacatatacaggcaaatttttaaaaacctaattttctcagtagtgttcaatttactactgcaagtgaggtgatcaggagagcaggtaggcttctgaacagtgctgaaagtaaatgaccttttgcaaggggagaggacgctgagcagggacaggtagcaaggagggctcagctgctgtgagagcagaggttaggctcaagaaagaaaaggagctgaaagatgcttgcagtgtgtgcacatgaaaatacgaaactctggcccagggtattaaaagctcaacaggaagaaaagacatttgccttttaatatttttcttttaattaagccctgaagaccctccattgcaattctacagcctcccaacagcaaggactttctcagcgctttcaggctacccagccggcgcagaggatcctaagcctcagcagaggcaaaacctccccaggctgtagcagggcaagtgctgatttggtgaataattaatgcctcactcacctagaccccaaggctcccgcctgcctcagactcgtgcaggcttacgaactcgtaaagcagctgactctatggtctaatgattaaacttctctgggccttatttcgttacagctaagttaaaaactgaccagctagccgcttaaactcttctcccggaaatgactggaaaacaagccaagtctcctgactggactgacaactaactatactccctgaattccagccacatttgcccagagcaggactccaagctttgactctgtccattgctaagggtagcagaatgggtggtggggtcccgtcaccaacctcttttccctctccaacccctagaaggtggtgagtttctatgtacccctaatttcaccaggcaggttacactgtgttgttagagacccttcattagaggccctctccccacctcagcatttgcacaccatggagaatcgtcgagatgagcgttgtggggaagtgcctctcatgagagatttccacttcctggctgtgtcaactcttccacggcgagatgggaaacggagtcagtaacaataatagtgtcatttgaggaattacctgagctaaagccatcatctggatataggtaggaagatttttttttttttttgagacgtagttttgctcttgttgcccaggctggagtgcaatggcacgatcccggttcacggcaacctccttctcccaggttcaagcgattttcgtgcctcggcctcccgagtagctgggattacaggcgcccgccaccacgcccagctaatttttgtatttttagtagagatggagttgcaccatgttggaagtagattttttaaaaacagaactggacgttcaattcaatgccgtgaccacctgggtaacagggattacagataggtcctgaataaatgtgtgcgcaaagaattgcagggcgcacagagcttctcctccttcctaggaagacactgtagatgtcgcgcccatcccaagctcttggatactaggggcggagaggaagtgtcactttctaaagaacaaacacgacaggtcgaccctgtttctaaagggttaacccgccttccccgagcgcaccgcacgagagttttagccgtgggcacgtttggtgattcacttcttgcgaacgtaaatgcgcgagtccgcggtaggtcccgccggccccctggctgggcaacctgaaaacccacctcggagacgcccccacgcatccgcccccctcgctggacggccccgccgcgcgccgttctgggacgcgcaccccggggcggacccgccctgggacctggaagcgccccagccccgcagcgatcgcagattcggctttcaaacaaaagaggcgccccggggggtgggaccgggacctcacccggtcctcgcagagttgcggccgcccgccccttcagccccggctctccgtatgcgcatgagcagaggcgcctccctctgttcctcccaaggctaaactttctaattcccttctttgggctcgggggctcccggagcagggcgagagctcgcgtcgccgggtgaggagaacaaagtggctgcacgattttccccactttccagcccaccccccgcttccgtgggagcgacaggaaatggaagggcgcctcttctctctttgaacatttgccttttttcccctcctttccacctctccagaaaggaagacgggaagaaagggcaggcggctcggcgggcgtcttctccactcctctgccgcgtccccgtggctgcagggagccggcatggggcttctccagttgctagctttcagtttcttaggtaattccgtggaaacggtgcggggaggcggacggacttgggcatggggaaggaaaacccaaaagctgcttgctcaccttcgtgggatcctgggggcttgggagagggactggatggaaatgacgcccctgggattaaacgccaccgcccttgcttcggtggtggctggagacagcgcacgcggagcgccgcggaccctcatcccccgggctctgcgcccaagccccggcccctgcggcctcccgcggcccccgctcagggttttgcaccctcggccggttcaccctgggtttccccaccgcagagggcaggttccctggggttggcggtgctgaccgaggagggctctccaaaaatccattgcccaggagagtgcctgagctgagcggaggcttcattctgggaacagatgggggccatgtggctttaattaaccatctctgtttgtctccggatggcaccagaaacagcaggacctggcgcttccctggaatggagaagccttgaaaccactccagagccccagggactgtccatgggctcccctagctccggaaagcggcgtccaccgcgagccccggcgcctcgtccccagcgaagcgccggtgaccctcgcgcgtgcacgcacacgcactctcgcttcccaagctcacagatctccacgcgcacactcacaccgaggatgcgcgggctgccgcgtgcacgcgggttcacgtgcgtgggtgtgtggccctttgggggtcagcctccctgcgccgggctccggacacgtcgaagtggagggtctacacatccaccctttgttggggga

SEQ ID NO: 11458 - DNA, 6000 bp, Homo sapiens
tgatggactgagaacctcagttcctcacaggctgttggccacaggatctcctcagttccttgtcatgagaacctctcctctccatatggcagcttacaacagggcagcaggcaagcaagcaaaagagcaagacagcaagacagaaaccagagtgatttgtaatccaatagaagaagtgacatcccactacatttgccatattctgatagttagaatggagtcagtaggtctggtctcaaggggaggagatttcacataaggaagaataccaggaggagaatgtcactgggaaccagtttagaaagcctcccattataacaactatgcttttggacaatattgggttataataccctttcaaacagaaaggctttaaaaattactacatttgcagctactcgggaagctgagacaggaggatcacttaaacccagaaggcggaggttgcagtgagccgagatcacgccactgcacttaagcctgggggacagagtgggacgctgtctcaaaaaacaaacaaacaaaaatacctacatttctcacatgcctgtcagaaatctaatgcacgttgcccagcctaacctattatattaagataatgatgacactggtataagccattcttctagcaaaaaacctgttatattatgacaggaactttttttttcttttctttctttttttttttttttagtgcttcagtcattcttaccagaattcagccaggttttatctgtgttttactagaggagccgaaaaaaatgctcttggttaccaccagaatcaaaaaaaatgacacagctgaaaaagaatttctgtgctcacttagtccaattctttcattttatagcaaggcaacaggctcattactagcattgctgggtccatgttaggttttgctgaatttaacattagatttgaggacaggaccaatggtactgcctcccctgggaggcctgcagcatggatgtggattaagaaaattgagatggaaaataaggcaaggcgttaaaaaaaaaaaaagtggaagaggaaaagaggggagggagaactctgagaaaaagagacaggactgcagaagtagaggaaaagagaaaggctaaaacatattcactgcaggtaccactggggggctccatgactttctgatgtagctgttttaacacagtgacattctgatgtgtctatgaaaacaatgaaacttttggtgtgttgtcattgatagacagcatggcacaatgactggttaagacttaactttggagttataatgcggggcttgaatcccatctctgcagataaactgtgtgacctctgcaagttacttaacttttttttgccttattttctaaaaggggaatgataatagtgcctactgaatggaatttttgtcagaataaatgagttaataaatgaaaataataataatgattctattattatcacatgatgaggacacagaccttattcccagtcctcagctgggtttgaagatggagtgaggcttggtaatagggagaggataaggcttagggatgggaaagggatagcagcagttagggtaaggaggcaagttgtgggtatcaccagcaaagtgcagccaaatcagactgcctcatgcatcaccaagcagatcaaacagactgcattagaaagtctatttgcccacaccgccatctttctaattgtagaacatttttctatccccacctcccatactcccttcatttcagctcctcttgaagcctcagtttgttcttcctgttgctcattccctcaggagatgaatccccagcaatgtagagctgcagtgcagttgaagtaataagctggaaatcagaactatataataattttatattattacaattattatgtagtatcaaaattactttctgttttttgagacggagtctcactctgccgcccaggctgaagtgtagtggtgtgatctcggttcactgcaacctctgcctcctgggttcaagtgattctcctgcctcagcctccccagtagctgggattacaggcacacaccaccacgtgtggctaactcttgtatttttagtagagacagggtttcaccatgttggccaggctggtctcgaactctgacctcaggtgatccacccacctcagcctcccaaagtgctgagattacaggcatgagccaccgtacccagccccaaattacttaattttagtttttgttttgtactatcactgtggttcctatcttctccagagctttttctcttctggctttgtactttttattcaagcatgtatttacattacagacatcttatcaaataattactgcttaaactagaatttgctgagcacctattatgtcctagatactgtccagtgctttcttacaataaccttatgtattaagtattgttactctacctgtaaaggtaagggaaactatacctgagaaatcatcactcacataaaaaaaaaagagagagattctattcatgtccttattctttcagcaacccccaatagcctaagtagtctcccaggcatcaggactaacctggacttcaccaggaccaaatatcgtctgcctcaacctggcttcatagaccaggactggagcctgaagagaaagaacaattctaagcagaagttcaaggagctgtttaaagagggtctttatgagattgtaacacaggaagacacaagcaatgttgcttcagtgcccgggggataaattactacacagaaccagggcaagaactgaagagagtagggtgtcattttcccacttgacaggtttgccctgtggcattcactggaaaataatgtggaccagaaatcaatgtttctcagtggccggggtgaggggcaatcttggaaaaccagagtacgaagtagaaggacatgggaaggacaggcaagacaaccccaggattctcagcaattactgcagtggggaaggaacggaggggcctcaagtcctttacacagggcaaaatgatggggcagtgagagttgattatggttatctgtggcttcatttgtattgatgagaaatgtggttacacaaaaataaataagacaaattgtcctcaaagaagtgaaattttatggagtcagacatgcaaacagatcattaaaaggtgaccagcactattataatagtccttacagaggaggtaacaaccaagtaaggctctgaaggatgaacaagagtttgccaaatgaaaaagagatggaccaatattctagctaggaggaacctcacatgcagaggcttagagttatggaaaatggagagataagttaggagcagattgtaaagaggcacaccaggagatgtggaatttactttgtaggcaatagagaaccagcccaccagcccagactttcaagtagggggatcatggaatctttttttttgcgggggggaaggtattttagaggaaaatttggacaattagttgagaggtgcaaggtaccacctgaatggcagttgggtaaggactagagtcagaagaaccactgatgggactgtggaaacaacttgtgcaatgacccagcagccagatatcatgctggttcaggaaccgagggaggctctgtgaggccagagcacatttggctggagaaggaggagaggatggcagtagaaggagaaggaaaagaaggctgctcacttgcatgcagatgctgtgagctgacggggcaagttcaaattgaagttagaacagaccactggggtagtcaagaccttgaaggatgaacctgtttctttttcattcctgaatcttgccccagcaccttggaggctgggggtggaggaggtggtgaggtggggtggggtggtgaggagctcagaaaatgttttcctgaattagagaactgaaggaatcaaggctccgctgagctcactaagcgctggagcctgctgtaagtggtcaagtcgggtgatacccagcagacaagtaatttgtgtgcagaccggagtagattacggaggacccaagggtcaggctaaggatcctgaacaccatccacgatagagtggagacgtgcgcttcggagcctgaactatgcagcaagcagtgtgtttactcaaatactatacagttggaaaatcttaattctcgatttacattgccaaaaaaaaaaaaaaaaaatctccataatactcccccatttgtaaataagcaaatccgaactaaccctattccttgggaccagaagacccagtttctaccgcggatagatagcatccgccttatgctaaaagctcttttttctgcggtggtggggggcggcggggagtgtttggaaagaacggttgcaaaaacaaaacaaaacccccaaaaccactcacccaatctcaaccaccccaactgatgaatttcgaagaaagtgctttttaaaaaagaaaaaactagaagaccacagacctcccacagaaagctaaacccatgagagtggcattcaaaaactacccattttctggaacatcttttgtagctaaatcccagccatcctagccccggaacactcccgccctccgtccccgcacccccacccccgccgccacacgcgctcgcaggctgacggaggttggcggtggggcggccgctcaggtgaggggccacccagtccctcgaggcgccggcggctggagcccattcgctgccgtcgcagcagcagggcaagagggggttggccaggaggggaggaggcggaggacgcccgcagggagtgcgggggagggggacgggaggacgctaaggagagccgggaggggcaaaagcacggcgcggggagggggagcggagagggcgggagcggcgggggcgcgcgccggcgcggggccagcctcgcttcgccagggtcgctggcggacgcgcgccgcagtccgagcctcagacgcgcgggcgcgggggacggcgcaggggccgcctggctggagcagccagaggggatagcttcgtcgagaacggaggacaccggcggtccagggtcctgggcagtcgcgccagagctgagcggagggcgcggcgcgagaacgtaagtagctccttgcgcgtctggcggtgacactgggtcctgctcgggggtgacggctggagcggaggaggacgcgcgaggctgctgcgttgtcacttggacaccgccgcggggttcagccgagcgctcaccgggctggcagcgctgcaggaggggcaaagcagatctccaactcccttctcccctgcaggcccccgacactcccgcgggcgccgagagggagcagggggacctgcgcttgggtgaaggcacagctgaaatccagcagcgccggcacccaccaccccctccagcctgtggccaacttctgctccgcgcccgcaccccacgctttccgggaagccctgcccagagctcttgctcgtgggcagttgggcatggagagcctgcgggcccggcacggcggcttcccgggcttggacacggaggcgcggggcgtcacgccacagtgccggcggggcgaggagcgcgggggccgggccgggagcgcacgggcgtgtgcctgttcgggcccctgcggacacgtctgggcgtgggctttgttcggaagtgcgtacacctgtgctgaccacggagttcgggggcgaggccgacttcgcttctccagtcgctgcctggagagggctcggggaatcgaggcggaacgagagagacacggaggacagaggggtggggcgcttgcgggggctttgtcggccttacaggtgcgggtcccgggagtccctgcgccccgccctgcctccgagggctgggacttgtcggggccggcgcaccgggctgggggctgcctggaaagattgctttcccagcccaggctcttagcggtgggatctggcatccgctccgcccgggatgctgtgttgagccaggagtgattacccgccctggagcatccatctcgcagcgagcgccatctgcgccgagcgccgcccccggccccctccacgccgcgcgggt

SEQ ID NO: 11459 - DNA, 6000 bp, Homo sapiens
tctgtgtctcaaactatgtttgaagtgatatcctttcactagtagtcttttaaaatactaaatatcaaatttagttctaagagattacataattcatttttataacttagatcagtaattctcaaatagaaatatagcagtgtctctgagggagagagagaacattataagatattaaatttattaaagggtacataagctggaaaaggttgagagagcttgtcacaaagaaaaattatctggacacccctggagatcttacatcaaatggaaaaaaggaagttcacaaaagttaattgattttaacaacataaatgaaatctagaacaaattaattttaatgactattttcaaagaatgattaatttgttaattatgaattctaaaactagaagttggcatatgtatggaataatatggacaatattggactgagggcaagagagagctgagttcaagtcagttctctgctattaaataatggagtccttcattgttctgaatttgtgttttcttatgtgaatatgaagggactagcctagatgattgctaaatgaccttaaagttctacccaattcttgtttttttttttgtaaaagcattttatagcccccacacacactaaaaatagcacatagtacatatgtagagggataatagctacaattgttttcataactagaacttaagtccctgactatggcagacagactaggagatcatgcatttttttttttttttgacacctagtttcactttgtctccaggctggagggcaatggctcaatctcggctcactgcaacatccgcctcctggattcaagcaattctcctgcctcagcctcccgagtagctgggactacaggtgcacaccaccatgcccagctaatttttgtatttttggtacagacggggtttcaccatgttggccaggatggtctcgatctcttgaccttgtgatccacccgccttggcctcccaaagtgctgggattacaggcatgagccattgcgcccagccggagatcacgcatcttaaccaagtctatatatcagaatcacttgtgaaccatcatcctcttggaaaatcttatttgaacatctctcccagtgatttttgacatctatctctggttttaaagactacagttctagactgtctcttgacaaaacgtttctttgggttgcaaaaatctatgctaacatgggaaacaaatgcaaaatcataattaatttcaaaatagatcatttctttcctacccatttgtggataaacacaatctctcttatttttgattctcactggatcagagctgatcagaccttagatatttaactttttttcttgaacccatgacagtagaagatcaggtaatagaaactcagttggcattgagatacagtatgtataaataaagaggaacacacatatgtattttaagttatatatgtatatatgttatatacatatttgcatatatttcatacctcatatcttctgtttgctcctccaaatccacttgccaccctttccaccattttcctccctgttttctgctgcgggagactgacctgaatgaactataatagttcccatgccctctggccaataggtagctctggtaggacatcataaaaagggagaagaatgaattcagtttattatgctcccggatcactcctggcaaagtcgtcttcaactggctgtgtcctttgaccaggtctccagttggtaagctctttatggcacgctttgctttcaagttctgataagtgttcccttcccttatcccttgaaggatggtaaaagctctgatgcaattgaccccagtttgtcacactagttcttgtggcttctctgcctttacactttataaatagacccttgtaaataaatcctcctgaaattatcttatttgagcatgccatctatttcctatttactgggttcctgactgatactgttttttatgttaatggtgcctttgagaatatttgattaataccaaaaattatggaatgcatggagacttgagctttagtttgtaaaaaaaaaaaaaaaaaaaaaaaagaaggaaagaaaaagctttaattcttctaaaaacagtataccttagcagctgaagaagagtgtgataaattgtgttgaaattgaggtagtggtggatatgagaaaatgggacattggtctgatctgtgatatggaaataaagcaaggaaatgtgaattttaactgaatgcaaacaccaagtcacaaggctgaggctgttagtatttcttttcatgctccagagacacttgatctataatattgcattcatctgggggcagctcattaacagaaaaatacaggcaagctggaaggagttcatagaggagtaacaaaatggtaaaaagcactggaggattgacatgtgggaagagattaaaaagatgaaatcactctgctttagctaagtggtgactaagggggaacatgtcaactgtctacaattatgtgaaggttataaattccaaaagaaaggcagtgattactacaaatcaaggtagtgctctgtgtaaagagacacattaacaagggaaaagtttagatcaaataacaggaccattttctaatgtagagctatattatgtcttataaagctaagtgttacacactatagcctttgaaaaagacaaaaatgaaacaaattacaaatcatttcttaatgatatatatgaattctctgtagctagatagattacatatctatccatctatctgttgatataccttagaaatcagccttttacaaacatatatcggaattgaaatagtgactggtgctattactataggttttgtgctagacatttaacaagaatcttgtttaattttaaacattgtactttgacaattaaggcaactgtgggttagaacatctgagtaacattcggaaggtcatccagctagtaagcagcagagccaggaaatggacccaggggtcttcatttccattcctttgctaactaactcctggatagttaaaatatttcagtacattattatatcttaaattttcattatcccattatttacatggctatatgaactattttactaatttccataaagcattttgttgctgatttccttgactacatagcaatgtatttcaggtaccttgaaatatagctacttgtagtcatcaaatctgaaaggcacagacatttccgcagccattacccattcttgagcaatccatgtggtcaccacccattctagctatgtggatgagataaagctcaaataatttcatttctttatccttctagacactagtcacttataattttagaaaataatttctccatccactactttatgcaattcaaattacctaataagttataccatattaatgaggttttcatttgaaagaaattatgctattgggctctttataaaaagaaaaactaatcacctttcacacttcgtatattttttcagtttaattaatagatattttgaaagaaaaccatgctcatgtataatatttcaaacagtacagcagaccataaagtaaaatgaatagagcccccattcctctgccatctttaaattctgtggttagaagtaaatactgctaacattgtcttttgtatcctttcaggagttttctatgtacatatctgtacacattttcttttttatcacttagccatttatcttggttatctttccatattagcacataaagtgctactttatccttctaaaacattctattgtatgggttatttatccaatgctctttcgagagggacatttaacaggtttgtagagactgttaaacgcacaattctgttatgaacatagatctctatttatctttgtatactttcccatactgacagagcaaatttctagctggggcatttctcggtcaaattgtgtgcagttaaatttttataggtttttaccaaaatgaccatcccccaacttgggttttatgacataaaaaaaacgtgacagtttaagcaggctgttcatactttaaaactcatattgaatttcaaggtgtgatggtatcaacttctgctttgtgggcataaaatggccatttgcaaaagaacattttattctacgtagatgtattagtcctggatcaggcttacctttgcccacttatatttgtaaatcaataacatgtcttatctgtattttcccatggcttaattaaaataaatgtactaatgtttaaaataatgaatttgattacttctttgttctaggcttttgcttgggttatttcttctacctggacaatctgccttgctccaaccttgcatgtctaaattccacctacccttcatgctttatttaaaatgataccttccccatctgaatcatgtttccttcctcagaactttcagcacctctatttaacccttttgtaataaagctatacatttataaatccctgaaaatgatagctgtcattattagtaggctctggatctcttcagttctataaatgttcttatctttccctgtttgcacttacctgctccatggattaatttagtccaaactacatattcagtattgtgatactacttttattttatttaaaaaaaatccacattttcatttttaacatcaactaattaaaataatatttttatcctaaagttccaggatttccaatacagcagaacatgatttaaaaatatctgtttggaacttagctcataaacaaatacagctttaaaaactgccagttaaatctgaaacatactggtgggagtagcatggatgctatcatatgcaaggcctttagggggaggctagcagggttgcaggctagcatagttgacacgccattggacctatttatagagctgagttctttttgcaatgtcaactgtaacattatacctattttaagcctcagtatctcaaatgtcagcctctactagtcgtacagttctctcttatttgatatcagagagcccaatggagccttctgaagtacctagtcagattagcaaagataattttttagaagttcctaatttatctgactctctttgtgaagatgaagaagttactttccaacctggtttctcccctcaaccaagtagacgaggttctgattcttctgaagacatatacctggataccccatcttcaggtactagaagagtttcatttgctgattcctttggattcaatcttgtgtctgttaaagaatttgattgctgggaattaccgagtgcttcaaccacttttgacttagggacggacattttccacacagaagaatatgttttagccccactgtttgacttgccttcttcaaaagaagatcttatgcaacaactccaaatacagaaagcaatactggagtcaactgagtctcttcttgggtctacaagtatcaagggtattattcgagttttgaatgtttcttttgagaagttagtatatgtaagaatgtctttagatgactggcagacacattatgacattttagcagaatatgttcctaattcatgtgatggtgaaactgaccagttctcctttaagattgtattggttcctccttatcaaaaagatggcagtaaagttgagttttgtatacgttatgaaacttctgttggtacattttggtcaaataataatggcacaaattatacattcatttgtcaaaagaaagaacaagagccggagcctgtaaaaccatggaaagaagttcctaacagacaaataaaaggctgcttaaaggtaaaatcaaggtgaggatatatcttacatattttattattcacaatcttaaagtttttatgtcattctttatttcatgtgttgtaagaaagtgactctatttaaaaatatactgcttgctatgtaaaaaacaatggtgccaggctttaacaaggtcaaagctattcaaataatagcactgtgtaaccctttctacaaatgtgagaaaaaatatggctgtaatgcaatagg

SEQ ID NO: 11460 - DNA, 6000 bp, Homo sapiens
aggaagcatgctaatgaagttataaatttttgagagccaaaattatggtagaactcttggtatctcctagcacagttctgagtttgtagtaacaattcaataaatatttattaaatctgtgggtgaagtgagtccaaatttctaaactttgcatgaaggtcaggtttcaataaagtttaagagaaaagttttctaggatttcataggagggtactgatttgggcacttctttaaagaattacctggtgtgtaaatgcaaatgacgatgctgaaagtaagcttatggcatgggatggaaatgatgtgatacgagttttctcagggtcctttgctattgccatgaggttcctgcttcagtggttctttcaataactaagaaactttgctaagtagtgccccaaaatggttggctgagagctgggttgtcctagcagtgaacaggagagaggatggtactatgccttcctttctctatccctcagttcaaataaaaatctgactgtgttcagttatctaccttcctctctttggccctgtgctttagagaagggctgtcccaggcacaggtaatacatcttgattggtttaaaacctggccagtcatggtggctcacacctgtaatcctagcactttgggaggctgaggtgggtggatcaccttaggacaggagtttgagaccagcctgggcaacatggtgaaactctgtctctacaaagacaaaattagcacgacgtggtggtgcatacctgtagtcccagcttctcgagaggctaaggcatgagaatcacttgaactcgggaggcagaggttaagtgagcagagatggagccactacactcaagcctgggtgacagagtgagactctgtctcaaacaaaacaaaacaaaacaaaacaaaacaaaacaaaacaaaccagttatggtagaaccatagttcttgtgaataattggtagatatatgagtatgtgaccaggttctagccaatcaatcaaagggataatctgctgcagaactcctgggagaggtttgctagatcctaagagaaactcataggagaaaataccttcttcctttggaagtaatggtaactgaaaatgatgcttgaatttgcacagccatcttgtgaccataagaggaggtacctgagtatagtatgattactcattgtgtgtgtcaggagagtaaggaggaaaaagaactgattccttgatatcactactgggcagatgaatcgctattcctggactcattgttatgtgaaacatatttgtttttgtggctctttgagtgcatttgctagtttgcatagggaggccagattcaactaatacaaatgtagggtttgcaattcaatttgaatttcaggtagacattgaataattttttagtatatgtatgtccagtgcaatatttgtcccatgcaacatttgggacatgcctataccaaaaaataaaaaattgttgtttatctgaaatttaaatctaatgaggtgtcttgtattttatctggcaatcctaagcttacagtagaaagcagtctacttaattcagtaatgaaaggattttctcaggtcttattaggtctgtatactcttttagaagtgaggtgaaagtagatttaccagtcatagtttaagtacacatatttgaatttcagcttcatattctcgaaaactaactttaaaaagttcgaaaattttcctcttaagtcttgtccaaccagatttgaaattttattgtaatgcagataaacagtggaaagaatcagacagatcttagaatctcagcttctttatttactacctgtgtgggtctggcaaaaatcagctatctgaattgatttcaagtatctcaacatatagttatgaggaattaataagataaattgtgagaagcacctattatgtcagacacatgtaatttgttcaaaacacattaggtgtctatcccatattaattgtaaagtactggcttaggagtacttgtgagggtcttgtactaagaaggaatagcaactcatacatccaaactcctgtgttatcctttttctctccacaactttagcagaatgaatagaataagatatgaacaaacaagctgccatacggagtgaggaacttgtattctcttacatatagctgagttttactcctgacactgggactgacatgtatgtgattccttgtaaatgcttattttattactttttgatgtcattattattgttattattattatataataagaaaggatagttttgccttttcttggagggtaagaacttgtcttagtatcttcagcatgaggcacagtagataccaccactgaaatgatacttattggagaacacctggccacagaattgggttcctgactaatgggtagtaaatagaccatacaattttcctaatatgttattacatattcaaatttttatgtgcatattatgatatttctatcctccttttgttcacacacacaaaaaaacagatctcacagagaaaaatatagaaccctcagaatgacagctgcgatgtgaagtcttactgtgcttccacaattctgggaaagagaagaattggagagggagggaagaacagctgccttcaagtagttgaagggctgtcatatgggaggaaggcttgctcatgccatggactccaagggcggaactaaggttgaagggtagaagttaaaaggtggtatggtcaagtttaagcaataaaaactgcccattactgcaatgtctcaaatgtggtgaggtctcctctactgaaatgttgattcactgtctctgatgaccatttatcaggaatattagagcagtaactacagctctgttttcttcttaacttgtaaaatggggataataatcccaatttatcgactcacaggagagggatttgatccaacgaaatctaaagagacccttttgctagtttttaggcagctgtaaagccctcgttgcagggttttcaaattttgctgcaaactagaattaccttgggagcttggaaaaccctgtgtgtctaggcctcacctgcagagactccgatttaagtggtatcaggcatgccagagaattagggttgtttcaaagctctccaagtgattctcgtgtacaacaatttcgagaaccattaaactagagtactaagagccattattctggattttactttggaatctaggttggactacagatgtgacgttgagcaactactttatcttggatctgtatttcttgtttaccaggaagaagaggacatgcatacttctaaagtaacttcctctagtattttattactttaaggcagttgacccttaaaggtatacgaattaaggaaagggcacttaactaccttctaggagtagaagaggatctctgctttgacacatgggaattgttggcactctttttctcagttttaatagcagtcatggactcctttcaatgcggggatgtttatacctctccggggaatgtatggcaccaacagcatttggatggctggttgtttcagcagtcctttgcttaaaataggcatgcaccctaatttgagaagaaactggcagaggataaaagtgggtttctttgctcttccccagtattctagaagctgcttcattatcagagttggagtcatctgatggataactggacatgtttcttggtgttttttttgtgtatggctatacttctttatactcttttgggttgctgtcttacatactgcttagtgacttgcttaccaataattttcctagcctaacccaggacaaccatgttgtcttttggtcttgacttttccatatgagactgcatgtcttattgtcactccagtcatgcagcaactaactctagacaggcagtcatggacataggattccatttttttttttttttttttttctgcaaggaaatccaaggactccagttattaggtcaaagatgttgctcgtattccaggtaattcatatttgctggtgaagttttatttgccatgcagtgcccacaaaagtaatcctagaaatgagcagtactgtgaggcatagcacaacacatccacattttatgtggaggatatgatccagtggcattttatttagtgtgaaacttctgtcttctaaaagggaagattcttttggaaggatggtctcctgctgtgtaatacttcatgaatttctagtttaaaaaaattagattttccaaagatccactactatgtacacatttcaaaataaatcacccagttaactcaaaacaatcttatcgtgagaaattttggaaagcttgagttacttctaagagttaaaaatgttctttcctcctcttctgcatgtcagactgcacatgattactctgatgtttccgtaaatgctattagtgcactatgaaagtgggaaagaacttaaaaaaaaaaaaatccgggagggcaacaaagcaataagaaggatcatagggcaccatgttaataacaaatcacaggaggtggctccataaaggttgtgaaaactagtttctcattgcaggaattgggttgggccaccccttcaccccccttctcaaacacaaatattatcatataataaaagcctgcttctctatgcttataacccagcctccattccttcgacgccaccattttaaagggatttactgcacggacttctcccaagttcctaggcattatcttctggaccctatcctgcagaggtgaagcgtccctttggggactctcgctgggtgagagggacaagaaacacccactaggacccaaccccggcagccagcggctcgagcatgcgctgagagtttgtgcagctggccctggctgccgccgctgcctcgtccggactcggagaggacttgggagggacagcggcgctgggaggtggcttagcagagactttccagcaactgctgcccaggacttttttttttttttttctttttcccaggaggcggcgacggcggcggcggggggagaggaagagaaagaagcgtctccagctgaagccaatgcagccctccggctctccgcgaagaagttccctgccccgatgagcccccgccgtgcgtccccgactatccccaggcgggcgtggggcaccgggcccagcgccgacggtaagtggccacgcgtctgtcgcctttcctgcccgctgtcccgccagcccgccggcggctgccctccgcgctgtgtgctaaactacttaagggctggctctggggctccctgccgccggcgcttcccctcgcgccctgccgggggcgcgcggacgcgatggctgggtcggtggccgcgctcgctttgtgctccgcgggcggctttgagcgaggggtcgcgggagcgtcccgggcgggggaagcggggtttgaatgactaacccggcgtctgcacagctgcatcggccctaattccccggcgccccccgccccccgcccactgtcccaggctaatccatcattctggggccgaaaacatcatttctcacgttctcccagagaaaccctagtagccgggcggaatctcaactccgcgctgccccctcgcccccgcccccgcccccgccccgccgccccagtcccttgcattcacacccgagctgcgggacggggtagaggggtgcggagttggagtgcccaggaactgtcctaactagaagggcgctcattctctcgggcttgccggtggcgcctctgacgtgtccggggtagggggcagtgtggtttctcaccttcaggacagtgccgagcacagctgtcctcgaggaggggcgtggagtgagggaggttttcaagagcgtctcatcagaatgcacagggctccgccgcgtgtcccctgagaacgcgagtttactgtgcgacttcattcatccggatagttgctcttttcttttcccagcaggtgttatctgaagccggtttggaacttttgggagtttagttaccattatgattttaacaaatgatttttgatgaggcgatgtctcga

SEQ ID NO: 11461 - DNA, 6000 bp, Homo sapiens
taatagcaatacagactctgagttatataaaatccaataaataaatgcatagaacaatttgcaactttatttacatttggtttctatagctttatggcccaaagtgagcttaataataaagtgattactgtataatagtaaaatatttggcatgaactgagaacttactctataccagtactttgtacgcattatcaagtattttaagtacttcgtatgcattattttatttattcttcacaacaaccctttgagtgtagtgtgcgtgtgtgtgtgtgtgtgtgtgtgtgtgagaactgggaactactcatttatttgtcaatttatgcttatcatctgcatatattttcacccattacctgtaaaatgtgtggtcccagaacagttcttcattactgactcagattctaactggagaggaaaaaaggcaaaagcagagtaaagggagagaagggatttaaatgtggtttccaagaggattattgcctcataagatataaatgttcaacacaaaatttcaaacaaatatttttattttatttttgtaagtgcatatttctatgtgagctgacagttttcccatagatgttgcaaaactgattcttccatttgtcctaaaaaagattcctctttctgttgtacaataattttagttataactataccacaaaagataatagactgtccactttcaagacacttaagggatattttgagaatttttctctaacaacacatgagcatatattatcattattgtttaatttgttctcctgtctatttcatatgcattctcccagtgggtaaattattagcttttatgtattcagaataatgcataacctaaagtgggaaaccaaaaaatgtctgttctatgaaaaaaatgatttcatctatgagttgaaagagttaacatttactttgaggccaaatgcacaaactaattctcattcagaaaacagcccacctatgatattcaggtcacatacttgtttccttaaatattattgccaaaaccacattttatattccattttattactgtgcatccatctttccttagcataagagatgttccattaaaaagcagtataaattcaatttgtttttatgctcaccttgaaaaaagtaaaaacgaatcattgaataagtttaagtgtattgtgtgcatttatgctgtgtgcccaatatagccttatgttgggcctcatttaatcaatgattccagagcatcaaccaacgttataattacttgaaaagttaatatgtaaggtagaaacttggcaaaacattagcgcaagcacaaaattaaaaactttaaaattatttgggtacaattaactaatgatcagatcttcttttcaggttccttttcttcaaaccatcccttaattagaggagaggcaaggaagtttcattggccctcttctcactctgaacacataatttctagaccttatcatccatatgtgtactttaagctcctcaaagacctgatgtttctccaaacctacctgtcttctagaagatcatattatatctattattaatcaagttacactattctgacaagcatcttctatgcttgaccctctttgtcagcacctcatacatattctattaattcctttgtccatctcatcagctttcctcctcctcttgtcctctctcttaagttcaaggcccattgtttctctctcagacgtccctagtaatctcctctttatagcttgtctctggtttcattgcccttatattgctccagatggactcttaagagttatggatcacagtatgtcttaccttacttaaaacccttctgtatttccccattttcttcaggatatgtttaaattccaaagcatggcacacagacccaatcctgaatttgcctctgcttattctctagtctcattttccacatcttcatattacatacattcttcacttcaggcatgccactttacttgtaattctccaaagtggcaaacaatttcacatctttgcattacttcctatctacagtgtcctcatcttgacagctctaaattattcttcaagatatatgtcaagcatcctggaagacttctcttactgtattagtctgtttccacactgctattaaagacagtacctaagacagggtaatttataaacaacagaggtttacttgactcagagttccgcatggctggggaggcctcaggaaacttacagtcatggcagaaagcaaaggagaaccagacaccttcttcagaaggcagcaagagagagagagagagagagatggggaaactgccacttttaaaccataaacgtctcgtgagaatgccctcactatcatagaacagcaggggggaactgccccccatgatttaatcacctcccaccaagtccctccctccacatgtggggattacaattagagatgagatttgggtggggatatagagtcaaaccatatcacttactatcttctgaatgaagtgtttcttctctgtattgccattatcttccaggttattggaacactcatcagattgcaatccaaatattgattattttaaataaatgtttttttcatttgtcattccttaactgataaacttcttacggcctatatcttgttttcctaaatatatccagtatagctttagcatatgttagtttcttaatcaatgtatgtttaatgatgcttaaacattctctttgttgtcttttagatatttctttaatttatgcctcttaagtcatcttcatcttcatggagaaaacactgtatattctgctctaaaaattattagatgttttcctgtgggatcctcaaggcttggagatctttgacttaataaccacctttaatgggaaaagaataagtgatcacatcaagtaatattgattaataaaaggaactgaaaaatatacctattgttggcaagaaaagggcagtaaagttgctatatttaaatcatacatttatgtccctagaaatttttattagtttagtaaacctcatacatttattatactgtcttattatcaaggcaaattgcagtagaaaatgacactatttggaactagaaaactgttttgagtccttattccattaggtgctagttctgtaccctaaggaaaggattcttcaactctcaggttccttatttgaacaatggaacctaaaataaatgagataatgtatgtaaagagcttagtgcagtatctggttcaaagggcaatcaataataatactacctgcctcagaaagctattactttgatgagggtattaaacaatttcacagatctttgcaaagtgctagataagcatcagctattatgacaagattgctatttgtttgccttgccaaaaataaaacattgcctttaaatacataggtgtttgagattttctatttcttggcagtttgtgatcatcccacagccatgctcttactgaagaccttttattactagggggcctgttatggattaggcagaaaaataggtaagactcctcaggagtaaatgcctccttgtcttttacccatctagagagaatgtcagtaagtgcagaagtctctcttgtgtacctaactatatgaaagtggcctgaaaaagctaaaactgctgtttgaccatggtggtagaggagctcagagctggtagttaatttgccctgtgttatttccactgaacttcatcacctccctgcccacctggtcgctgcacactccacctggtgttgaatgcattgttttgcctatttccccctctgtcaggacttaggacataagatacagaattactataagaaactcctaggtggttccagcactaggactgagaaatctgcgcagataaggcaggcttcagcgcagctacaagacgccgacttgaggccagaaccaccagcgactgagtgtcatgtgccttagtcaccgcgggctccgcaaaaggctaacagtgctggacaccgggagggcgctcaaatctttgttgaataaatgtccacactacacaacctgttttgagtcaactgcatcccaacccagaaaataatcgagatatgtttgagctgaatcagtatcattttgcacatataaaatctctcttgccttgagtctgcaggactagaacagtttaaaaagtaagcctcgttggttttcttttttttttcattactccgacttttataatttgggcttcagcatgagtatcaaaacggcagcagagcagagtgagacttttcaaagtcttgtcgcaaagatacttcgtggtgaagggctccagtcccgcttttccgcgctggggttcaatcctaggcagccgattcgggttggggagatgtctcggccgctccccctaacctcttgctagggaacagtccctccccgctccccattccacctccacctgctggagaaaagatcacaggtggtagggtgagggtagtcggagcagccccggtggacgcttacacgggccatcgcgctcggccgctccccgcctttgcaaactgtgtgctagggctccaggcgggcccgggcagcagcggcggcgcgcgcacgcgcactccgcggccccgcgcggctcttcaacattcaattccacgtgttgcttgttgtaggcgccacaggttccccacctgcgtccgggcgctcgggcggctccgcctctgccggcgggctctggggaaccgctgggtcggcgcgcccggggctggcggagcaattcctgaggcgcccaagctcacccccaacgctaactccgcctattcagtcccggcggctccccctctcccccctcccaatcctcctcccggctcctgcccgcccctttcgccctggtggtaggaaacactcctgaatctaactcgacgtgtccggaaagccctggccagttttcctttcgttctgcggccgctgcagccagccccgcggctccctcagacccgcgggcgcagccgccgggggtgaggcgcttggggaccgcgggccgagcggcggggatccccgagcaccatgctggacccgtcttccagcgaagaggagtcggacgaggggctggaagaggaaagccgcgatgtgctggtggcagccggcagctcgcagcgagctcctccagccccgactcgggaagggcggcgggacgcgccggggcgcgcgggcggcggcggcgcggccagatctgtgagcccgagcccctctgtgctcagcgaggggcgagacgagccccagcggcagctggacgatgagcaggagcggaggatccgcctgcagctctacgtcttcgtcgtgaggtgcatcgcgtaccccttcaacgccaagcagcccaccgacatggcccggaggcagcagaaggtgagttgcgggaccgggcgcctcctaccaccacttctccctgggtttttctcccgggagagctctgggacgcctcccgtccttctgcgaaacgcaggacaccgtatttttgttagtctctgagggcagaggaatctttggggacaagacggtgctttcacccgccgggtatgcggctgcagcggacacctcttctcctcctccccgcctgggctggcaggagctgtcagctcaccatccgtgagacagagaccgacagcgccggccgcgccgcggttgcacccggcaggcgcagctctggccggattagaatgcaactcccatcaactttaatttccaacagcactggtgcattcctgtccacctagcctggcgtgatattgctagagctgggtttgccgagggtctgaatgagtgttgtagctaggcgaaacaggtggagcccgagtacttctcttagctagagtgaagtcttcacttaagaggggtagaaattttcctcagtgaataaaaaagttaaattaatacgtttcctatattgtcatacaaccaggacatcaaatccaaacaccgagaaggcatgcagctttgtaaagtgtttgtgggtaagtaatttctggtctgggcaggcctgattaatg

SEQ ID NO: 11462 - DNA, 6000 bp, Homo sapiens
gtactcaaaagcagttgctgattagctagtctgagttccatggaagccttctgacttgacagggggagtggacacttggatcagctgggattctagggtatttctccatgatccatttctatggatttccgtttctaagagtcctagaatcacagcagtcactacccaagtgctgacttaataaatgccatatccaggggtcctgggttcacctctgaatatgctaaacattttcacaaggattacagtacagttgcctgtgtcaagacatgactgtgacacgaggtggctgtgcaggggagggtgacacaagcaggaagaggagtggaacaaacagtgttctagatatctgagagtagttttactcagcttcccttttctaatagtttgttaagtgtcctggaatgtcctttcgcttcccttctctacattcccagctccctgaattttcctctttcacctcccagagaacccaagattaaaatgagataaggctcagccaagataaaattattcctccccaacctgatggaggttgtggccagtggtgtcttggcttcagagctgacatattctggcaggtgctgttattgctagagggaggtcttcctgtttaggaatttgctttccttctcagttcatgagcattcaggtcttcaccttgtaggacacagttcaatcttcatctattcagttagtcatttacttcattacactggaagaataattattgaaactgtggttaataataaatgacgttaatttaagtttttagggacttgtatataaatctacagtctctagggtagattattctaccttagctaattattttatcctttatcttaggaaatgaaagtaaaaattgatatagttaattgacatcagcctggaaattttactatatacacaatctacatgcttttctttcatcaagaagactcaacatcttaaggaagggagaggtgagcagaaaaagaaataaaactctaaaaagtgctaatgtaaatgactacaggatgctactgaggaaaaaagatcatcttagttttaacagtatctaaaatgtttggggattcagctcacatatggcactcaaagagtatacccttcacagcgcagtgcttgtaagtcatgcaatttatgtaggtaaccagagtatacaattaagggtacactatgagtgagtttttgaattaagggctagtcacagcttaagaacaaatgaatgttgggagaaaatctggcttacattttttgaccaataatcccaacaatagcaattgaataaacctggcatgcactttgaactctaaaaaccctaagagtgaaaatagaaatacataattgaagcaaatgcactgtctttttgtatacaaatgcacctggctgtttttgccagcaaagtaaaagtgtatactgagtatatacactttttcatctaagtgtatatatgtatgagtacatttgcaatggggcaaatattttccattgaaaagccatatctcattgcaaacctatatattctattgacaaactgcttgagtaaaccatactatataaacaaggaagctaattggtttccatttatctatactcataggtaagtttagagaaagtattctttgagtatttacttgtacccaacactttactagggacataagtgatgcaaaggaagtagtctgtacttccttgtactcaaagaattaacaatcttacagaagatgtaagatttacatgcattattaaaatagtaaataacattggtctactcacaggccacagtgtgtcttacagatattatctatgattttcaaactttactgtgtattaaaaattacgcagggtgccaagaaaacatgaaggtttcaaagtcacatttagatccaaaagggcagggaatctgcatttttgttaagcatctgatattatttgaatacagttggctcaaggaccaccctgggtgtgtgcatggaaagtcaaggattggggatttgtgcaaggactgggattgttaggatggttttgagatgaatctacaaggtcaaacttcaactatggttagcatttaaaacagagatggaaaccatattcttggaagaaggaaaggcttgaagaacacaaatttgggagttaacattataaacataagcataagaaagagacaaccagaaggtaggcctgagagaagcatgtgagacaactggataaaaactagtttccactcccctcagttggttagacaactcaagcatcttgggcaatctaacttctttactaccaataagaaacccttcatttcctctgtgcttgaacctgagcttcacataatttatgaccatccagaagtctcaatggcaaacgccagaactacagtccctaaactaaccaaaccaggtatctccatacaaattctagacttgaagttagtgcttagtgccaaatgaatattcttgatggtagacctcaaacgtagtacaaggagcattgccttaggtgccagaaagaactggattcaaatgaattgttttgccatttagtacctgggatattttactttacctctttgaatcttagttttcaaatctataaaatataaataataataacaatacatacatataacttgtatcaagttttgaagattaaatgaggtactaaatgtaaactctctgggacataggatataactataacaatgaatgaatgaacaatatctgtgatttttttggtaaacatgttttttaattaagggctaggcgaagcttaagaacaaatgaatgaacatagtcatgaactgattcatgattatgtaatggtgtgattcagtttagataaaacataacacaattatgatgtagtaaggtttatgattttctgtacaaagaagaggtgaaatttgacaactgtgactaatttgtcctaggcatggagctagttaaagcgtgatgtgatttgaagggtaccttaagatatgtatccaaggggccccgaagtctcccttagagtttcattccccagtgactcttgcagagacattcagctcacatcagtcattcatgtttagtgcaaattattttattagatttttttctctctatgacagtgaagagaaaaccaccgaggaataagaggttggctgaaggtaaggagaaggtgaggctgttttgtaataatgaacacccacagcagattcagctagctagagcccaggccataagaatagggtcctggagccttcctctggtgagaaatgaggacctaaagagagaaaatagggcacagaaaggagggactaacaaatgtcaagtgcttttcccttagcctctgtctggttccagttgcctacacataggctctcatttcctttaaatgtcacacaaatgccttttcgttttttggtgtcatctcacaaagtaaaatcctctaagatgaaaaagtgaggctcaaatcatctcaccaggtagctgaaggaaatctgagagcaaaaatggtttcttcaaaaagtagtagtttaaaaaaaagcatgcaatgaactagagaactgtacagggtgttaatggaaaaaaataagtactacaactggtttgagtaaatcagttcataaattaattttaacactatatactattgttacctatttattatcacttaccattttattacaatatcatttgtaattatcctttcatctaagaaatttaagatataataagactttctggtttggaaactttttttctgtttactattctgattttcctgaataactgtccataatagatgtttaggaatttaaattttttacaggaaaaaaatgctttctcatttacattaatatggtgagtactggtgagagaattgtttctcttgatggaaagagaatgcagagttatattagtatgaagttagaaataagacctaaatgctaactatagattacataagagtaaggttatctatgtcaagagatattgactataaattctagtagggctgggaatgtgtttcatttatatctaaagacaagtagtagttgctaacttgaggtttactggatcatcaatttacaacacaacgtgaaaaaaaccagggtccttatccctgaagattttcaaaatacatcctccatatcactgttggaacagtctccaacttcccatgtgctcatgtgcacaaaccatacacacacacacatcacacaccacttgaatgtccctaatcactcatctttatgcagattccctgataattatgtagtctgtatcagcacaacagtatcaaatcaagccttcaaaggtcttaaaatagagggtttatataacacttcatggttattttggttttctatcaaaagagacaatagggtccaagaaatacacaaaactttgcttctaaccaacagggacatttgctataaattttgtagaagacccttgcaatacattgtccaagaagtccgttaaaaatccatctctaaacaaaaaagtttccctttcactgtcatacactgaaattccaactattagttgctatttcaatttacacactgaaaacatacttccttagaaagggccatggaggctgcctgtggagactcactcatggcaccatgacaatgtggtaactactccagttagggagtctggaagtcagaggacatcaaaagggttggaagtgcctcattgtgaacaaacaaccagcttcatggttttgccttctcctaggcttgtccagtctgtatttcagtgaatgtgatcaaagaaagcagggaaagaacagtttttccttgaaaacccagaggagcaaatggtctttgatttctcatgaaaagtcttgggcctatctcttcatgttaattgtgatagtaaaacaataaaaaatgagatttaattttaacttgtgttggtcggtctagggcagtgagtgaaggtgacaggctggaaaaatattaatccaagttggttatttaacatctgctttatttggaggacactattgaagccacctgctcaggacaatgaaattcttcagttacattctggtttatcgccgatttctcttcgtggttttcactgtgttggttttactacctctgcccatcgtcctccacaccaaggtgagtgaacctggagaacagactggtggatttcctgacttatttaattgtcctttattaaaactgtttgctgtttaactgcctggctcagagctgaatgaatgttgacccttcatacctaaagtcaggatggttgtacatgatgttttggccattttctccctttttaataattaacattggttgattcttagtatgattaaacataattaaatagaatattcaatcagaattgttctctgcctatcaactagatgagaggaagaacaaaagaagcacaacctttgagattttgcagttcaagttgtcattctccagggagcatgcatggctagtgcaatgccttcccctgagaataggcagcaaagcaattgctggggacagaggtggaagaacaagggaaatcctaggtccagcacagactaatttacttctcagctctgtggctttgtcacagaacttcctggaaatttagttcccttgtaggaaaagaagacattgaaagcttagagtaatttcccttggtcaatcagaaaatctaataaagcatttaccatgttctgataattccaggttttgtttcattgtggtgtacttgtaagcatttttgtttgctttttaagagtagtcagggcattaagtccagaacaataagctcaagcatgtttaatttcttggtaaaatgatttgaatcagcaaacatttaatgagcaccttctctgtgccaggcacaaacgtcacttggtagtaagaggacaggctttggagccagattctctgcttcaggtcccagatttaccacttacaaactgtgtcacctgggcatgctacttaatgtctctgtgcttctgttttctcatatgaaagatgtgtatagt

SEQ ID NO: 11463 - DNA, 6000 bp, Homo sapiens
aacagccttattgctgatatggagaaagttttagtgacctggatagaccaggccatccacaacattcccttaagccaaaacctaatccagagcaaggccctgactctcttcagcactatgaagcctaagagaggtaaaaaaagctgcagaagaaaactctgaagctgttagaaattggttcatgaggtttaaggaaagaagccattttcgtaacataaaagtgcaaggtgaagcagcaagtgctgatgtagaagctgcagcaagatccagaagatctagctaagatcactgatggagataaccacaggaaacaatagatttttaaaaatgtagatgaaacagccttctatgggaaaaagatgctatctaagactttcaaagctagagaggacaagtcaacacctggcttcaaagcttcaaaagacaggctaactctcttgttacaggcttatgcagctgttgaagcccatgctcacttaccatcctgaaaatcctaggaccctgaagaatgatgctaaatctagtctgcctgtgttctataaatggaacaacaaagtctgggctaagaaaaaagaagatttctttcaaaatattactgctcattgaaaatgtacctggtcactcaagagccctgaggatgaagatgtacaaagagattaacattgttttcacgcacaacatgctgcagtcatcattctgcagtccacgagtcaaggagtaatgtccactttcaagtcttatttaaaaaaatacattttataaggctatagttaccataaataccgattcctctgacagatctgggtaacataaattgaaaaccttcttgaaagaactgaccacactagatgctattaaaaagatttggtgattcatgggccaggtgcggtggccacgcttgtaatcctagcactttggaaggctgaggtgggtggatcatgaggtcaggagttcaagaccagcccggccaagacggtgaaaccccgtctctactaagaatacaaaaattagccgggtgcggtggcagatgcctgtaattccagctactcgggaggctgaggcaggagaattgcttgaactggggcagcagaggttgcagtgagccaagatcatgccactgcactccagcctgggcaatagagactctgtctcaaaaaaaaaattggtgattcatgcaaggaggtcaaaatatcaatattaacaggagtttagcaaaagttgattccaactcacatggatgactttgaggggttgaagatcagtggaaaaagccattgcaaatgtgaggaaaacagcaagagaaccagaattagaagtagagcttgaagatgtgactgaactgctgcaatctcatgataaaacttgatcagatgatgagttgcttcttgaatgaacaaagaaagtggtttcttgagatggaatctactcctggtgaagatactgtgaatattgtttaaatgacaacaaagtctttataatattttataaatttggttgataaagcagcagcagaattgagaggactgattccaattttgagagttcttctgtgagacaagtgttatcaaacagtgccttctgctactgacaaatcttttgtgaaaaatttctgcaaaaaggaagctgggattttgataggaattgtgatgaaacgctacatcaacttgagtattgccatctgaccaatattgacttcaaatcattaaataagaaatgtctatttatttagatctttagtatttccaacaatatttaatacttttcagtgtacaagtgttacacttattttgttagatttatttctttttgatgctatggtaaatagaattgttttcttaatttattttcagattattcattgctataatagactagagcatatttttgtatattgattgctatggactatgtcccccagatttcatatattacagctctaaacctcaataaaatggtatttggagatggaatctttgggagataattaggtttagatgaggtcatgatggtaacagtggccttataaaaagggacaccagagatcttgctctccaccctgacccaaccccaagcacacacgaaaagaggtaaatatgagcataccatgagagggtaaccagtataagccaaaagaaaaagcctcagaatgaaatctgtcttgctggctttggtcttaaacttatcagccttcagaactgtgagaaatacatttctgttgtttaagccacctcatccatagtattttgttatggcagcctgagctgaccctgatagatcacgtataatgtaactttgctgaagttatttgttttaattgtatgtatgtgtgtattccttaataatcctatataaaagattatgcaactgtgaatagagatagttttactttttcctgtctcttctggatgacttttattcattttattttcttgcctaattcccttagctaatatttccaatatattgttggatagaagtggtgagagtggaaaaatatttgtcttgtgaatgatcttagcagaaaagaattgcctttcactcttaagtatgatgttgtggggtttttctaagcatctttatcaggttgaaaaatttctcttcttttcccagcttgttgtgtgcttttatcatgaaagcatgttgaaatttgtccaatgctttttctgcatctattaaaattatcatatagtttttgtcctgtattcaatggtacattagattaattgatttggggatgttaaaccaactttgtatttttgaaataaatatcatttatttgtggtgtataatttttttttcatatgctactgaatttggtttgctagtacttttctgagtattttgtgtttattaataagggatattggcctgaagttttattttcttttttctttccttttttttttttttttttgtgagacggaatcttgctctgtcacccaggctagagtgcaatggcccaatcttggctcactgcaacctctgcctcctgagtttgagtgattctcctgtctcagcctccagagtagctgagattacaggcacacaccacaaggcctggctaatttttgtatttttagtagagagaaggttttgtcatgttggccaggctgtctcaaacccttgacctcaggtgatcctcctgcctcagcttcccaaagtgctgggattacaggcatgagccaccaggcccagccgaagttttcttttcttgttgatttctttgtctggttggaatcagagtccacacctggctgaagtttttgtttcttgttgatttctttgtctggttggaatcagagtaatacttgccttatagaattagttgttaattgtttcctcctcttctatattttggaatagtttcttaagtgttattctttaattgttcagtggaatttaccagcgaagccatctggacctgtgcttttccttctggataggtttttttttttttcttgctaattcaatttctttaattatgttagatctagtcagatttttctttatgccttcttgagttgatttaggtagtttgtgtttttctaggaatctggccattttatctactttatcttttttaagcatagttgttcatagtattccttcttattcctgtttatttcagcaaggctattagtgatggttcttttattcttgcttgtattaaatcttctctcttttttttcttagtttcactaaaggtttgccaattttgttgatccttttagggaaccaattcctggtttcattgattttctttattgatattctgtctccttcttttctaatctttaatatttcctttcttctgtttgcttttggtttagctttcattttttctagtctcatgcctctaatgaaaggcctcatctcttccaactcattctcttcaactgttgcctaagttgtttgtatatctgaaacataaatttgatggtgtcacttagaagcttaaaagtcttctcattgttcccattccttaaaaagtaaaattcaaattttgtataatggcaaacaacacctttcataatcttaaccagtttaccttaacaatcaaacccacctttccaatcacataaaatcacctggaatttatatatacatttttaacctcttttcctttgtacttgtgttttctcaatttgttcttttctcctactgactttttagaaagtcacccacgctttttagttatttccttttccctggtaccatcacactttgcatcaacttcttttagaacagttaccaaattatttattaatacacgccttcttcattattctttgaattccaggatgtgaaatcccattttagaaattatgtcccagtaactgacacatagtgagtggtcagtgtttgtggaggtaggaaaaagtggtatggtctgatatcatttcatctggaaataagatgatgtatttcagccagtgaaatcgaaaagagcgatggaaaatgacctcacactccatagggctttggttcgtaagacacagagaatactgatatccttgtgcgaagaactaacttgctgttgagagatcaattcagaggatgctcaagctccgttatcactttcattttactaaactgagaaaggaaggttgaggaatgcatcaacggttaagcacagtgcaggttcctacagcgactggagttttttggtagttgggagtgtttccctcaatctttgggcaagccgtcagcagtggcaggaacaggaacagacagctgggaaaccctttctttccccaatcgtcttctagcttagctttaggcttgtatgcccatcgcgcatgcgtcaatttttctcttttaagatgggcggggcagagtctttgctcctttggcgatcctgaaggggtggagctaagctgtttccagggtgacagagtggcgacctcggtggtcgattgagcaggtctgagaattgttcccaaagggttgtgcgtcaccgagtcgttggcgctgtcatggcgggtgtgctgaagaaggtgagacgaatggaggtcactgttggaatttagactgtgggggtagactcagtccgatagccctacttcccgcgggtgttgacccctactgtcgcgggctcggcggtgcttttcggggactcgttctgcatgccttaccgggtagggcaggttagtggttccgctccgagagtcaggaaaaaagctccaaacaagcgagactgagagaccagtagctggctttagaccagttttagccgggggattcgtggttttgtatttccttagcgtgctggatgtatggaaaccgtagtaaacagcatgaatcgtgttttgtttttgaacagaccactggccttgtgggattggctgtgtgcaatactcctcacgaggtatgtacctttgttctttcttcgttcttgaattcccaaggaagactaaattcctgtcactttgcttattgcagggttaacgggatacagatgtttcaagcccttaattacaagccgcgtgagctcttgagacacgggcgctgtccacctacttcgttgatccgatgtcacatttttatttatttttgccatgacctctttattaagccagttttcttgttgactttttccttgacattttcatggcttcacttgtgcttgcttctgtcagcgccatctcaaatttatatctccgttttccatcttttctccttgccttaccgtttctgcttaggtgcgttggattacatatatttaggcttactaaaggtactgcccccttttccttctgttaggtcttttccatctgtattcacgaatgttttcatcaaaaaaacccacaaaatttttttattcttcttgtcccttctataatcacaccatttctttgcttcactttacagataactcaaaagagttatctctattttctccaatttctttcttattcacccttgaatgcactcagtcacccttggcgtttttcaagttcaccaattatctccatgctgccaaatccaatggtcagctca

SEQ ID NO: 11464 - DNA, 6000 bp, Homo sapiens
tgaggcattatggacatctagtggctgctcaggataatgcctcagggatgcatatcaggttagggagtggtctagccttgggctttactaaggaacccaattatcctggctgggtgggagagtcctgggtcctctagatgaccatttctgtcattttctattggcgacccaaagtcactaggaagtgcagactggtgctattgaagactcttctttatcccaatccagcaaagtatagttgcactggcatacaagcccacattagacaggcatttggaaatatcttcaaggcccaggtttaaatgccaattagccatacattgttacttagaggaactgaggtcaaaaaggacagactctgatactaatcagtcatgtagctttaggtaagtcactgtgcctctctgagcttcatcagtgacatctgtaaagtgagaggttaaatccagataatctccaaggtccactttagtttaacattctgtgatctatgtgtctttttagtagctgggaaaacacagtccgatttgctctgctccagcactgtggatctctagattaaatgaagaaagcattctcacttaactttgtggcccatttccaagacttggctacaattccaaaggatcaaccttcacagagctacatatctgagatgggacaggaatcatggactaagagagcggtaagaaactttctaatccatttccttgattttataaatggaaaaactgatgtttagagctattttaagatttgtcacatgtctaaaggggactagaactcaggtatcccaatcttagcacagggctcattctataataccaggctgctgacacaggccttccccaatcactgctggcttttttagctctctctggcgttatcacagcagtctccctgtgtgaaactgcaagtgaaaacaatctgaatccactgtctcttcctcttagggtgtaagtagccttctttccttcttattctttggtggcaccattccaaatccaagaagcagtcagagccacgggctgtgaggagcaagatgccatagctagatggtacttgggttaccaaaatgagaggctgcaatcccactttcagctcagaagggctgtgtgcaacgacggccccacagcctcctctgtagtccagttagtaggttcagtggtgctttcctggcccagctggcttacagggggcaaagcagcctgatgtagagctcgacagagcttgggcatagtcaccttcatggatggcagtcacaaatacttactgagagacaacctcattactaagtactggtctgacccaactcggcccccactttcatctacctttatagtgcggggcagcagctttcatttgtggagcctggagctgaacagacagggtttgagtttgcctacagtagcagaggaccagcccaggcagagaccctgttgcctgaggagggaaggatagtcatacttaatcgctgccatccagaccctggccaggggtctcctcaggcaatagatgactctactaggtcggtgccagctataaaggagcagaacctctcaccagaaagtctgagtgcccagatggaactaaaccccagtatcagggtttgacttacctccatgtctccctcattctttttcttgatgagagttcattttctcagcccgtctcctacccttcatcttacttctctgacacatccttcactgaactttcctacagtctctctctcctcccccctccacttgcctccaccatttactctatgaagagtagacacagcgggcattcctgttagtgatgaaaacatcggactcagggtttgaaggctggatggaaaggctggctctgttactttctagtgtgtgaccttgggcaagttatttgcctgcctaagctaagtgccttcatctgtgaaatggagacaagtgtggcaattactttcactgggtaaatgaagattaaacaagaacagatataagttcttggtatggtggatagtacatagtagataagcatcccagtaaatgactattgaagtggatgaatgaaacctgagttctcatcccactaggagaatactttggggaatcacttccacacccaagtttcttgacatctgagacgtgctgaggctcaaatccactatcacttactagtgaccctaggcaacgtttgactcatataaaatgaataatagggttgcagtggaatacagagtaagggttcaataaacagaaactaacaaggttattatttgacagcaaatgataacagaaaggtcttggcaaagaatggggactccaacttgcctacaaaggaaccgtttccaggacttcaagtattccatggcgtatttaaagaggttcaggttactgggcaaaagacaatactcagaaataggtgtggtagaaaccagagagctgagaaatctgggacctcctcgttcttaagcaacagcccacgcgcaggtgatgagggtttatcaagcgagcctgccagaaatcacacggggagaggggtgggttgaggagtctggaggcagctcttgaagggaagggatattaaaccatgctatattctactggaccggcttcccagggctcagctagattgcctcacccacagtcggcagagaaaggggcagtcttttttcaggggggtgggaaaaagctgacctagtccccttctcctacactagtctgtcaaatgccttagggtctcctaccagaaataggagcaagaattccacccccactcccaatcgctacccctggctgctacgcagttcttctcagagtcctagccaaggaagggctggcgagctcacagggcagggggctcagccgcccgcctcccttcccccagttctctgggggcagcggggagcaaggggcgactccggccagcgaagactgagaagccgcggctgcagctccatgaatgaacgggctgtgtcgtgggctccgggagttcacctcaatccttcctgccggcctctgtgctgtcccaggttgccattccccagctcatcacacttggtcattcctgccactgtttcccgcccccgcaaccctcattaaggaaaccctcatttaaagccccagtgagagcacaggaggggtgaggcaaagcgaaggaggggctggcggcagtgcagcagcgaagcccgggctctcggtcctgggagcctcgtggccccggccgccgtcccccgagtccccaccacgcagttccgaactccgaacgcgagtccgcgccccgtcagcagtcagcgggggtgaggatgacgcgggccgggcgagaggcaggccaaatgcagcagccccgccgcgggccgccgggcccctgagccccgctcttcagagccagggggccccgggtgcgggccggagggcgggggccggcgcgggctctcccgccgcagccccgcgccgctccagcctatcagcggccacccaactgctccctccgaccggcccaaaatagctgcgaacgcctgcgacttgcgcgcggcccctcacttgacgctcactccggctcgctcgcccgctcgccctggccccgctccgctcgtctagagggggcggggaggaagcggcccggggaggggggaggggggagggggagagaggaagagaggaggaaggaaggaggaaagaggaagacgggcggccggaggcgcggggctgcgcggcgccggccggcgcggcgctggaaggcgccggcgttaaccccgcgaggcaggcgacggagggggagcggcgctaatacataagagcactgcatcacgctaatcttctcccagaacagtatgcgtcagcagtacattcacgttctgactgaaggacaaaaggatgagagagcagtctgcgtggctgccgcctgcaacaccgcgagcccggcgcgaggaggagacggtgggcgccgcgcgcaggggccccgctgctgctgctgccgccgctagccagcggggactatgttcctgggctccggagcgtttcccgcagccgcgacccccgctgctcacgccgctgcagcagtccgctggcggcgcggccactgagggcgccgggagccgaagccgcgaactcgctccctccgcacaaagccggagccggcggcgcgccgggggccgggcagcggcgggcggcgacgggcggttgcgcgccgccgggggctgcggccgccgccgccgccggacccgcgcccgcccccggactctctgaaggggcctgcggtgcgggcgcgaccgcgggcgccgcgcgctcctccggccggcggaccgggtccgagcgcagccgccacgccgctggtcctcgggggccggacggagcgccgccccgcgtgccggcagccggcggactggagaactgaccccccgtttttgtctcttccaccctccgagaagaggcgaggagaaagggggtgtgtgtctggggagggcgaaggcgccgcgaacacctcctcttaactctcgccgctccgcgagctcacgaccgcaatcagctgccgccggcccggagcggccgacgccgggagagggagcgcagcatccagcgagtgcggcctgggcggcttcggggcgcccccgcactccctccggcggcggcccgcagagcgggccggggccgccggagcgcactttggcgatgaagcgccttcccccgcggctggagcgagccggtgccagggtccaaggacaaagccgggaagcgctggtggcgccgctccttgggcggaggggggggcatgcacctgcatagcccgccgggccttggctctcccaggcgcgcctcaactccgcggcttcgccggctccggctccggatttactagaggccattttgtctcccccaccccttccctcccctcccctcccctcccctctgccctccccgcccccaccacttcccccttttgttaattaaaactaagaagtcggaatgggaacgaggtgcccagctcccgtggagaaagcttaaggacaccacgccagtgctttcctgccttccttccgaggtaggtgacggcgaactgggtggggacggttgcagtgtgggagagtcgtagctttcggagggcttgccttgagggtgggttgggagaccaggggccgctcgagtttggcaggatttttttcggccgatccgctccgtctctctaatcgccccctccccacctccttctccagatggaaagaggagctcctagctcacttaagccggggtagggctggttctcctttccgagccaaaatcccaggcgatggtgaattatgaacgtgccacaccatgaagctcttgtggcaggtaactgtgcaccaccacacctggaatgccatcctgctcccgttcgtctacctcacggcgcaagtgtggattctgtgtgcagccatcgctgctgccgcctcagccgggccccagaactgcccctccgtctgctcgtgcagtaaccagttcagcaaggtggtgtgcacgcgccggggcctctccgaggtcccgcagggtattccctcgaacacccggtacctcaacctcatggagaacaacatccagatgatccaggccgacaccttccgccacctccaccacctggaggtcctgcagttgggcaggaactccatccggcagattgaggtgggggccttcaacggcctggccagcctcaacaccctggagctgttcgacaactggctgacagtcatccctagcggggcctttgaatacctgtccaagctgcgggagctctggcttcgcaacaaccccatcgaaagcatcccctcttacgccttcaaccgggtgccctccctcatgcgcctggacttgggggagctcaagaagctggagtatatctctgagggagcttttgaggggctgttcaacctcaagtatctgaacttgggcatgtgcaacattaaagacatgcccaatctcacccccctggtggggctggaggagctggagatgtcagggaaccacttccctgagatcaggc

SEQ ID NO: 11465 - DNA, 6000 bp, Homo sapiens
cctggaagagacagagcttaggaggaatgtgatgaattccttcaaaatgtttaaggactctatggaagaaggactagatttgttccttctggactatagggtaaaagttacagggagatatctattggctgatcaaaggtgaaatctttttttttttaggtaaagaaagattgagcacttgatagtgagattatggaagggctaggagggacagacaaacagactggatgacttaagattctttctgaaagactttgattctatgacctttagtaatggtataattattacttcacaacatcccattccatggccttctcattaaggagaatggaatgtggatgaggcagccatctccaagaaaggaaggtaaagtcccatggatctatttcccaatttattgccaaatacttacttccccaaggacttcactggttgaatccttccccaaactgggtaactttctctgccattcacttccaagggccagtaggcaaatttaatcaattacttaggaaactgaacaggttttggacaagtaatctggcaatgaaaagagtgttttccctcccagggaacggcttcctctgattctggtttctgagttcccacttccccctctgacaggttttgttgcatgattgtaggggaattggaacttagtccaggaacttggtccaaacttaaaatcccaagggactcagcttactccctcactcttcttccctcgtttccctacaggaaagtcatcatcagcacaaacccactgagaacctctggctgccccgcatgcctcagaaaaaaaagttaagatctaagctgaaaccaatcttccctttgatactgtcggatgatcccacatccaagcgagaacaatggtttaggtgaaatcttgcttcttcttgtacttgctttctttcctatcttttccctattcacgtttctggttctttgccatacaatttaatgacatattctttggtcgtacaaagatagtaagacacgactttccctacatgaccctaacctcattgacacatgaatcaaagagaaacagtcatgcaaaactaaggttttgcactggcaatggtttcaagattgaggggaaatattccaaggtctgtgctttgaagaaacaggaaaaaaaaaaaagtaccctcaatacaagttaggcgctatatcacaggaaccatgtgctatgagaacacattagacaaaagaggttttatgtgaaactacttacaagagcagcctatgtgtagtttagagaggacagaagagattctggagttcctccaaaggtttacagtgttaagttcagaagcatcccttgtcacggaacaatattcctacttggcaccaatcaacaggctcctatcattgtcttgtcttctctgagaatgtagccaactttaaagtgaatggtggggctgggcgcggtgtctcatgcctgtaatcccagcacttcaggaggccaaggtgggcagatcacttgagctcaggagttcgagaccagcctggccaacatggtgaaaaccgtctctactaaaaatacaaaaattagccaggcgtggtggcaagtgcctgtaatcccagctacttgggaggctgaggcaggagaatcgcttgaacctgggaggcagaggttgcagtgaaccaagatcatgccactgcactccagcttgggtgacagaacaagacttgtgtctcaaaataaatacataaaataaaataaaataaaataaaataaaataaaataaaataaagtgaatagttccatgaatccccctgccctaggatctactaaacaaagaactttctttgttaaggttttccactgacaatgatttcaagagcgaagggaagtattcaaaagtctacgctttgaggacacagaagaaaatgtaccctcagctcacctttgctccagtccatgagagagatatgaggaaagatggtaagctcctctctttcaaagcaaaggcttactggactgagatttgggctggagatacaatccatgaggattatagatgtggcaaactggcttctctcgtggtagtcctggagactatttttccctatagcatggaagttaacaacaaatagaggctcaaaaggtgcaaagctctggaccctgtttaaatcctcaaatttcaagaaagctctagcagtgtttactaagctatatcacccagcactttaatagtttttgccatattgatgtattatttgctgttaatttacttagcattttttaaaaggatttttaaaaaatcttgtcctaattaatactatatcattgatatcatggttttgatgtacaaattatatgcttttctgaaacacttatatcaaatttataataatgaaattttaaaatgtttatctatgtaccacctagaaccacccagtggtatgcatattatactttgaagaaaaaactgctctaaaagggccaaaggataagtctgtgtgtcttagaggtacaaaagtctctgggattggggtagggaatggggtagaaggggcttggaataaggttgtatggcagagggtacaatgagaatcctcctcacatattatcatttatttaacagtatttcaagggttcctactaagtgtctgacacttaccaagcaccaacaatatcactttcaatatgtgaaagagatgaaacagatcataaaaggccttgacaggctgggcgtgtccgtaatcctagcagtttgggaggctggggcaggaggattgctggaggccaggggcttgacactagcctgggcaacatagtgagatcctgtctctacaaaaaataatttaaaaaaatttaacagggtgtggcggcatgcacctgtagtctgagctacttggggggcttgaggaaggaggattgcttgaacctaggagttcaaggttgcagttagctgtgattatgccattgcactccagcctgggtaacagagtgagaccctgtctgaaaaacaaacaaacaacaataacaagaaatcgaaaataccacaatgccttaaatattatttaaataaaggtttgggttttatccagtaggcagtttggacccaatgaagaatttcagggcactgagtacacatttgtgtattagatatatataattggtgggtcctcagacttcaccagctcatggttttaagataaggtccatttctcctactgggtttctctcctcaaacaattcctgagactccctaaggtatccttgcctgtcccacaaagccattgcagtgattgctcaacccgtctgccagccatcctcagtccaaatagtcctgataccgaaggcctggggtcatattataccatcccttaactggcttcttcaggcttctctgctcctgctatacctatctgccaccacatcccatcccatttccacctactgatgctcttaactccgtaaatactgcacagctaaaaacaacctgtggtattaaacaaaacttcatagatatacagaaaagctgaagaacagcagagaatgattgatcttgctttacaaggggctagtcttagggtcagccccaaatctgaactcaggtccttctacttctcagcaggtctccggggcattacccaccttgagaacctctgggcctattatctacactgtctctgcctaggttcccaatacccttgggccaaggaagaggaagaggatgtttccttccccaaagcctgtttattttcacccccagaataaatgagtgcagacttctatttccttcaaagaaaactccacctacaaagtatgacttgacctttacaagccatataaagcaaacatagtagttaatagtacatttagtcaagtcggagttaaatcttaaatgataccatatgtaggatatcaacagttcatcttaaatctgtatttcagggaaagaatttctctaggatgtagaatgtaatctaggttagaatttctctaattttgcaggggcacgatcctgttgagtatagacccaatttacatttctaaacaagttatgccagtgaagccaaaggcagacaaagtttcttagctacactcttagacaagagaacagaaagccagcatacactctgagaaaaagaggaacatgagttaggaatgaatgcacgttaatttagtgagtttcttaagtgtcaatatggtttcagatggaatcattgaaagaaataggcttgaacaaggaagactctaaactggcaatgaattttccactgggttttgatgaaatgaaggaatccaaaaattataaaataggttgggaatggtattacacggtccaaaatctaccctctaaagaccagcctctggtccctccaagtgcgtctcctttacatctcacattaagtatccttcgagtacttctgaaaagccacattcaccagggtgcctgtgctttgtcgtagcttccaagaagtcagcgagtgaaaggccaatttccaaagtgattcgggaaccactgacactcgcatcgctcttggaagacatgcccaccagaaccgcgcccggggagagcgccttccgcaacgggagggccccgcagtggattatcaaaaaggccacggtcatcgggtgaacacagacccctcagtcctcccgcctcgctctcttgagactgaggggtccgcagaagtcgccacccaaataaaaccacattcctgctgctgcgggcgtgggctcccgggtcgcaagccgggagggtcgagccgaagtctccggcgggccgcaagaggagaagggggcgtggctgcgtcccgggggccgagggcggccggggagggcgggccttggccccgagtgaaggcgcggcggcccaaccggcgtgagagcgcggggccggccttcctgcagcctcttccgctcgccggctgcggcgcctgggacggttgcggtgggtctgggcgctgggaagtcgtccaagatgattaaaaaattcgacaagaaggacgaggagtctggtacgcgcggggcttccgaggcccaccctcagccgcgggacgccccttcccccgcccgccgccacctgctttcaggccggcggggctgggggcgtgggcgccgccgtgccagggggccggagctggagccggcccctcccctcccctcgcggctgcccggggcctgcccgtagcccctcccccgggcgccggagcctcccttcgggccgcgcgctcccgccccggcgcccgcgcgcgccccgttcccgcccctcttgcggcgcagcccctccgagccgcctcctcccctgcgcgcgggcctccggcgggggccgagggcgtgcgcgcgtctccgcgtccaggggtgctggtagggtcggacccctagtgggagcaccctgttcccggggctggggtcgacggcacagggtgtgtgtggaggaacgttcaggtgcctggtaccttatcgttttcctggggtcaccggctctgtccaggtccccgggggcaagactgtcccgtgggacacagctcgttgaatgctcaggtgtccagaagtgacctgcgtcttgatgcccgtctttggtccagagcaaatggggaagatgccaagcatcctcaaaaagaaaaaaattctcagtgtttggtagcatctcccacagtgtgagagggggttgggttagtcaacctccatggcctcttgcacctttacgcctgcatgattctctgggaaacttcgtttctgcctctccttaagtgttagaaacacataaaatactgcttacctaaggaaatcaaaagcaccctactacaatctcattaatcttcgttgttgtggaaatgacacatttttaacattcatggaaaaagagggcagggaaagaagacactcattttggagagggttgctgcgaaagagaagtctcagctcttcgagtatggcagtgacagagccgggatcaaaatgatttcattcagttcgtatgcgtattagccatgattatcactgtgccatccaagtgttcacttcccaag

SEQ ID NO: 11466 - DNA, 6000 bp, Homo sapiens
cagatcatgaggtcaggagttcaagaccagcctggcctacatggcgaaaccccatctctgctaaaaatacaaaaaaaaattagccaggcttggtggcatgcgccggtgatcccagctactcgggaggctgagacaggagaattgcttgaacctgggaggtggaggttgcagtgagccgagatcgcgccactgcactccagcctggttgacaaagcaaggctctgtctcagaaaaaaaaacaaaaaaaaaaaagaaaagctggtcttgcccgttcaagctaaaaccctgtagtgactcttcattgtctaagcgtctcacctttacccaccttccaatcctcatctcccatcatcctgacaaatcctatgctctgctgagggcgaaatacctgtagatcttgttccatctgcccaaaaagccttccctttcactcttcccttggtgaagtccttcaactcctccaaaacccagttccctcctctggagccttccttgacctccccgggtggggctgagccatcctgctctccgcttcccacatgcccacccgtgccatgtgttacagcccctactacatgttagtcatgtttgtgtacagggttgcattctcagcacagtgcaccgaacctagcacactctgcctattagggtagatattattgaataataatacataaaggcatgactttggggtgagctgcccaacttgagtcccagctgatattcatagaaccgcaccacttggcagtcaggggtaacccaaccttggagagaaaatccaaccacttcttcatctatgcagcatttgaatgtcatgcacctgtttggggtcagacaccaccatactgggcactggattccaagatgaattaaacactgcttcgacccacaaggaactcagaggtcagtgattagaaagcccaggtaagagcatccctggctccttatgtgtaggagctgtggctccaggatggatacatgtgtgcactcatcttttcttgggggatgtggtagcggacgctttgtctcacccctagatgttgtgactggggatcagtattacttagaatgagggtcaagaggacttactgagtctgcacataaggatgcacttaggtaaacaacatcaccaaattgcacctggggcagagaattatggcccctaacattgacagccaggggccatggaaaaatgtgtaaccttgtgccatgggttcctgcgtaatatcttccaggtgacattcatatttgcattcaagatctgtatctatagatctgtatctgtatctatatgtatgatgttgtaactgagggaaaggcccaaactgggcttgctctgttgataacaaaatgtcacgttgctccagcataagcaatagaaaatagttggaactctaacaacaaccccaaaacaatgaattctcccttggaactaaaaagactaagagacttgatgggaatccgaatgccagaactctctcagaagccagacgtacaatggcttggaagatgtggggctaaaagtccgcctcaacatacctttctgtaaatggtcaaatttaaagccctccaatcagattctgccaagccaacattcctaaatcttttcattgccttctgatcccataaatttaccccaggcctcaaactggggagacattttttcttttttttttttttgagatggagtcttgctctgttgcccaggctgcagtgcagtggtgcaatctcagctcactgcagcctacacctcccaggttcaagcaattctcctgcctcagcctcctgagtagctaggattacagacgcatgccaccaagcctggctaatttttgtatttttagtagagatggggtttcaccatgttggccaggctggtctcaaactcctgacttcaggtgatctgcccacctcagcctcccaaagttgtgggattacaggcatgagtcaccgtgcctggctggggagacagatttgaattcactcctgtctctttgctgaccagttttgcaaataaagccgctgctttttccaaagctagtgcttcatagtattggcttctgtgcccatggggcagcaaaaccatttgcttgataaaaatgcggtggctctcgccagtaatcccagcactttgggaggccgaggcgggcagatcacctgaggtcgggagttcgagaccagcctgaccaacatggagaaaccccgtctctactaaaaatacaaaattagccgggtgtggtggcagatgcctgtaatcctagctacttaggaggctgaggcaggagaattgcttgaacctgggaggcggaggcagcctgggcaacaggagcaagactctgtctcaaaaaaaaaaaaaaaaaaaaaaaagtgatgtgctgttcttggtggtctgagtaagtaaaggatgaataagaaagacgccatgttaaagaagctgaatgtctgctaggagagctaacgcatgtatacaaataaccaaaatgcaacaaatcccagaaggaatgatcctgcagaaacttcctgatgaaaagcttcaaaaacagcacccataaagtgctttgggtttcaaatataagctcaggtgttctgggctggcgagcttgctagttagagcacaatgctaaatggggccaaaggcacaggccagttacctgggggtagctcatctcagtggccaccagtgacctcaaaacccagccagcctcattccagaaagccacgttgtgcataagttgaggggggctgttggatactggggagagtccagcacaattgtaacttttctatgtcttctctaagcccagatgtctgctctcattttaattttgcatgatcttgtaatggcaccaatcccaaatcatgtgaatttaaaatgccctaagcttcaaaatatacgctctctctttataaagttaacatgattgcttctgagtttttagataaattgaatgattgagtgcaaaaacactgtttaaatcagagtgcgatacacattttttaaaatcccagtgtaaaaaaaaatatatatatatattgcttggtttcagaagagaaacaagccttttgttgacatgatatcaggggaacagtactaaaaaaacatcaaagatagtcacacacacaaatatcccagagtattcatagggaacaccctctgtctttcccatatgcggtgtggaaaacggggccagaacgatcctgcagaaacttcctgatgaaaacaaccccgtcagcccttcccaagcttgaggccggctgccacggaaccccagccagggctccagcgcttccttcgcggctccagggacgcagtgccctgcaggcatcgcctgcttgcagccgacttgaggggctcacggagtcccctgtgcccgggacgcggctagatcctggagaaaacccctccacccagccccatctggcagatagactccagattagcaaccccggagtcacgtgagccaaatttacgccgtacccgggttccaaggttaatcacccctcgccccctccgcttcccggctccgccgatgtgcctcctcttcaggcgggcctggggtctgcgtctcccaggcagctttgggggtggaaaaaaggaggggagcgggggaggggaaaggaacttctttgttctttcaccggataaactcagtttacggaattctccaacacccactcccacccccagtgtgcaaatatctctgatcctcacttggagggcgaactacttcattcattgagacttttgtgttcctggccctaggctaagtattatcttgtaagatcacatttaagtttcccaacaaccccctgaggtaggtgttattatccctattttacagataaaaagaaatgaggtactgagaatagcttgcctagggttttacaattaatagattggcacagttaggttttgagccccagcctgttttgacccaaaagccctaatctttatagctgttctttatatagcaggaataagagtaataaccactccttgcagagcaattactatattccaggcacggtgcacggtatttctccaaacttctctcagaggcaggtttgccacttacccgttatgtggcctcaggaagtttcttaacctctttttgactcaattgccctgtctgcaaaatgaggctaaaaatatggttgtcatgaagagtaaaagaattaatatatgtaaagcctggcacacattcatccctgaaattgttgttgctgttgttttttaaccatcatctccatttcacaggtaaggaacctacccttggagaggtgaaggagtgaattagtccagcttgcccgctgcacacctagctgcagagagaccccgctcagaagccgtgcgggatgggggccccacaggcaggtgaattgcacttggcaggtgggagatgagcttctccggggtcgctgcagaacgcgcagcagcccgggaggccgtgaatggttatcagttaccacgcaaggctgggggtccgcccgctccggatttgctcgtagtgcgagggccccggcggtgtgctgggggatcccgccgggcccacttagaagcactcggggggacacacctgttcgggacacctgtggacggggcccggctgcaccgcaggagccccccgccctggcccccgcgcacacacagccccccaaggcgcggaggccgccggccctcccgcccgtcgcgctccagggcggagtttcctcctctgctcattgttcacggcccagcgcccgcccagccccggccccggccccgcccggcccggccgccgccgctggcgggctcctgggggagggggaggggcgggggcgggggcgggggccggcgctgacgggacgggccaggagtagccgcagccgccagtggggccgcagccgcgcagacgccgcccaggacgcagccgccgccgccgccgctcctctgccactggctctgcgccccagcccggctctgctgcagcggcagggaggaagagccgccgcagcgcgactcgggagccccgggccacagcctggcctccggagccacccacaggcctccccgggcggcgcccacgctcctaccgcccggacgcgcggatcctccgccggcaccgcagccacctgctcccggcccagaggcgacgacacgatgcgctgcgcgctggcgctctcggcgctgctgctactgttgtcaacgccgccgctgctgccgtcgtcgccgtcgccgtcgccgtcgccctcccagaatggtgagtggccggcctgggttccgccgggactcccaccgtgcccatgtgccccctgcccggccgagctgcagggaagcccggcgcgccgcgtggtccgaccccgagcagccctatcaccgccggggtcacacacggagccctgaccttgcaccatccacgccccctccaaactccgcagcgcggcaggtgcagggcctgggcgtagattcgtctccactctccactcgggaggagtgggcggtggattctgcccgggcaaacaggggcgcgccggtgctaagtgggtttgcatgggaaagaaaagggagaccgcaccgcgaggctccacgcttctgcgggactctcgggatctgattacacctttccttcgtgttggagggaatgaggggctgtagtgtgtattcgttaattccaggcaaagaggcaggcgagaggctcccgaggaagtccctgaagcaggtgacaagcctccagccacggcccacgcgggcgatgtacttacccgtttgcagaggttttttctaagtaatgtgtgcaggctcaactccttgagcccgtgctggggcaggtacagagtcgtaagtggaccttccacagtcccagagtcacctggctgagtgggggtcctacctccgtgtccctaaaacaatcgcttcttagtgcgtggctacgatggtgagacccccctcgaatcctcttgttcaaacgggaacttgttcaaacgggaacttctctctcgtagaataggattgggctgcat

SEQ ID NO: 11467 - DNA, 6000 bp, Homo sapiens
aaagaaatatactgcatgattccatttatgtaaagtgcaaaagcagaccaaacttatctttggtgctagaaagtcagaatagtgcttgcccttggagggggttagtgattggaatggggcacaggagctgctggaatgctggtactcatttatttcctaacctgagtattggttatacaccactgttcatgcaaattcactgagcagtacatttttgatgtttacattgttaaaattagtcaagctgaaaaatatcatgtattcatgaggtgtgaattatttgactacttcaagctgattcattcagtcattgaatagaaggtatatgcacatattatgtaccagtcaccatgtaagatgctgaggatctagagataaattagttatttgtggattctgttcatcaaaggcttagtctagagggggagaccaacatgaaaacagataactacagtgcaacatgattaatggattagtgggggtatggaggagtgctggaggtatagagaagggagccatgaatggttcattgaaaagcagccaggagcagtagctcatccctgtaatccctgcaatccctgcattttgggaggctgaggcaggtggatcacctgaggtcaggagttcgaaaccagcctggccaacatggtgaaaccccgtatctactaaaaatacagaatatatatatattctgtatatatatatatatatatatatatatatatatatatatatatatgccaggtgtggtggtgagcacctgtaatcccagctactcaggaggccaaggcaggagaatcgcttgaactcgggaggcagaggttgcagtgagccgagatcgtgccattgcactccagcctgggcaacaagggcaaaactccccctccaaaaaaaaaaaaaaaaaggaaagaaaagctacacacagaaaagtgacatcttagcacagcaccttcctcctgcacaatatagaggtatccactgactctactgtcctctctggccaccgtaaaaagatgaacaggagttggctaaagagaaaaggatattccaagcagacagaacagcgtatgcacagataagaattttgaaagttactgtaaactcagggaagagagtgagtttatgtgggtggagcccaggtaaccctagggagagtgacacaaggtaaaaccaaagaggtaaactaaggcttgattgtgatgtttatatgccttctactaagcgtggcttttacacaaggaatcaagaacattgtatatagctagacttcaaagacgtccctcccacacagacacaactgatgattttgttagttttctcccacagtgaatcaggcttggtcctatggaatcaatagaatgtggtacaagtggcactgtgtgacttcagaagccacgacggcttctgacttaatatcttggaatgcttgttccaggggaaacaagttaccatttaagaattccaactatcctgaatccaccatgttgtgagcaagcacagcctaagagacaccatgtcaagagacttgctcctgccatctcggggatcaaccctttcaagccttcagggaactccaaccccagcctacatctgactgcaactgcatgagaaccccaagaggacagagcagctgtgtgctgggcacagtcagcacacagaacctgagtgagaaatacagtgtgtgggtttttttatttgtttgttttgctttgaatcactacagtttggggtggtttgttatgtcgtactacacaattagaaaagacatcttagaatagcaatgggacatgaagattttgggtttgtttttggaatcagcctggaggcagcagggaggatgggttaaagaacacagaggctgaaggcaccaagatgttaggaggcctttacgggagaagaagtggatgtcaatgggaatggacaagaaaggctggaatctagagatacttgtgaggtggaaccgatgggatataaagagcaaataaatgtgcagtggaaaaaagaggaagaccgaaaactttcaggtttttcccaaagagaagaagtagagtacaatgttcttaatagaaataaaggcctattagggagggtaggtaatgaaatgtgtatgccctaatggtgaggggtttacagggaaacattagtgaacattccaaagacactggaaattttgattaaggacacaagggagatgggggctgtacatagacacacacgcaggatcactattccatatggcagtggtggaagttccagaggtgaaatcgccaagagaacatgtgcagggcaatgagaggagggaataaatgatggaactctgaaaggagaacccagtggtcagaggaggagagcccattaaggaaactggaaagcgtaagtcagagaagtcaaaagagaaacaggagactcatgtcttataaacagagggacaagagaatgtcaagaaatattgggttttcattgtaaaaagccactgccagatcaagtaaggtgagactgtgttatatggttttcacaattaagaagtcatcacggctctcaacaggactgcttttaataccctggcattgatcagagtagtttaagaagctgattggagatttaacaagtagagactacgaatgtagattactctttaaagagagttgatggtaaaatgagggaggaagaaagataagttagtttctttgagcatgattttggtctgagaacaggtttgctagcaagagttctctgagcaaatgagaggggaggatagagaggtcttcagagttaatgattttacaggcttctgctctccaagtgcagtcaacaggtcagtagcaccagcatcacctgggagctacttagaaatgcagaatctcaggccatgctgcaggcctagtgaatcagaatctgcattttaacaagatccccaagtgattaacatgcacattaaattaatactcactgcagtaggtgaagacagaaatgtggaggaaggaagaaagatacagaactcttgcaaatattacagtactcaggccatttttttcttgtgcaatcacttagacatgcttgggtttttatctgagatgtaatgagaaatgtttagaacatcctttaagggcttccaaattagtggcatatatggaaaatgaaggtctgtgtgaagagaaatcacctctaatgaaatccagatgaaaatccagaccagcttcctgttggcaggattattgatagtggaggtggagatattatcattgcttcagcctcactcccagatagtccactttacttggtctgaggtagaactggtactattatatacctgtatatataccagttatatatatatatatatgtgtgtgtgtatatatgtgtatatgaatataactggtatatatacgtgtatatatgtatatataattcattgtttaatgtgccagcactgtgcaaactcaagacgggtgctcattaaatactgaatttcacaggtagtaggctttctatttatgttagttcttcttcctactcacctttttaaggcagcagttctcaaattctagaatgcattagaattagaacgtggagtgcttgttaaaaatacaagtttctagaacccatacacaaggattttgacttggtaggtctaaagcgagacccaataatctgcactcgataacgagtacttcagatgattccaatgtgatctcccagtcacggactgggaaaaaagcattccaaactattttgtagatctcgagaaagacttcagaatgttcgtgtctcacaggaaatagcaaaaacaatatagcattccaaaatcctacctagctttgtaccgtgtactttgctattgctgttggattcaattacaacggaaatatttgatgtggtaaaatactgagcagtgatgctaaccttttatagtagacactgggaagcagaaaggaagtgtaaacacgtttcccttaaaaactagtcttgctgggtggataaagtgtgcatacctattttacaaataaagaatagtgccgcactagcttatgtacgtaatatgtgcttaacaaacatttgttcattgagtaagtaagagtcaagtcgaatggctcagattgtaagtgctatgagaattccactgtaagaagagggaagtatgccttcttttcaccattaaagatctgattgctgatattggcatttttgccagtagaagagcctggacgttggcagttttcaaagcccccaggtgatttgactgcgcagctaagtttgagaaccacggaggtaaaggaagggagtaccttaaagagctaggattagggataatatcaatagatcacctttaaggctgcacctcagcctaattaaatcagaatcgctgggggtgggacttggctatcagtcatctttaaagctctccaagtgattccaatgtacagacgtggttgagagccattgctttacttgaattctcagtggttcttaatcctggcagcataatagagtcaccaaagatacatatatatatatcagttcaggaagcagagttgtttcagatgctagaacacctccaacgagcagtcacagctctgtagttctagtgccgccgctgccagcaagtttgttgtgaccctggcggccgagttactttcagcgctctgggcggtctcgcaagaaacactgacgctttgggacttcatttcccagcaagacccgcggccgcctatcgcgcgagtcatgccgggcacctcgtccccctgtcctctctggcggagctgcctggcggaagcgggaacgtcgcatcctgaggtaaaggtgcacggcatcctgggacatgtagtctggccggggctcggacgccccctcggatgaatgggaccgaagctgactgcgaactacagcttcttggcagcgtcggtgttggccgcgggagaaggggagaccgcggcggcccccagtgagagcggctttccaggacggtgcgatgtgctgcgcagcgaagaggcaggaggccggcttcctggggtagcggtacaggcgggcgcttactctgtgcgcttgcttccccaaccctgcaccggccatgcgcccggccttggcggtgggcctggtgttcgcaggctgctgcagtaacgtgatcttcctagagctcctggcccggtgagtgacccgctcgggccgcacccggtctcccggggcggggcggaggaagccagaggagaggtccccccgggacgcgcccacgccctgtccccaccccgccgcccacggagcccggggcaggacggcctgagccccccagcaatccgtcctgtctgggcagcctgggaccccgctgagtccgctgcttcccaaaactgcgcaccggcggcagtcccgcctaacagtttcaaagcattcctgcgaggggaagactcagggtgttgctgtcgtcaccccttttccacactcggggggtattgaagtctgaagagtttttcacatgaccagtccaaggtcggcagagagctagtgtcagaaccaaggttccttcaccaaaccactctctcttccttcccatccaactctagctcttttttcgatcctgttaaatggcacaggctggacttgagcaaaggtttttgacttgtaaagcagtctgactttgtacatactgcaaagaaagttttatttttattacggcatcctgcaaagcatttgctttattggccttggaaatggttatgagtactttgcccaaacatacataaatgatgcggtagaacagatttttatgtagaagatcagtccacgtgacccgagagtgctctttgaggtggcttgcaaaaagacaaaaaaaaaagcaagtagaagattggtccaagtgacctgagagggctctttgaggtcactttgaatgtgcaaagttcagtggatagaagctataacagaagagacaacaggtggtgtggaaaagcctccaggactaaaaagctgggttgtgaatttcactcttggctccgtcgtccactggct

SEQ ID NO: 11468 - DNA, 6000 bp, Homo sapiens
atttgccaaggatatacttcttgacttttccaaaagttgccaagaataatccattagaaaatcagtaattttatgacctttatgtctgaactcttcttttctgaaagctggcataacacagaagagaaacaggaaggggcccacagcccagtccagccattccttgtctttgaatagaaaaaccaagctaatgcacaaagagtctcccaacgaacaaggtggcatgtaggcccgtgcctgtctgtcttcatgcaaaaataatttagcatcatcagacaactaaatgctccaaataaaaatgattttcagatgacagaattctaccctttcaaatgccaaaactttccttttatagatattgactcgatatctttttaaactatatatacaaatcaccttaagcttttgtttagtgtaagatcatcattcaaacattcttgtgtgtgtgtgtgtgtgtgtgtgtgtgtgtgtgtgtgtgtgtgtgtgtgtgatggagtctcgctctgccatcctggctggagtgcagtggcactatctcggctcgctgcagtgtctgcctcccgggttcaagcgattctcctgcttcagcctcccgagtagctgggactataggcgcgcaccaccacacctggctaatttttgtatttttagtagagacagtttttcgccatgttggccaggctggtctcaaacttctggcctcaagtgatccacccgcctcaggctcccaaagtgttgggattataggcgagagccattgcgcccgaccatgtcatcatttaaacattctaatgaaggagttggataagataatctctaagacttctacctatgaagttcctacaatcctttaactgtgagatgccacaaggagagcacctggatctaagaagtcagctcaactgtttgtaccaaccctgagaggtcccagactgctcattctgtgttcagttctgagtttccctgctgcctccctcactgtcaggctattagagcatatttttctttgttaccaatgtaacttgcccttcacagtctgttctttcttagctggccattgcctacaaactacgatagccaggtttgttataattctatgttaaataagagttaatagatgaagtcctctgctaggggtcgagcgtctgggtcctaataaggattcctcattagctcagagatctttctgtcttctcctaagtttacagctgagctcagcaagcaaaagctgcaacaagtctgatctttgaatgagtgaggatttattgggctaaatttgattctgaaatgggtatttaacagttgtcatttgataatgatgaggtctggactccttcaaaatctttgagcaaataagctttgcatagcagtgctagccgcatgatctttttggagaaatactaggacactggaagaaggtattcatcatcagagaaaaacacagctttgcatcctgatattctcaggctcagaagattagtaagtctcagtttctctttctcattccctgaccattctgctcttttacctcctccaaatgcagattctgatatatgctttttttgttcaatctttctttttctaaatgtacatattctctctgacatggtcactctgcttgtctctgtctttctttcttttattttagttggtatctctgctgctgtatatttgggcccaattccaaatatctctgtatctgttttttgatgcatctccaagactcttctgcttgacttttgctctatctctgctgacccacactctaacactcactgtctgtcagtcttctctgggtatcattgtctaagtaaaacacaagtcagtgtacagacagcgttgggatcggccagaggcagataaacatggtagcctatcttcacagtttgtacttttcctagatgtcagatggggagtggattagcaatggcctcagtccctagacactgtgcaataccctgatagtcagtcttgtatcccgccccgaggctccactcccttgacaatggatctgaaagctttcttgtactcagaatcatcagatggaaaggcccacccttgtagtccctgaccaccatgttatgtagatggctgctcccagtagtaagaaatccatgaatgggaagatggttcccaggaacattcacccagcaacaaaaaaattaaacacaaattggggcttgaatttttgtggcaatcaatgactgaaaaaaaaatagaaaaaagaaggacatgacctttttaaagacaaatgaagactcattttcagtaactagagtcttaaaaactattttaatctgaatgcagatcattgtttacccacagagagttttatgacaatgatttcactgacatgcagaatcaaatattatgatcaccaccagcagccaaaaaaccctattctttgcccaaggagtagtagaaatgtagactagacagacaaacagggtctcctattttgcctcattagtgccacactctatacaactacagtcacgaaggggtcacatttggttataattactattagaataatatgggagtgtgatgtttgtggtggaaacttgcccatgacttatgtaaccatttctgctgacaaattttaggatctaaaaactttgtgggtttttttgttttgtttttgtttgtttgtttttgggacagtctcgctctgtcacccaggctggagtgcagtggcacctccgcctacagtgttcaaacgattctcccacctcagcctcccaagtagctgggaccacaggcacacgtcaccatgccctgctaatttttttgtatttttagcagagatggggtttcaccatgttggccaggctggtctcaaactcctgacctcaagtggtccacctgcctcagcctcccaaaatgctaggattacaggcgtgagccaccgtgcctggcccaggatctaaaaactttctaagtttcctccatcgttggcatcctcacagctatctccaatgtcactcaagagacatcaacagacatttaactgctgcagacttcattgctctgtcacctcaccttgaatctaacaaatcaaagtatttctgcaggtccaatggtctaaaatcaaatgcttgttaaatgactttttacaacaccccttactttcctaatccatttcaatcttattttttttattgtggtaaaaaacacatcaggtaaaatgtaccatcttaaccatttttaagcatatggtacagcagtgttaactccatgcatgttgtgaaacagacccccggaactttctcatcttgtaattctgaagttctatacccaccgaacaactcctcttttccccttccccctgcctgccccagctcttggcaccattattctgctttctgtttttgagagtctgactacttaagatacctcatacaagcgggatctggcttacatttcttgagcattgtattctggaaaagtgtttccttcctctgaaaaatgggtagagttctgaaggagaactactggtcttattgtacacttgctgtacctatttttatttaacaaatattcatctatggtataataaagatgtcatgattgagttgctcactggaatctttgttatctcagagtatctcaccgaggaatttggaatggttcatgggtttaacagtggatgttgacttccacagctgcttataattattcgctgtctttaatgtttgcgaccaaaacatcacacacgtggtattgttcattctgagtttcaaaatcataaccaaaaaaaaatgaggccagaatgtagtaaatacagtagccagtctttaacatgcatttaaagagttgagtcatcctagcccatcctacgatggcaagataatttcaaaggggacctcagctgtccacagttgcacctgccttaaaagtcaagaagaatttgttttttgggtcacttccctggtcactttagcctggggatcatttccaagtagtatagttgcagatcttcgaacgccattcctgtgttctgtgaattcaagacaacatgggttttataaccctttgactctgctcagcatctcccagatcaaggtaaggtaatgttgccaagaaccactacttacagaatgtttgggcttttgcttttgcttttcttccttgccccaaatccacatgtccgttctgagaaaagaagctaacaacttcttccaatctgtaaacaggagaaattccagagttcaactgcagctaagaccttgtccctgaacttgtcaacttcttccctgccctcccacctcctcctttcgtaccagccaaagaaggtcttcggtttcctttttggagagccccagagagaagcatttgagcacctactttagccagagagaccactgacatctgggcatgagactggcatctagactttgccagggaggcagctatacttcccaaaagatctggggtctttctcacgagctcataccctctgctggcctagaccctttatattcccccctcggtgctgaggcaaacgatctttgccagcagggaggtctgaaaggcttaactttgtacactctgaggcaaattctccagaagtaatgttgcattttctccctgccaccaggcacattcccttcccaaggtctagatcagcaggtggccctcccagcgaaagctctgtgtcctatgatccgaaacaataaagctgtgcttgggtacgtgagattatgtttacgatgatggtcatcactccagccctaggaagtttgagaaactgaaaaataagcttagcaggctgcctaggttctgcggaatcagcaggcccccgctgtgaccaatcaagagcggccgcggggagagaaattgactcattcttttcaatttgctgattggctttgagaagtgggcggagctactgtctctgtcccggcttcccattggtggatgaaagttaaaggtgggcctccagcaagttttgtcctttgataaaaaggaatgtcttggggacttttcttttctgctttgcaggcccaggctcaaggcaaattataagtagggaaccaatttgagggaaagacatgtgaacagagttaaggtaccacgtcctgggagcgaccagcagccccacctgaagtccgcatgcaactctgacaagctcaggtgcttgttttaaggaaaggggctactagagtcttaccaacagcgagcccaggtgggagatgaaacaggtactccccaaaataggtcatccgagggaggaaaactgatggagagcacaatgtgctctgagcgtttttaatgtttttaagcttttaaatgatttcttcaaggccgagcagcagcagcaaaggtgtggcttaaaggattaagggggtttctgctgacacctagaatgaagttactctattactaatcaagccgagaggaggcccactatgcccccgtttatcatcctttcccagttcctttttgctggtcacaaaacgatgctcatcaatcccacctaaagcaggaggccaggagcccagcctcttgtagaaacagcgagggtataactgccctcccgttctgcccccaagacgaaggaggactctcggaagccaagaaaggtttaagaagtctttctggatagagagcagtgcccaggcaggaagcctttcgccggcagagcggggtccaaggacgagctggagaggacagaggcgcgatgggcctgctgcagggcctgctccgagtccggaagctgctgctggtcgtctgcgtcccgctcctgctgctgcctctgcccgtcctccaccccagcagcgtgagtaccgacctgcgcccaccgggggtctgggagtcagtgggagggcaaagaggggaggtcggtaggggaacatggggcgctcaggcagtccctcaaagtggcttgtggtgggtttaaagaaatggaaggatttttccagaggaaaccaagatatcttcttcctaaaagctgtcatgttcatctcctatcccagtcccattcccccaaccccatgg

SEQ ID NO: 11469 - DNA, 6000 bp, Homo sapiens
ttgtgcaccgagcctgggtctcacgcttgcaagtccttgggctcatctggagtcagcttcatcagtttgtccacacagagcaggatgagggtgaggaaccagaggctccagccaacagctgccgcgatccagccgtactcgtccactcctgtgcggcagcaccgggctgcttgtgggcagaagtccacgtctggtggggaagggacagcaaggacgacggcatgcaccaccagccctgcccaggcttctctaccattaatattaacagaacaatcacagcacggtagctgacactgatgaggcctactacgtgccatgcactgtgctgcgtgcttttacacgttagcttatgccttcctcacaaagcgacaggtgcgacttttattcccattttacatgaagaaactgaggctgtaatttgcccaagatcacaagatggcagaagaactcaaacgcaagtctgcaggactctgaagccatactcttaacctctatgtattattccctaataccccttccttttttttttttttctttttgagacagagtctcactctgttgcccaggctggagtgcaatggcatgatctcagctcactgcaacttctgccttctgggttcaagcaattctcctgcctcagcctcccaagtagctgggattacaggcacgcaccaccacacccagctaatgttttgtatttttagtagagactgggttttgccatgttggccaggctggtcttgaactcctggcctcaagtgatccacccacctgggcctcccaaagtgctggtattacaggcatgagccaccacgcccagcctatccttcgttttaagtgcctaagttaatgcattcggtcattcaatgagggcaggataaagggaaccagacaaaataaagtggaactttctcttttttttttgagagggagtctcactgtgttgcccaggctggagtgcagtggtgcaatttcggctcacagcaacctctgcctcccaggttcaagcaattctcctgtctcagcctccctagtagctggcactacaggcgcatgccaccacatccagctaatttttttctatttttaatagagacagggtttcaccatattggtcaggctggtctcaaactcctgaccttaggtgatccacctgcttcatcttccgaaaatgctgggattacaggcatgagccactgcgcccagctgcaaaactttctattagctagacatgcataatagtggttgctctatgaattactgagcgccttgtggctagaagtaggcaagaagaggaaaaacgtgcatagaagaagaagaaatatgtatgccaaggacgccaaaaccaagctgttgcattgggtggaagttggactagatgatttcttatggcctttccacctccaaacttcttcaagcatttgaacctagggcattgttagctgctgacctgggatgggtcattaaagcaatctgtgtcaaagattgtgcacctagatggggatcagagccaagaaagcctttcagacctgctctgcaaatagttctgggacaaaccacactggtgcacaggaaggccaggcaggcccttgcccacttgacaccaatcaacggaaagcggggaggcctttgtttccctcccaggctgagggccagttctggggttagagcagttggcaggagaagcttactgaggcactgctccagggtcccagggtctgggtggtgagcggtcaagcttgagctgttgctgctgcttgcttctggaagaaaagataggagatagtctgaggcactggcaaaagctattcccaggcatagattttgaaatgttttttgtaaatcagtagtgagtattatgaaagtattatagaagctcccgcatgggcatattgaggctttctgcaacaaagctaactccctgttatggaccgaattatgttcccctctcccaagtttcatatattgaagtcctaaccccaatgtgattgtatttggagatgggacattcgaagaggcagttaagcttaaatgaggtcctatgggtgggccctaatccaatatggcggggtccttataagatgaggaagaggccaggtgcagtggttcacacctgtaatcccagcattttgggaggccgaggtgggcagatcacctgaggtcaggagttcaagaacagcctggccaacatgatgaaaccctgtctctactaaaaatacaaaagcagccgggcgtggtggtgcatgcctgtaatcccagctacttgggaggctggggcagcagaattgcttgaacccaggaggcggaggttcagtgagctgagatcacaccattgcactccagcctgggtgacgagtgaaactccgtctaaaaaaaaaaaaaaaagaagaagaagaagaagaagaagaagaaacatcagcaacacacatgcacagagaaaagtccacgtgagaacccagtgagaaggcgtctatttgcaacccaaggagggaggcctcaggagaaatcaaaccatcaacaccttgatcttggacttccagcctccagaatgatggctgtcaaaaaaaattaaacatcatagaagcaagcccagagactgccagaatacgcagcacatagattgattcatgagcaaggagtggaaagataaaaaggactttagcatgaattgttaaagtcctgttgtcttgaggtgtgggattgggttagggatctgaggcatccaggttcctgtccataactgacaataagaagagagatgacctctaagtccatactgttcaatacggcagccactagccacctgtggttgtttaaatttattaaaatcaaattcagtaaaaaaaactcagcttcttgtttacattagacccatgccaagggttccattgccgcgtgtgactagtggctaccatattggaagcaccactcagacatgggacatttccaccctcagtgcaagttctattattagacagtgctcatgctgacctaggtagatggaaaccaagagatggattggaagaaccttcctagaaattatattgctgttcgttctgcttcttggggaatgcaaaaaggaaaaaaaaaaaagtggtgggcatggaaactctcaaggttcccctggctgtgggtcagtgtgtccttcaagggagcttgttgtcacagcaggacgagttcagaagaaacctgctgtttagctaaagccatgaagttgctgctgagactaattttatgccacccaacccccaagccactccaatgtcctgcttaaagtatagtaattgcctcgatgcaatctgttactgtaaattatttacagctaaatggcttagagcctggtctttatttgttttggagaaactgattcctcactattctaattttccttatgactcaaataacttccttggccctgactttcatttcacctctacacctagaatggaagttgtcctcttccaaagtgagtggaaaaaaaccctagttggctgaatgctagggttaggttcgagcttatgaaattgccattgttataggtgaaaattgttcaatatcagcaattttctgtggttcaaatggaatagccccggtgaaaattcctaagaatttaaacatcgccctcctcccttataagcagagccagaagcgagggagggactggccctacttggggctattccacaagaaaagctgctgggaagacccaacgattcagtgcagttaaacttgtcttctgattctgagctcccatcataagcaaggcactgtcggggtaagtagaaagaaactcagcactcttatttggggaggggtgaagttggaaaataaaatgaatgtgcttaccataattgctgacattcactgtgtgtgttctatgggctatttctaagttctttacatgaaattacatcaattcgtcttgacaagcactatgattgtccccatgagataaaggaggaaacttggcatagagaggtaaagtcatttgctcgaggtcgcatagctagtgagtcatggaagctggacctgggttcaggctcagcggctcaagagtgcacgtcttgaacctcaacaccaacacccctggcagtggctacagaagagagtctgaggatgagaggggcagacacaggactttgggggcagggttggttttgggagcaggagtgttgcagggcatagagagtgtggtggtgttctgaggtggctgagaacaagatcaaagccaggagcagaagatggtaaccaaggtccctctgccgtgagttgcagaacccggcctggcagggcaaggcaggggatgtagatcagccttccagcctccacaggaaaatggggagataacccagcatttccagtgcccggggaggcaggagggtgggagacagtgaatggcagccctcctggcagtcaggttttgtgaaagtcgcagagaaagtacaaggggcagggagggatggaggacttaggaaagggaaggtcagacacaaatgtgcacagggaggattgcaaagcacgacagcccagtggggctgagaaggagccttcaggacacagcggaccaagagatatcattttggtcccctgatgggtgagactccagcaaataactttttcctttctttgtggcaaaggccaagagaggtggctgctcctgccttagctgaggaattgagtatctgatctccgtctcaggccaacctaagaccccccctgccccagccccacctcccaccccctgcctaatccttcagatgagaaagttctgtttcctccttcctttgcgcaggaccaaccctggccaaagaatcttccccctcctccttctttccctcccacctctcttccctccttccctcccccttcccagcctggccatgaataaagctcataacgctacctgccgagcaagccgagtggagggaggcaaaggccaggctgaggatcagggtggcccgggtggcagcggggaggcgctgcatgctggaggctgtgctgagtgcccggtgcaggtgagccggtcctgcggagttgtgccgagtgcctgctgcaggtgagtcgactcccacctgcaggagctggaaagcaactctgccagaggtgaacttatgctgggtgtttgggggaaacaccatggggtggagcaaaggaaacttggcctgtcacaccttctctcacctctctagaagggaagccaaaccgttggctgaggaaggaagggaggggcaagctgtgcccttctcccctgagcgcaaatattgtccttattgagaaacaaggggaggacaagagagatctgtgtcatgctggttcctgggacatgagtttgctgcctctcccatctgcaggtgtagcatggatgctcaattccatttgggccaatattcactgagcacccactatgctgaagttgggagatacctgctgtcgaagtgcgttaattacaaacacgcatcattcaaccccagaaccgtgtttgaggaatggcttgggaggataaagcactgtgggtttcaacagtggaggccacatctgctgatgggatgcttcaagaagaaaatggcatttgaggttgggcatgggggctcaccctgtagtcccagcactctgggaggctgaggcaggtggatcacttgaagtcaggagttcaagaccagcctggccaaaatggtgaaaccccatctctaataaaaatacaaaaattagccaggtgtggtggtgcatgcctgtagtcccagccacttgggaagctgaggcaggaaaatcgcttgaacccggaagacagaggttgcagtaagctgagatgctcctgaccctgcattccagcttggccgacagagggagactccatctccaaaaaaaaaaaaaaaaaaaaaaagaaaatggcatttggcctgggccttgaaggatggctagaattttgacagggggagaggggaagatggcattataggtagagggacagatgagcaaaggtccagaggtaaggaagtgtca

SEQ ID NO: 11470 - DNA, 6000 bp, Homo sapiens
ctttatagagtctaataggggaagcaaacaagtgcattatcatgcaataagtgctcccaaggaaaaaatacatgatattatgcgacaccaaagataacagtcactaaactcaactgggccagggaaagagaatcggcaagaaagtttttctgaaaagatgagacctgaagggtgagctcagacctgaaagatgagtcagaattatttagtcaaagaggatataggagtatacgtgtgtgtttggaagacagcaagtggtgccgttagtgctttgcacatattatgtgctcaataaacatgtgtcagataaatatttgaagagttggatccaggagagagtgcataaaaaactagaagtttaatgtcactagcagacaatggtagggtagatgtggtgtcatgagaggtacagaagaaccagcacatggtcctcattgcccagaagagtatctggttcatggcagcactcagcaacgtttgctaaaagaatgaacatgcaaagacttaaagaccatgttaaggggccaaagccttgtcctaaatgcaatagaaagttactaaaatgtttaatcatggaaattatataatcaagtttgcatttagatcattctgactaaagagtggagaactattaaaggcaagattatggcagaaatgtttctttggaggttactgaaggagtcaaggagagggccaaggggtagcagagagaaaatagtaaagaggatagatttgatagactttgaggaggtaaagtcaccatgacttggagttttattagatggtgtattagggttctctagagggacagaactaataggatagatgtatatatgaaggggagttcattaagaagtattgactcatactatcacaaggtgaagtcccacagtaggctgtctgcaagctgaggaagaaggaagccagtcagagtcccaaaacctcaaaagtagggaagctgacagtgcagccttcatctgtggttgaaggtctgagggaccctggcaaaccactggtttaagtccaagagtccaaaagctgaaggacttggagtccgatgtttgagggcaggaagcctccagcacaggagaaagatgaagtccagaagactcagccagcccttccatgttcctctgcctgcttttatcctagccgtgctggcagctgattagatggtgcccacccaaattgagggtgggtctgcctctcacagtccactgactcaaatgttaatctcctttggcaacacccttacagacacacccaggaacgatagtttgcatccttcaatccaatcaagttgacactcaatattaaccatcatagatgggatggaattagagaagccaaggataatacccacacttcatgattcaggcaactaaacaaatggtctttacattcagagacatggaacataagagaatgaacttgttttggccatggtatagcaattaatacattttgggaaatggtgactctggggtgtctgcgaagcacctcaatgaaaaatgtagctagtcagagatatatagatctgaagctctctgataaagatttaggaatcaacttcatgaacatggtgattaaaaccgtgagatgaagagaggagggataactacaaaatctgaggaataggcagaggagaaaaataataaatggagaggccagggagaagggaagaaagtcaggagaatgtaaaattatggagaccaagaaaaagattatacaatgtaggccaatgtgggcctctgccacaagtggcgtaaagactgaaaggagcccatttaattcatcgagtgggagtcagcacttagtgatgtggtcatagtggaactcagactggcgtgagctgaggagaaagcaggaggtggggaagagggggctgtgaaaactggcaatccattcaaaaattctgactgtgaagataaggggaaacatcaggtctctttcaaattttcaggttttctcactaaactgcctgagagaattccagcaatatacatttaaggaaatatacatatacttacgtatgtacatatgtatataaatatatatatatgctactaataaggctcaagagacagtactagtctttatcatcttgagatacaaaataaagttatgtctgtaaatattcatgttgataccacttgaaactccaattaatgaatcataggatgtcctttcttcttttggtttcctttcttgataccccatggacacctaatccaaatgtggcagttacagttcctactttgacaaagtctgatcagtccaccaagttggtattgttgctgccactgtcaccatagggtaaacattctgaaaatagcagtccagctgtgtggtgccatagcctatcagcatcaacagctgatcctgggagctggattaagaaaacgttatagatcctctttttttgctcgttaggataggaaagcttttaatgactatccatgtcaatacacacacacacacacacacacacacacacacactgcacactgccattttcccccacaaaacacacacgataacccagaagtcttgtttagccatacactgtgtcccttccaaattacctacaattgtgggcatggtcttcttaactctttggtaattacaatgtagaggtgactccgttgtctgctcaggcaattataatattgcataatacagtccctaaagacttagcatttccaacttgatgtcacatgaagattgccaaagttaaatttcagttttactcttcaataaaacttttttctttatttttaggactcagcctagtgaaaaaaatctaatttgactcactaagcagagaatttgttatcccagtctgcaataactgattaaaaattagtgatctcatggttttttccccaaaaaacaatgtgtgggtatttccttacaattgtgtgactagaagcccctttcttattattttcccaaagcaatgggcatgggcccccaatgctattgacttcatctctagtaacccctcagttgcatttgccattgcagatattggcttttttttagcaaggtttctgataatgtcgagtttaagagaagcattgcagtgcgaagccttgaacaagaatttagatttttctttagattttctagcagagcagaggtgtcccacaatgcatcagtcagagtactacccccaaaacttctgtggacatccttttatactatgacattttcttctcttttgatgatatttgaaagatctcttatacctctttgttataaaagattcacttgctatccaagtgtatagattttattaagttattcagaaagtctctgttaaaaactttctaaataataataaccaagtctcctgattcccatacttcctaacatagctggcataattggccatatttattgtccaataaatatatggatccttctggacagcaatctagggtctagaagtaattaccttgtgaccagataaatcaggttcaatgagatttttcaaaaacacagaggactatccaagtagaacaaaacacaactttaatgttccaaagccctccaaatgtacatgtcttttgatccagcatttatatttctgataacttagcccaagaaagttattaaggacatgtaaaaggatgcatgcacttagctgttcactgtgcattgggaagatagttagaagagttttagaaaatagttagaatactaaggatttatgtttaagatgctgagtatcacgctattgaaattacaagcattatcttgctcatttctcggaacaatcctatgtggtatttactataattactcctatttatagataaagaaatggaaggtaaagagactcagtaacttaatcaaggatgttcagctagtgaaggtcagctccaggaatcaaaagcaggactgatttttaaaactttgttcttgtccaccacactttactagaagatttgtggttatgcaattgttaaagaaataatatacttttacacctgaataaataaatcatatagttttacacctgaatgctatgcacatattaaataatacattatcaaaatctatattttgacatgaaaagatatatataacatagtgttagcttaatcttgagcagatagattgcaaaacaatatgtacaatatgttcccattgttctttgtgaaccagtgtttttctgtctatctatctatctatccatctatctttctatctacctactcatctcgaaaggatacaccctgaggtgctagcaatgactataactaaatgtacaaggttataaatggttttgttttctcaattttccttgttaatattttccagccatttttttgtcatgagcacagtagttttcatagtagggaaaataaaagcaaattttcaaatttaacacgaaattaaaaactccttgacaataggacttgagtattgttcaccccagcccactgctgtatccagcagagtgccatgttcaagaaacactgaagagccaccatgaggtctggaaggtgagcaggtggtgccagagaggagtccatgataaaggggaatgagcagagctccagcaaatggagcaaatggaacagcaagaacctgctcattcatattagtgtcttcaactggatttcttaacatttttaacttgacataatttcagacttgcagaaatgttgtaaggaaagtacaaataacttccagctaccttttatccagattcaatgtttgttaaaattttactacatttctcttcccactgtatttcaaggagatttagacacagaggaagggtgaatctgtgttgaggtattttgttttccaaattgtccttaaaatgttcctctgcattagaactctcctggcaggaagtctgctcttgccaccactagggctagagagtctcttcccttctttgccccgcctgctccctttgccaagaaccccactgaacaggaagaggtatttcttggggatgctaccaaggcagagactgtgaagaaggaagaacgttgcttgggcaaaaggagcatattctcaggagacggggcccctgcctgccacaccaagcattaggccaccaggaagacccccatctgcaagcaagcctagccttccagggagaaagaggtgagtctgtctgtctgtcttggctgcatggactgttgaccaatgccaagaccttcagggatgcctgtcctgtctgtcacctacccctggtatttggaagactgaggcttctgacaacttaagtcagtatggtgaaggctacagactaaggtccttgggaacaagggtcatttcaaggataagggttctcaaaatacaggagagggtttaattattagacagaatttaggaggccacaaatagggcaaggctgaggcctggagtagggaatgagtgaaggagaggcagtatgccaagttccaaggctccaatcaatacatgattctttctgtgttcgcggcccacgctgggtcacctcctggtacctgtcaatgtcatgcctgtcttccaagcctgccttgctttgggtactctgagcgagaggctgggatatgtcctagtgaaaagcagccttgtacccgaattctgatgctgctgtgctctaatcttcacaggcccctgcagctccttcatcatgaactggcacatgatcatctctgggcttattgtggtagtgcttaaagttgttggaatgaccttatttctactttattgtgagtatttgagcaacctcttgccccagacttcatgttgtcttgctcattgactcttctctcagaatgcatggttgtgtgtaaaggttacatatccaagtctttccacctgagactaactgacccaacctgaggtcaattggcaatgcctttctcactccccagcacacacagtggcccaggctccttggtctaccttggagatatagaacttaccagtttctgatggttagaacgccacgcaaagcttttgctagtagagtattatttgggtgat

SEQ ID NO: 11471 - DNA, 6000 bp, Homo sapiens
gaatacatcttccaaacgtaacggtaaatgaaagaactcggacaccaaagaatgcatatcagatgattccgtttcataaagtttaaaaacaggcaaatccactccgtggtgttttaagtcaggatattactctcaggtggggggcggggtagtaaaacaaaagtgaggtgtttgctaacatctctgcttcttgaaaccctgaatagaggttaggccacaggactgggagtcagacagaactaggtttaaatcctggttctgcagttgagtgactttgaactactttaattcccggtgtctcagatttttccacctataaaatgagactaatgataccttcctccgagggttggtgtgagaagtcaatgaaacgatgtatgtgaagtgcggcagcctgcgtaggtgctgtaataagtggtaactattattatccccgcccctgttgcctggtggtaaatggggatcagagaacagataggtaagaacacagacaagaaggaaagggaaggacctaactaggcttatgattaaagacgtgcagaatccaccagaaggctgtactggtaagtgccatttcctccctcccacagcccacacggtctcctggattttgctgcctgcaagtttgggctggcccacaacagccaaccaaagtcgtttgggtcccatccatgagggcccttgctaggggacttgatactgttacaggaaaggggtctggatcaagatcccaagagagggttcttggatctcatgcaagaaagaattcagggtgagtccatagagtaaagtaaaagccagttgattaggaaaataaaggaataaagaatggctgctccataaacagagcagccctcagggttgctggttgcccatttttatggttatttattgattatatgccaaacaaggggtagattattcacgtctctcctttttagaccatatagggtaacttcctcacgttgccatggcatttgtaaattgtcatcggtgctggggggagtgtagcagtgaagacgaccccaggaccctctagtggccatcttggttttggtgggttttggccagcttctttaccgcaaactgttttatcagcaaggtttttatgacctgtaacttgtgcctacctcttatctcatcctgtgacttagaatgccttaactgtctgggaatgcagcccagtagatctcagcctcatttcacccagcccctactcaagatggagttgctctggttcacatgcctctgacaatactagtccaaaaaattagtttgtactaattctctcatagtagttgctagcaacatcctgggttaccctgctggtgatgttggttgcattttgaccagagcctatggatatacaagaccatgacctaggctgggtgtaatttcaccttatcctcagtcagaaaggagctgggtagggagtagaaggggaataatatgaacagggtagtgttaacgtcaagtttgtaagaacaagccacagcctgggctgcagggactctgcaggctttcctttctgactgcagaatgagaacagggccagacgccagaaggggaaagaggtgtccctctgggaggccctgtctgctacgaggcctgtggttcctaggggaccaaaaaaaaggaggagttttggggtttgattttgtaattttaaatgatgtcttagggcatctctatagggaatactgcccagcatcgaaaaagagaaactgttgatggaggcaacaagaaagatggatcttagaaggatgagtcttagaaggatggatcttgggagcatcatactaaagagaaagacccagagtccagagacggcataaaattctggaaaggataaaactcacccaaatggacagaaaccctaaggctggaggtgggattgattcacaggagcaccagtgaatgtttttagatgctgaaactgctctgcatcttgactgaggtggtggtgcatatacatttgtgagagcccattgaaccgtacacttggaatggctgcaacttattttatgcaagttgtccctcagtaaagttgattttggaatggaaaaataatgatgtcttagtaattgaggttgttctgctctgggagcaagctgggaggcctgcaggagaactccagcaattcctagcctccaccattctcctagccaattaacatttgctcagtaccttacagttcataaagcactttctcctcttttgatcattacactgactctgtggggtggacgtgattaatctcattttatagctaaggaaactgaggcacattatggctaagggaactggccaaagtctcctgactcaaaatcctgctagctttttattttctgagaccatccctgaatatagcctcagaaatcatctaggtctagggaaactgaaaccatggtccagagaacataaataatttgacaaaagttgtactgctagttaagaacagagactaaacttgaagatgtgcctcctctcatgacaaactaaccagaaaatgtcaaatcaagataatcctgaaaggagacagaaagtggacattcattccccatatgcagagactttcagaccaggataaagagcctatcctaaaacaaaaagcaagacttttttttccagggttctagactccatgtctcactgcatggagcagtctcccccactccacacacccaccccccaccccccaccctctggagtcccaagggtcttgtaactttaacaaactgcagcagcaagcacatgcattacctcaccacagtctggcttatgtcctagcagcaattgtccaacgcttgctccatttccccccttctgttggctttgtacccttcgcccattcctccctgctgaaatcacaaagctctgacccccgccagccagcgtgagcctcctcctccttcctggagtctttaacattagaaaagaggcctctggtgcagagcaatgtgtgtcagatggcccctctgtatacacattttaaaagcatgtaagtgtgggagtagagggagagagggagggaaaaatacacgatggtgtgtacacagcgaggaagcaatcctgggaggacttacaagaaacagttgatggtggttaacttggggaacagaaattagagtgttggagggcagagggttctacttcccattttgtttctgtatgttcaacatgaatttcctaaccaatgtacatgaattacatttatttatgcaaataaggatagtctgagccaagaactgatgggccgtgtttgtcatatacgtatctgcataagaaagcaaaaaaaaaaaacaaaaaacctgagaagcattacattttgaaaatgagaaaaagcacctataatccaccacctcccttcattcacagtaccgaaatgtgcaacaatgtaaatgatagaaaaattatgaacaatttacccagatgggatggagcgaaagaaggaggggccaggagtggacccccagcctctttagtaaatgcatcactcccctttgagctactgtgatccctgtgtgtaccttgcctggggtccactcctgcccgccatttcaatcatttgtgcaattatttatgtctcaacccccagcatccccaaattaatagcttatatagggcaagacattgtccttctgttcttaggtgcttctagagcttcctgcatgcatagcagaaactgaacaaacatttactaaatagaatataagaaagtctcggcagagcgcagtaactcaggcctgtaattccaggactttgggaggcagaggcagggagatcacttgagatcaggagggatcacctaaggtcaggagttcgacaccaggctggccaacatggtgaaaccccgtctctactaaaaatagaaaaattagctgggtgtggtggtgcacgcttgacgcttgtgatcccagttactcgggaggctgaggcaggaggatcgtttgaaccagggaggcggaggttgcagtgagccaagattgcaccactgcactgcagcctgggccacagagcgagactccatctcaaaaaagaaaaagaatataaggaagtccgcaagaaagtgagagggcacgtggtttgacaccactaagatgggttaaaatatccttccctgccacctgtggctggaaccttaaccagatattcatgtctgctgtgtaagtgcatgtcaaggttcaaactccttttcttgtttacccagccctggcccacacctgcctttctgccctgattcccaagacaaatcctgcgccccagcagtcaaactggtccattcaccactccctgggcgcaccttgaggctccctgccttcaggcccttgctggtgcctttcccaatctctgccactgaaaacccaggtcacaccagctctccctgaagactcaactaatgtgccccgatgactgggcttgcttcctcttctaatctccagatgcttcactgcaggttgtaccccaccttgcattgtggtcatctaagcctcccctgctagagggtgaagatatgactcttaccccttgccttccccggccctattacccagctctggggcctgcacaaagacagaaagaggaatataggagtgtaattcaagtcagaggtagaattaggttaaaagctggatcaagattgggttgagtttaggattagaattgggaaaaggttcgtcaattcttaatcccacctactaggcggcgcccgcagtctcattcgggtcaagacgcctccggttcttgaatttgattaccagtctagcaagtttctttcctgccctactgtccctttaaggaggtgaaccaggtgaggccgggactccgcccccggcgctggccccgccccccgcccccgcccggcccgcccggctctcctagtcccttgcaacctggcgctgccatccgggccactgtcccaggtcccggcccggagctatggagcggcgctggcccctggggctagggctggtgctgctgctctgcgccccgctgcccccgggggcgcgcgccaaggaaggtaccgacccccgcccccgcgcccccaacccccgcgccccgccccttcccggggcccggccagcacccccctgcagaagccggcattcctaggggccatgttccccgagaccctcgccagctctctcgctgtgcccgaccgccaggctatcgactggccaggcccatctttggtctttaaccccaagcggctgctctcccgggtcagtcacccccactcccgcaggccagcaatctgctcctgggagtggggagggaattccggacccttgccaggaagtagcacctgcacccgcacccctgcctgcattcccagacagtcccagcttcaggtgcccaccccagagatctgagcccttggaagttgaaggtgggaagtcgcctcctgccaacctaggccagggacagagggagctgcctccgggagaagggttaggactgacgccacaggggttcccagttgtccgagtcgaatattccatgtgaaagttggaacaccctctccggccttactcccccccacttcccaggcaggtagctgtgcctcttatccccacttcacggctctgatcactggccaggtcaggccaaagcaggcttcggacagtggaggtgagcctccctacccaggaaaccccttctgaggtccccggtccaccctgcccactcctggctagcagaggtgagctcctcctgccctccacgcgttccaatcctgcagctgatgggtgtcccaggacgcagcagcctgggtaactgagcgtctcgtggggctgctcttcttgcattgactttggtcaaagacccagcgccccaacccttgtcccactctacctgccttccttcacacacacaaagaagagtgaaatccctggagctcttcactcctcagtcctgagccctttttctcccctaagcctcaggaagtcacagcttttaggaacaggatgttgcagcctggggctgaggccccagaatgat

SEQ ID NO: 11472 - DNA, 6000 bp, Homo sapiens
gagatttagtggtactcctaaagttacacaacaaatgggcccttttccatcacctctgacctggttcaagtgttgggcatctctcccttggactattgtattgctctatgtggcagatgatattttcccaaggtggtcgtgccaatacatatgcttttcttccagtgtgacagcaacacccctccactgagaggtgggggtctgtgtttgttctccttgcatctgatgggtcacgattacagcagaagttgttttatgtgattttttaaggctaagttattcaaggagatacagctgctgactggtcttctcttgggacactggcccttggaacacagccaccatgctgtgagggagccaagtggccacacagaagggcgttgtgtagctgtctggccccagtcctagctgaggtcccagccaacagccagcaccaaccaccaaacgtaagtagatgaaccttccagtctctagtttggagtaaagcagagaaaagtggtcctggtggaaactaccccagttgcaaatccatgagcaaaatatatccaactaaaccactggatcttgggatggctgttatgcagcaataggtaatggaaaaacctcatatccacctcattttctccaaactattatacacgtttcattcaatcaacaaacctttcttggatacctactctttgccagggtctgtacaaagacagaatatttacattcatggattctgcattcagctgccactactgtttccttactgtttcctgccactactgtgtcccccttgcagagataataaaattcatagtcctcatccctctgcaaatggtgccagcctgctgctccactgccaccacatcaaattattttgtcctcagacccaatctccattctcctttctttatatatccttatgttgtctcttctatctgcaatgcttctgccctgccccacctccaacgttcaaggacctgcactgaaatctccttccctggcaaggccctccaagactcctccggttgaaattaaccaacacctcctcgtaatcccacagcactgactgcagactgcagtttctgtctgcccaccgtctccctcaaaactcactagactgtgaatccctggaggagggatcctggcttatccctcttgtcccccagcagtgtctggcacagggcccagtacttagaaagcccccagtaaacacttgtcgatgcaactagtagcagaaccagaattagaagtcagatctcccgaatcctagtctccagggccttacttgcttcttttgacaccacaaaggcagggaaaatgtcccaccaaaggtggggatcaggttgtccagagaagaccttggaatggaccaggggttggcaggattgctacatgtggagctgcagagggcgatgagtgaagagtgtcctggctcttggctaggggtttcaggcgggttccttccatcctttcttccttctttctttccttcctacttcccttctttctatcaataagccctgatcatccacttctggaggggaaacatgctgtttctttgattcttttcttctccaactccagttcacatctgaaaaaaatctctattctggggacccagttgcacagaaaaacaaaaaaaacccaccgtgttcaagcatcaagggacctgctcactctgttcttccttccccagggtttcccaggaaccattgctctgtaacctgtctctcctgtgcccagccgactggaactgcttcccaatcccctgtgggtaaccccaggctctcctgggcctgactttggtggtgtcttgcctggcccgctccttgggggacctctggcagagtgggcttccatttctctttctccttccaggatgtcctggctccatgccttcggactgagcaggagcagagagcagggtgggtaggatgctttctgcagacttttctccctaaattgtttctttttgggagctgggaggagcctggatatctcactgtagcctctctgttccctcagtcacaggcagggtgcgggagagctcttcccaggaatggtctctgaaatggctcttggagctgagatgggggtggggcagattctagaggcttaacagcccagctcttggtattagggttgggcacttttctctttgtcccagatctgggggtagcagaggtgggaagttgaaggcagtgggggcttctccatcagctcatctgaggcccagaaatgttgctttggggagagcttgccccctctcaccgtttctcttcctcagctcaattcttgagtgtgggggcggctaagtgggtctgccttcaggctctaccctgagcctccaaggaagtcagaaatctacattcagctttgacttctgagtatgtggagtgggctggggggagagagggagagatctgtctctcctcagcttgagggaacagctctcttcttgcctctgtgcacagaaggagggctaccccgtgcctgggctcctctctgtttgggaggatgaagggctcctctgactcctgtcttccctttgggataagagcagaggcctgtcccagcaacacgggtacaggagtggaggacagctggccagctcagatgagtggctccttcccttcagggcctggctctccctctcccttggtctggagagagggggaggctacagatgtccctttcccttcttgccctcccatgcccattctcagctgctggcctttgctcactttctctccatcccctggcctggacaggaggacacttcactcacacatgaatcatcctggattcatggtaggcaacccagcagccaggggtggccttggggcgtggcgggggctgggccagtcgtggactaggttctacccggaacccagatgtgttgatgcacctgatgccaaatgctacaccaaggaggagcttgtgctgtggaaggccctgggcccccgggggggtgagtgaggaaactgctggcagtggagagggcctgaggaataactgcacaggcaagagcctctggacttttttagcatcagctgtggagccacctccttctctcccactggctgcctccctgagtcactgcccacccaccagcaaataaaaaagagtgtcatctgctggccagtggccccatttggccccagtgtttgcatctttgtgctcctgggtggaaggtgagagtccgggtagggtggtctcacgacgacagttttctgcgccttcctccttcgggactccgattccttccctgccctttgttcttcccctccccccatgatggttctcgctggtgacaagacccagcccctgctccaaggacagaggcagctgcaagccctcaggagcccccacatggccccatccatctagacaggtctctgatccggctgcagggaggggaccctcggctgttcagctgcgactcctccctccccgcccgcccactcagctgtcaacactcgcctccccgccctggccttcccggggccctgcctgactgctaagtccgaggacaccgcgcccggagaccctcactcagacgcaagcaggcgatgagcaggcggcggggcagacaccccgcctgcccttgagcatccctaggcctccttgcctaaataagggagccgcagctggagcgagccagctggccggggggaggggcctgcggctaggccagggctttccgaggggctgggccgtggccgccgccgcagggccccgagcccgccgattgggcgtgcaaggctggccccgggctgccgggggagggcgggccgctcgcacccggggatcccctggttggaacctcgcgctcagggacctctctttgatcctgcagctaggaggccgcaactgctgtcagaatgtccctctctgtgcagctcctatgcagagccccacagagggctctctctctctccgtgtgtgtgtgtgtatgtgtgtgtgtgtgtgtgtgtgtgtgtgtgtgtgtatgtgtgtgtgtgtgtgtgtgtgtgtgtgtgtgtgtgtgttggggcagggggcgtgccccttctaagtttaaccctcccttatttcagagctctgctgctctggggccttcagattgtcttgcttttcctatttccagggtctcccttgactccgggctcgtcttcgagggtccaggcgttgccccggtcacccacagtaggcactgagcgcgtgctgtgtataccaagccagtgctcggcgtggtggggaaccagggcataaggacccgccgtttcccttcaaatcaggtttcttagtcgctaatctggggtgggggtggaatcccttcccccatcccggccgcctacaagccggccatggcacctgtcctcacggtttcccctgcctaagggtcccttccccctcttctgggcgcgcgagtcccaggggctccttggcagagcgaggggctggcgttgggggagcactcggcgcggctcagccaatgggaaggtcgggcgcgcgcggtggggcgggatgggggggggagagggcggtgctgcgggcgcgcggcaggcgggagggggccgggaggcgggggccggagccggaggggcgcgcgccgcattaacccttccgcggccgggccgagccgcaggcgctgcccgagccgcgggcgctggagcggctgtcggcgcggtggcaggcgggagccaggagtccggggctcgggcgggcggagcgcagcgcggggacgcggcggagcgggccccgcggctcggcgggggccggcagacaggtgtgccggcggcgggcggctcgcgctcaggcggctccaggccgggcccggggtccggagcggggagccgggagccgagcgaggacccggcgcccgcagtccagtcttggccgcgcccgtgctcggcttggccgcggggtgcggggaccacggcccggccgggccacccgaagcctagtgctgggccgggccgggccggggtgggtgggggcccgcccggcccgcccatgggctcaggatgccggtgcggaggggccacgtcgcgccgcagaacaccttcctggacaccatcatccgcaagtttgagggccagagtgagtgggggagggggctgagcggggagggggctctgggggcgggccgagctcttccgagtgtggatgggggggcgtgcccgggccgtgtgcgtcggcaagtgcgagtcaatggggcctggtgggccccaggctttggcgaggggacggcgggggcaaggcttggtgcaccggggccgtgggcaccgggccaaagggtttggggttggggcttggggcgggaaactcagctcaggcttttgggatcggagtgtgtgtgacacgctgagtgtgcagggaagggatgtgggatggagtgtgcaggtgtccccaactctgggtgcgtggacgtggatggggctgtgtgcaagggcataagagtgtgtacgacccaaaccctgggatcccgagagtccagcgcgcacactggtcttgccagatcttgactgtgttgtgccggagggactgaaaagccgtggatgcagggtcagctcataatctcttcttgtgtgtgccgtgtgtatataaccctgagcccatgtgtcacccgtgagttagaccctgtatgggcggtggggaggtgtctttgacaaggctgcgagcttgtgggctctgtggagacagggtgtcctggggctagagctgggctttgagggtaagcagctccctgtggtacccccaagttgtgggttttcttgccctggagactgtcacctaattcccttatggggaccgggagtacagcacccctaatgcctgcctggtagggaggcttctagaagggtcccagattaggcaaatgtcctgggggtgggcagcattcatgtgcctgtccctaaggctgcatgagccacagtgggtgtgactgccaagggccctgggagttgggagaggatgacattccttgtccatgaccctgtgagcacaggacaacgcgtgcttgta

SEQ ID NO: 11473 - DNA, 6000 bp, Homo sapiens
gcaagcagatgaagctgggagtggggccctaaccttaaggcccaagtcagggacaggcccctgcccataactccatgttatcgcaaaaggccttggctctcactgcatttccactgaggccaaacccaccacctgccggtgggcgtcccctttcaaacagagctgggggaggaagcagatggcccagggtgaggcccatctgtccgtgcccgctcgaaggtcaccatgccaccggggtgcctgcgggtgcctccagcacccaccacaccagggcttgcgaggcatctgccagcagcgtgccaccacttcctgtgccctcagcggtcgaaagtccagggcctaagggcccagagaaaaaagcgctaggcagcgcagtggccgggggtttccggtccccgactccgggtgcggtgtccctggcggtcggtcagcacccggctgcccagcagctgcctccagaccgaggagccgcggatccccgtcaggctcatgacccggccaaagcgcggatggacctgccggcgcctcccacgcggtcgctgagcctcagcccagcgccaggcccggcccgctcccgcttggccgccgcggcgtagggggtgtgcgtcgggagagggcgccgcggcgagcgccaccctccgggcctgcgggcgctgggcccgggaaggctgccatccactaacgcgaggctccgatcccccgccccactgcggagcagggcccgggcagcggctaagaagcctccccggtcacgaccccacctccccgcagctgaagccctctgccgcgcccaccttccccggccaggcctggacagatctggtcccggcccccccaagcgacaccaccttcgcgccctggaacacagtcagcagaaaacccccaaccccaaagtgtccccgaacgagatatggcgaagctgcccgccggttctgcaacacagatcggcaaacctcgtggcctggtcctcaagcgcgcaaggacccccgacagggagagcatggccaggcacggcctgtggagccctcggccggcgccggagaggccactgcgccccggctcccgcagcccccggctccgctcaccctcgatggagatgacgtgctcccggatctggttctgcagcgccaaatcctcgatgcgctcgatcaggtcgtagatggcgtagatattgggatgcacggactcgaagcgctggatctcggcccggatggccgcggagttggagagcgcgaactgctgggggggcccgccggccagctgctgcgaggggccgccgccgcccccggccccgggccccgcgccgccgaactgcccgccgcagacgagctgctgcgcggcagcgccgccgccccccggagccgccaggctctgctgctgctgcgggctctgccccccgcccgcctggaagttcatggcttcggagccgtggggcccgaggcgggcccggggcggcgcggcggaggcggcggcggcggcggcggcggcagcggcgagcgggagcgcggggctggcggggccgggactactgggctggcggcgcggggctagcgcatggagccgggggccgggggccggaggccgaggccaggaggcgccgccgcgcacgctgtggccgccgctgccgagcgcttcccagcgccgtgatcccgctgcctcggagcagcctccagcggcaacaacaacgggaccgggagcgcgcggcccaggccctccccccgcgtcatgcgcacgcaccgccgcccccgccggctccggcacacgcagcccgagcccccctccccgccgcccccgcccctcctgcgcgccggcccgggcgcccccgcccctcgctcgctcgctggctctgcagcctccacccccgagccgcgcgctccagccctggcgccccggcccctcccactcagcctcggcccttccgcctcctcaccagcccccacccgcattgcctcgagggccaccctcgcggaggggacagctgccctggtctcctcccgcgcccggctgtcgctttcgcctccctgcgctgatctgggcggggtgtcggatctctaggcaatgcccaaacagtgccctgcgcctgagggtgctgctgaccgaggctgattggccgaggagtccgcccaggcccagctgctcctcgcttacagcgtcccgccttcagtgcggcataggctcccctgtccccaggctccgaggtcagccctagagaccaccctgctgccggagttttctccctgtctccctgcccaggctctccactgccggctgcagcagtgctctcctaaaagaccctccccctgccggacttgggagattagctaaatgctacccgaccccattggtacatagaggaagaagagggagggatgaaatagtatatgcctttctcccctactcatcccattggagagaccaaccaaagcccacgtggctctcaatttttcttgtcctcaccccttgtccatcctgtcctttcactccctctagggccagggagctccctgaaatgtcccagttcctctgcagtcccattgccaaagtgggctgcagttctgttagccccctcccccccaccaacacacacacgtttcctaaaacctacaagaggtgacatttgcagaggccgcagccaataaatctgccagagatgttgcagggtatctgctacccccagatatcctagggcatcagtgacacacatcgtccttcttacgcacacttccacttccctggccaagctggatcttttcccagcatgaagctgtccactgtttgattacccacacaactcagccccagaaccaacccagtcactattcccgagttccttgtaccttccaaagcacctggtgcaagctaatcaacacacagggtctcctaagctcctgaggaacctgtgtttctatctccctgcataagcttaaggatatcttgtgccctctctgggtttcatctgcgaaatatagtggttgaacataaaacctagttctgatgttgtataattctaaaagtaacatccaacatctcttttaggtgcttaattagaattgacagcaggaagtagcaccaggtatacctcccaagagagacactaagagcaaagagctcctcaaatgtgttgccccagcaactagcacacacgtgttatagcactgttgggctgttcacacgtctagctcttctactagtatatggagccacatgagggcaggaagagggtctgattcaccattttattcccagtatcttgcacaatgcctgggatatagtgtgtgtgtgtgtgtgtgtgtgtgtgtgtgtgtgtgtgtgtgtaattttttttgagacggagtctcactctgtcacccaggctggagtgcagtgactcgatctcagctcactgcaacctccacctcccgcattcaaatgattctcctgcctcagcctcccgagtagctgggattacaggcgcccgccaccacgcccagctaatttttgtatttttttttgtagagacagggttttaccatgttggccaggctggtctcgaactcagtgatccgcctgccttggctcccaaagtgccaggattacaggcgtgagccactgcgcctggccatagtacatcttttaaaaaatatgttagtagaataaatgaatgaacaggagggatggaactagaggtaggttagttctgtatggtatcaatctagactgacattcctaaggcaatatttgggccacttgctcccacagtaggcaagaaccatgggaagactaggatagattattttaaatcaagactggcctgtaaaaaccaggatgtgagatctctgtggctacaggagcccagagggaaaaatccagatatccacaggcctgggattcaatgccatccacacagtaacacaccaaagacccgactcctgagaccaggtttgggtggaggtgagcgaatagctactgtgtgacatgtaccttagtttttacactttttaataaaacatctaatttcttccttatgattgacttacgaggtgtgttttagagaggaagaaattaatgttcagagagattcaataacccacccaaggtcatatagctgagaagcacaagataagggatcaggatttctgccaggttccaaggtctatgcttcttccacagccctgaaggggctgtggagtcccgaaggtggaggaggggaccaaggaaaggggcagccctgaggatgggtatccctagccagcctggtggggcagcccatggatattgggctctgggctgaagaattaattttggtggccaaagtgccttctggcgtccactgtgacataacagtaggggccacctgagttcctcagagccttccacactgcatcacgaacacgggtactctgacgtgctccagctgacgtcggtgtctggtgtgatagatgccctggctgttggcaggggagggggcggacgctgctgccgcccaaacctctagggggtagcacaacccccaaaaccgcccccgccagccccttcgcgatctgcaggcgcagagaaccgcgggtggagccccacacgtgggtccgcagggcggagggcggggacagcgcggcgccggactacaagttccacaatgccccgggccgcggcggcggggaaggaggggtgcttcaggtgcctgcgacctccgcgcctcccgcccggaagtgcccgaggggccgcgatggagctgggggagccgggcggtgagtccccgcgccgtgaccgcgcccaccccgccgcccagggccccggtcgggccgggatcgccgtgccctcctgcggcttcggggggcgggaaggtgggaggggtgatgagaggtgggggtggggaacgtgaagtctcggattccgggcgggatctggggtcaggcagcccggggggcttggagagacttccagaggaggcgcggagttagtcctccgcggagtggggttgaggggacctggagggggccgagctgggtgggtggtgacgctcggtggctccagattgcccaggggcggagtttgacgtttgctgtgggggaagcctgggaagcagtcctgtgccgcgggtggggtttaggtgaaccgtaacgcggggggcgggggtgggggcacagaggctctacccccacctcttagaaactttagcagcggagtagatgagcctggggtgaagtcggtgaaggagtagacacactggggtgaagtgggcaggagaatagatacgcttgggggtgaagtttggttggggtgaagtttaggagaggcgttgcttaggcccttaccttgggatagggtttgggtgagttgggagctggttgaagacctcgagctcagatgacagaaagttaggacttgggattcggcgatgggaaggggcacccggaggcaagtttggggcgactgggaggcagagaagccggtaccctggggtgggtgaggggacggaggctgaggacggtgggagcgtcgcggtggggtgagggcaggaccctgtggaggttccagggctcctggccagggggcccgggcctcacgggctctttgtgcctctccagctcggtagcgcggcgggcaaggcaggcgccatgaccctgattgaaggggtgggtgatgaggtgaccgtccttttctcggtgcttgcctgccttctggtgctggcccttgcctgggtctcaacgcacaccgctgagggcggggacccactgccccagccgtcagggaccccaacgccatcccagcccagcgcagccatggcagctaccgacagcatgagaggggaggccccaggggcagagacccccagcctgagacacagaggtcaagctgcacagccagagcccagcacggggttcacagcaacaccgccagccccggactccccgcaggagcccctcgtgctacggctgaaattcctcaatgattcagagcaggtggccagggcctggccccacgacaccattggctccttgaaaaggtaagtaggtcaagagg

SEQ ID NO: 11474 - DNA, 6000 bp, Homo sapiens
gggagggagaagatggtgagggcctgggaagagtagatgcagggagaccagcccagaggccactgaaggatgaggccagttggaacgggagagtggcaaaggcggtgtggaggagtggctgaattccagacatattttagtggtagaataaaaaatactggctgatggatggggtgtgcgttgttagggaaagtgtggaattcaggatgactctcaggtttggcgctaagcaactgatgctcatgatcgcctcctcccctctaacccatacaaatgccaacagaaacgtgggtttgcatggaaagtttccaagttaatttttttttttttgagacggagtctcgctctgttgccaggctggagtgcagtagcgtgatcttggctcactgcaacctctgcctcctgggttcaagcgattctcctgcctcagcctccccagtagctgggactacaggcatgtgccaccatgccaggctaatttttgtatttttagtagagatggggtttcaccatgttggccaggatggtttcaatctcttgacctcgtgatctgtccacctcgacctcctaaagtgctgggattacattagtgagccaccacacccggctccaagttaatttttaagacaacaaacacaatattagtgctggaaggaacatcaggcattgttaattgaacagagacctggaaggtcacacagcaatttaccacagaactggcacctggtttacagattccttgcttagcgtttaggctaacatgctccatttagcgaggggttaagttgaggtagagaacccatggtttaggctaccgggaagtggtgcttcttgaaagttactttattaaattttaaatagatgctgtttatgcatgacagataatgcgtaggtataaagaataacaatacaagatagggttgtggatctcctccattctggtttaagaaatagagcattatcattctctttgtggcccttgaatgcctctcaccaatcccttttctgacctctctgagttttatcattccttggcttttctttatagttctactgcatggttgtatccccaaatagttgatatggtttcgttctgtgtctgcacccaaatctcatctcgaattgtagtcaccatgtgtggagggtttaccacttcctggtagcctaaactgtgggttctctaccgcaacttgaccccttgctaaatggagcatgttagcctaaacaccaagcaaggggtctctaatacccatatgtcgagggaggaaggtgattggatcatgggggtagtttgccacatgctgttctcatggtactgagttctcatgagatctgatggttttataagtgtttaacagttcctccttcttgctctttctccccctttctcttcctcttttcctccctccatctcctcttccctcctcttttcccacctccctgcccctcttccccacttcctcacttcccccccaccctctcccgcctcccctgccaccatgtaaaacatgcctgcttccccttctgccatgattgtaagtttcctgaggcctctcaagccatgtggaactgtgagtcaattaaacttcctttgtttataaattacccagtcttgggtagtatctttgtagtagtgtgagaatggaataatacaatagtatattgttttgtgtggttttgaactttacctaaatggagtcactgtgtgtcttcttctggtactttcttttggtcaacactttgttttagagattcatctgtattgctgcttgcagctattgttcactaatttttcagaatcgcattctgtcccacgaacatatcagtttatttacccattccaccgtggatagacagctgggctatttgtagacttctgctagttcaagtggcacagctgtggggattctcattcacatctcttggtgtacatgctcaagagcttttctaggatacatgggtaggagtgcaactgctagttgcttatcttcagctttactggataatgccaaattatttacagagatatcatattggttcacacgacctccagtggcacagaatttctactgttccacattcttgtgacactcaatattgtcaaattagaagaattttgcccacccaatgaaagtgaaaaggtacttcatttaggtttcaatttgcatgtcctgggtattgttgagatgaaacatatttttaaatgtttattgccagccatgttcttctgatatgaaatgaaacttcatatccacacagcatatcttggtggccaggaggtgtcatcatcacattttaagaactctgtgtcttttctccaaaacttgttctaactgcagccttccccccctttggtgatgcaactgtccttctggctgctaaggcagatgccttggagccctccctgtctttctctttttctgaccacatccccatgtgataggaaatcctgataggaaatcctcctttcaaaatgcattcagaaaccgaccgcctctcacctcctctgctgcctccaccctggtccaggtcactaggctctgaatttctgcaataagtcttcctcatttgctgtccaggccctgagcagcagtcagatcacatcacacctgtcaataacccacagtggctcctaacctctcccagaataaaagccaaagccgttacaatggcccatgtggtcttatacaacagcgtttagggatgtgggaaagagggtgttggctggggtgatggaggtgaccaggtcacctatcttcagctgggctggggcttatgatgcagtggccagtggccattgagggtccctagggtccgtaagaaagggcaagtcctaatgtacaagcactttcctatagttttgtatttttcaatgtcccactggctagagcaggtcacccagccaggctgattccagggctggaaagtagagtccatttcttgctgggaggaaggacaaagccagatggcagagggtgagcgtatagggagtggtgagtacgtggccattgttgaagttgactaccctgggttaagtgttacaagtaccagtggtgggtaaacctctagggatgattgcataaaagaaaatcaaaaggtctagatggttggagtattgcattaaaaagatgaggaatactacatgcattcactttctggaatctgtgtttaaatgccatacactttaaaatctaatctgcttgccctctgatttggagagaattaacccagaaattatccaggttctttagggctccaagacattctaaaaaataaaggtgaacgttgaatttaaccagttgacagttgttcttggattatgatcaatcagcctgtggcagcagggcacatgctgagaacaagcctcaggttctctaagttctcccaccaccacaatgttcagctatagtgaactcatagaaaccgtgtgtcggggcctccaacttcgccaagcaccataagaagtttgagttgtgaaaaaattttctctactcaaaattgtgaagagaaacggcaaggtttaaattaccacatatttgtctttgaagaactttacaacaacttcattgactgttaaatttagattcataaaaatctaaacaacggccgggcgcggtggctcaggcctgtaatcccagcactttgggaggacgaggtgggcggatcacctgaggtcaggagttcaagaacagcttggccaacgtggtgaaaccccgtctctactaaaaatacaaaaattagctgggcgtggtggcgggcgcctgtaatcccagctactcgggaggctgaggcaggagaatcacttgaacccaagaggcagaggttgttgtgagcagagatcgccattgcactccagcctgggcgacaagagtgaaactctgtctcaaaaaaaaaaaaaacaaaaacaaaaactaaatgacatttgaaagcaatttgtagattttcacacttcctaagaattctcaaagatgccaaaaacaaaaatcgcagccactagcaatttaaatgacttcctcgtagccaaataaatcctaaggtaaaattataaacattcccttaaattcaaattttataacaaaaagaaagataatagggaacggagggtgaattattgtgtttgatatatttggcggtgaaaaatacatatattacgtgctgtttagggtccactgagagtcataaaactgaccctagtgaccgagctaccggaaggacttggcaagggtctagcgagctcggttatctgcgttttccaggtggggcagcccaagacccttctcagacccagagaagctgggtttccgcccaaagcccggccccaaaccaccgatttccgacctttcaacctactttggcagagcaagagtttccgcgggagactccctgcttccctctgcccaggtcccctgaggccgagtgcggtactgagtgctgagtaaggggtgccgagtgccaagcactgagtaactgggggaggggaaccatgcagctgtcataaataattagctcctgtgaggaacaggaactccgagactgcggccgggccaggtgggcagaggtcgcagcgccctcgccgcgttccccgtccccatccgacgccaggacagcgcctccttaactggggtagcccctgagagcgtgggcggagccccgccccgcgacctcaaggccccgccccctcagcgcctcccggcccagcagctcggaagaccgcgaggcgcgcttttctgacgcatcggcgcctttcgtctgacgtatgcctgcaccgccccctcccctccctgccccgcccccgccccgcccccgactgcgcggcgcccgccctcccttagtcagagctgctcgtctgaggctgctgaggcgacggccggtgtcgtggtcgcggtacctgttccaacacggctcgcgggcccgtgccggctccggtccccggcgcggctgtccgagcccctgcggcgggcggacgatggtgtggcggagcacgcggacgcgggcggcgcggcggcgggcatgaaggaggatggaagggcaggacgaggtgtcggcgcgggagcagcacttccacagccaagtgcgggagtccacggtgcgtggggaccgaggcagccctgacagtcccgcgtgcccgcccgggccctccgtccccgcccccgggcccccggtccccggacccctcacctccgggcctcgcctcgcgcctcccgccccggcctctgccgctctccctccccacccctcctctcccctcccctccccttccctccccacctctcctctcccctcccctccccttcgcttcctctgcctgcccccccgctccgctcttgcctcccctgccccctcgcgctccctccgttcgagccccgaccccgcccccgccccgcggcctcggtgctgcccttcccttcccgcggggagggctgcggtgcgcgccgcgctctgggaccccaggggcttcctctctgggcgggtgtgcggctcgcgcctcggggtgtggacggcggccccgccagtgcgcgcccccgcgctccgccgccaggccaggtaggcaggtggatgcgcaggcgtcccggagagcctgggtgggcccggcgggtccgggaagggccgggctgcgcggagcccgcccgcctctcgcgtttggacccggccggttaccttgtcccggtcaacacctcctgccctcctggcgcctcacgtttccatccctctttcatctcccccagcccccacgtgggttgagttcgaaaccttaccgtttgggatgagaatattggttatttttgggagtgaggacctcagcaaaagtccattttgctatggaagcaacttcttagggaagcagcttcttttttggcccatgttccatgtgtgctgttggcaggagtcaggaagcggacttgaccttggaaagtctactttgatgtttttatcttttcatgatgctctagaatgtattgtaattgggtttatctgtgttttcataactgttgtaaaata

SEQ ID NO: 11475 - DNA, 6000 bp, Homo sapiens
ctcatgaagccattcctgatcaagcggagactcagcatctcccacagagaatgttaaatgggaagatcagagccccagccttcaacctgaagaggagaatgccacgcaggagccggtcagtcctgtccacgtgatgtgggcctttgggattcaaacaaagcctgctgcgccccactgcaccccagggttctcatgccagccctctcaagattgtttcttagaatcagaggcccagccaccccatttgaaacactttctggtcctcgttaaggactggtcagctctgatgtaacccagagcactgactgacacaaaaccattggattggccaacagtttcacctttgtcaccagtgggcaacgttcacgttcacgatcacggagctggtgcagcgttcatgatcacagagctggtgcaatgttcacgatcacgttgctggagccgcgttcatgatcatggagctggtgcaccgtaggactggaatttgagccctgaccttctgtgtattcccctggtacacatcactgttgtcccattcgaccggacacgtctggcagataggatgcccttgaaggaacatgcgtgactcaggaactgtttgacacaggcctttcgaccttgaaaatcttggaatcttggaattaatccttgtaatcaaagaataacccatgattacaaatgtgagggatatgttatcactgcattgaaactacaaggttgcactgtatacagaccctggcatgctatgggcatacagcgtgcatatcagcaagtgtgacaatgatgggttaatttcataagtaggaaggcacaaagcataaatgtatgtaggagacattccccctaaagggctgggagaatataagagcatgtttgaaagctgtacatgtggtacaatgttcacatatgtgccttgtacagcattcaaacgtgttcttacacagacagacacagacacgcctctgcacctgttgggtcaagcagtaagaatctaatggtgaccacctgtctggccagaacggtcttccttttggattagaagtctgggctatatcagctggagttctggaaccagccttggtttggtaaacaacatttttcttcctctctccaccctttgcatttcctttccttgagtttccttttttttttttttttttttgagatggagtcttgctctgtcacctaggctagagtgcaatggtacgatcttggctcactgcaacctctgcctcctgggttcaggtgattctcctgcctcagtctcccgagtagctgggattacaggtgcccaccaccacacctggctaatttttgtattttagtagacatggggtttcaccatgttggccaggctggtcttgaactcctgaccttgagtgatccacccgcctcggcctcccaaagtgctgggattacaggcgtaagccactgtgcccggcctcctggagtttattttatccagtgttgacctgccccctctcggaacctgggttagcctgcctggtgcttgaggcagggagctggccacgctgcgctgctgtcttgtaggtgcttctcaaggtgctttttgttgtgattcctccagtgcctctggttttcgctttcccttttcttggggcttgtttgtgtttaaccaaagttcagggcccttggggtaaaacaggaccttgttcaggaaactaccattaagcaagcagcaagtcaaacaacgaaagtacaaacaagcccaggcccctcccaagatacacagtcctccaggatgtaggctccagactctgggtccttctccacgcccaccgttcacgccaagggatgcggcagtccgacggcctctgggaatcgcagggccttggtcttgggagctgctctcctgcagtgtaaactcagtgactctcattcaggcaacagacctctccaggtcgtccttgttcaggcggagcacttggttcctcagacccccatctgtaccagagaaatggcgttaaggcctcacaaagtagttttcactgaagagaatcccgtgtcctacccttgtgcgtccgaatcacctcacggacctgtcatgaagaggctctcccttctgcgggctcactctgacctttcctttcccccgtggtttccatcactgactccatagtcagatggctcaggacctcccaggacgcaccggcccatcgaaccatccaggggtgccgctgttcccagcctcccgacacccccacacggacttctcttaccacctgtgttaggccattctcgcatggctgtagagtaatacccaaggctgggtaatttgtaagaaaagtggcttaattggctcacagttctgcaggctgtactggaagcatggtggcatctgcttctggggaggcctcagggagcttctgatcatggcagaaggcaaaggggagcaggcatgtcacataggatgggagagacagggagagagagggagagggacagagggacagagagggagatggagggagagagaaggagagagagggagggagggagagggagagagttagggagagggagagagggagagagggagaggcagagaggaagagagggagagagtcggggagaggcagagagttagggagagagggagagagttagggagagggagagagggagagggagagagttagagttagggagggagagagttagggagagagggagagggagagagttagggagagagagggagagttagggagagagttagggagagagggagagttagggagagagttagggaaagggagagagttagggagagagggagaggaggagagttagggaaagggagagagggagagggagagagttgagggagttagggagagggagagagttagggagaggcagagagttagggagaggtatcacatggctttaaatgatcagaacagggagtcgcggagctcactcatcaccaaggggtggctcaagccgttcaggagagatcctccgccatgctgccattgcctcccaccagaccccacctccaactccaacactggggattacaattcaacaggagattagggcaggacaaatgtccaaacagtatcaccaccaagcccacatttggggtgcgcctcgctgtgggcttacagcctttttcctggatggatattgctgggggggggggttgcatttgttttgaggcaagcgctgctgtgttaaaaattagagtctagtctactacaaataatgagtcagaagcagccccatctatccagtccttgctgccatccttctcccaaccagcggctgtttttgtaggatccgcaggtttacacacgggcctgactttgtaggagggaagggctgcccgggagctaccgtgacctctatgctgccgcattctgcaagaaggtgctttctacggggaggtggtcccctgggcgtctgggtgtgaaggataagctgccacccaccaccccctccgggcacaggtggctgcgacaaacaaagaggagctttcttgaaggatgggagggtgaggggccccagcaaggagatgacggaggtctgaggacagaggtgtccgtgaggagggcacttaagacagtcagccccaatatccaactctgaattgcagatgtttgggctacgatggaacctccccgctgccatcccagcccccattcactgtccacaggtgccagccttgcccaggctggtaaggggcgcggaaggcatggccctggtggccaggcatggaggagaaaacccacagggcgccgagcagatgtccttggaatgagaacgtggcaggaaggcacgcgggagggctcaggcctctctgtccaaggcagaagcaggtgcggaggttgggggcccaggtggggtcgccaggacagggacccggcagggggtggtcctggggtagcgtgtgagggaggtgggctgtggagaagcgcaggctccctcccacccggaggcccctactggccccctttgtcttaggacctcttggaagtggcactgtctcctgaggaggacacgcgacatcccccaggaccccgggcgggacggcggcgaggagaccaggcccgcaacaggcctcaccctgctctgccccagagcccgcctggccccagcccacgccctgggccctccgggagctttcctgggaccgagcctgggcgccgcccgcgctgcaggggaggtcgactgggtccacctccgcgcgccccgatgcgcaagtggcccgttacgtttaaattaaagaaacggttggaaggcgttaattcgacgcgcgcggggccccgcgggtagaggccgcctgcccaggtccccagcagagtaggttcgggccttcccgtccgggccaagggcgcggcttaggcccccgccgtccccagggacagtgcgacccccagcaccgggccgggcggggagcggcggcaggcggggaggggatcggagggccaggcggggggcaggaatgcaggtgggaggggacgcgcggggcggggggcggacggggcgttccgagcggggaggggcgcgagccggggccggggagtccagggccgggcgtggggctccgggccgcggcgcctgcgagtggggagggaagggagccgggcgggcggggggcgtggccggggcgagcggggctggccgggggcgtggcctgagggcggacgcgcgtccgggggcggggccctgccgccgggggcggggccggggcggggccgggcgctgtccggtgctgaagctcggcccggcgtcgccgcaagagcgcgagaggcgcggcgggaggagccggcggcgcgcgcctccctgggcccggactcggccgcctcccgccgcctcccgcgcggccatggactgagcgccgccggccaggccgcggggatggggccgccgctcccgctgctgctgctgctactgctgctgctgccgccacgcgtcctgcctgccgccccttcgtccgtcccccgcggccggcagctcccggggcgtctgggtgagtggggggcgccgggggaggggcgcctcaatgaattagttgggggcgttgtgagaggggcgcctccgtgagggggtctgggtggggagaggcgccaccctgaggggtcggggggagaggcgcctctgtgaggggttcgggggggaggggcggcgcctcagtgagggggttgcggggaggggcgcctctgagtgagggggcatgcagggaaggcgcctcaataaatgagtgggggcgttgggggaggggcgcctctgagaggttctgggggagggacgcctcaatgaatgagaggggggcgtggggggaggggcgcctcaatgaatgcggggcgtgggggaaggggcgcctcaatgaatgagtggggggtttaggggaggggcgtctcggtgagtgacggggcgggtggggaggggtgcctcagtgagtgagtggggagcgcgccttggcgagcgggtcgggggctccgggggtctcggggttccagcgcgacacccccaggctctgggtctcaagcccccggccacgggtcgcgcgcctctctgtcctcactgggggctcggagcaggtctcgcgcccctgcctcagtttcctccccggcgccgcctcctgcctctaccccggctcctgggcctcacgccccgagccccgccactcggcactcccctggccctggagcgcgcggccctggtccggcgtgggtgcgccccccgctcgtgttccgccgcgtgtgccgcgaggggccgggcctcggatgtcccgctgcacccgcttctacctgcgtcccccgcacccccccgcgggcagcgccgccgaaatcagaggacatttttcctccgtggcagccgcgggaggaaagggagggcggcagcttcacggcagcgagggagtggaagccgctgctttcccaggcggacgcccctgttttaaacccataaaacctccagtccccggcacctcctttcctgctaatcttgtttattaagaagatttaccat

SEQ ID NO: 11476 - DNA, 6000 bp, Homo sapiens
gagacgggtttcaccatgttggccaggatggtctcgatctcctgaccacgtgatccaactgcctcggcctcccaaagtgctgggattacagtcgtgagccaccgcgcccagctgcctccttttataaggatacatattggattcagggcccaccctaagccaggatggtcgcatctctagatctttaccttaattatatctgcaaagacccttattccaaataagattgcattctgaggctgcaggtggacacatctgggggccgctatgcatcctgctgctgtttaacagacctgccgagagatgacctaaaccccagggatcagctaggtaaaagagcaggcatcctaaaacaaaacagaacaaggtgccacccaaatatccctgtccctgcttcctcgtttctcttgaaagacctgtctgtcctgcctcgctctacctgcctcctctgttctctccagaacccatccttaccatcctgccaaaataactcccaccaaggccgctgtcgccgcgactcactaaagccctcactaaagcccagcaatggctctgtggccaggctgcaccctcctgtcccctaacgtcctccccaatcctgtaccctctcatcccccaccattctccccacaaatcccagctacttgggaggctgaggcagggaactgcttgaacctgggaggtggaggttgcagtgagccgagatcgcaccactccactccagcctggtgacagagcgagactccgtctcaaaaaaaaaaaaaaaaaaaaaaaaaaaagaaggccaggtgaggtggctcacacctgtcatcccagcactttgggaggccaaggggggaggatcgcttcagcctaggagtttcagaccagactgggcaacatggcaagaccctatctctacaaaaagttaataaaattagctgggcatggtggtgggtacctgtagtcccagctactcgagaggctgaggcaagagaatcacttgagtccaggagtttgaggttaccatgagccgtgactgtgccactgcattccagcctgggtgacagagcaaggctctctctcaaaactaagcaagcaaataaatacatacataagtaaatgaaacgctcttcagggcccagcatgcatgtctgcagtctacagtgagttcaaaccctctgtcaatgctgggagcatctgtgtatggattttggattctgtgtattgggaaatctggctgagttcaaactctgtcaatactgggagtgtctgtgcatggattttggattctgtgtattgggaaatctgcctgaaatctgttacagctctccggcaagttcctttcaccactccccacagtctcacacactgaaaccacagcaggggccgccctcactcaccgcaggggacaaccacccaccaaaaaccatttcctctgcggatgcttcccgcccaaagaaggaaccagaagcaggcaggatggggaagcagctggtggagaagccaaattgtttccttaagagaaagggatttacgggaggtggaggttgcagtgagccaagatcgcaccactgcactccagcctgggcgacaagagcaaaactctgtctcaaaaaaaaaaaaaaaaaagagagagagatacggatttcctgagcctccaggaggtcggctgggtaattttccttcgtccgactctctccctggccattgcgtagccacctcatccagatggcacgaagcctccgggctcgggtttctgactcgtctcccaggagccggtttctgtttaccgctgaaaggcacgcctgctgccaaatttgaggtgtgagctcaccgagaaaaaagcactgtgctcccccgggagctttgcaaaacgggccgctgctgccctccgttctgcagcagagatggtggccttgaagacagcgagcctgcctacggggtcgctgcgtccggtctcactccagccaggctgccggcctggcccctgcctccgtttcccttgctttgaaatgtcagtggctgcactacctgctccgtcctgctctgcagtgctgggaagatgggaaaagccttaggaactgaagcccagcctgttgtccaatgtcctcttctgaaatgaggacagttggccaggccaaagaaaacagacccaagctgtgtttcgggagacacagaagccccccagactctcctacctgcttgttcttgttcctcccttaacccactccacggaccggggccttacggggaggccgtactggccccagggtgggcagggtggaggccagcctttttgggggcacgatcctagtatttgaatgtccatcttctctagtgacagacccaggcggtgggttctggcacggccatctgccaaaatctttcccccaaacagatgtgtctgtttaaaaaggagatctaatgcaggcttttagcagcaatgtaaggtccatcagagttaatgcttggtttaaaaaaaaaaaaagtagtcagatgtggtagagggtgcggggggacgctgaggcagaggatcgtttcagaccaagagctcaagaccagcctgggaagccgggcgcggtggctcacgcctgtaatcccagcactttgggaggccgaggcgggcggatcacgaggtcaggagatcgagaccatcctggctaacacggtgaaaccccgtctctactaaaaatacaaaaaattagccaggcgaggtggcaggcgcctgtagtcccagctacttgggaggctgaggcaggagaatggcgtgaacccccggggggcagagcttgcactgagccgagatagcgccactgcactccagcctgggcgacagagagactgtctcaaaaaaaaaaaaaaaaaaaaaaaaaaaaagaccagcctgggcaatatagtgagactccatctgtacaaaaagatttaaaattagccagacatggtggtgtctgcctgtagtctcagcgactcaggaggctgacgtgggagaatggcttgaacatgggacggcgaggctgcagtgcgctatgatcataccactgcgtgatcactccagcctggatgacagagcgagaccctgtctctaaacaacaacaacaaaaagcaaaacaaaaaggaaaaaaacaggagttccagaccagcctggccaacatggtgaaaccccgtctctactaaaaatacaaaaattatccggatgtggtggtgggcacctgtaatcccagctactcaggaggctgaggcacaagaattgcttgaacccgggaggtggaggttgcagtgagccgagatcgtgccattgtactccagcctggataacaagagcgaaattgtctcaaaaataagtaaataaataaaggccttattggccgggtgcggtggctcatgcctgttatcccagcactttggggggctaaggtgggaggatcacttgaggtcaggagttcaagaccagcctggacaacatagtgagacccccatgtttacaaaaatataccaaaaaaaggccgggtgcggtggctcacacctgtaatcccagcactttgggagcccgaggcaggcgaatcacgagatcaggagttcaagaccagtctggccaacatggtgtaaccctgtctctactaaaaatacaaaaaattagctgggggtggtggcaggtacctgtaatcccagctactggggagactgaggcaggagaatcgcttgaacccggcaggcagaagttgcaatgagccgagatcgcgcaaatgcactccagcccaggcgatggtgagagactccgtttcaaaaaaaaaaaaaaaaaaaagccaggcgcgcctgtagtcccagctactcgggagtctgaggtgggaggatcacctgggccggggaggttgaggttacagtgagctatgactgcgccactgcactccagcctggacaacgggagggagaccttgtctcaaaaaaaaaacaaaagagcaaaaaaggtgaacatgattgtatgtaaattacacttcgttttaaaagtgcaaagaacaaatcagtatttgcaagacgcggtgcagtccccagcacggagaagagaacctgcgaattccacgcgggaagagccggcgtttccatcagcaggggccctgcaggagacctcgcgtgcagaccccacacattccccagaagggcgcctggggaggaggggccgcgggaggagcccggcctgcgagcgcctgcgcacgcccggagcggcggggaattggggtgggggcggcggccagcaatgggagacgtgcggaaggccaaggaggcactggccgaggtgagccccgtcggaagtgggggctgcctcccggagccgcagctgcccctcccccaagacgcggacgccctcctggagattcagaccctctcatggagatgcagacccctcccccggatccaaacctctccccaagatgcggacgccctcccccagatgcacacacctttccgaagatgcagacccttcccccagatgcagacccctccccaacgtagaccgcgtatctgaggggcagagccctccgcgatgcagacccctcccccaggtgcagacccctcccccaggtgcagacccctcccccaggtgcagatccctcccccagatgcgggcccctcccccagatgcaaaccccccccagcaggtgcagacccctcccctaaatgcggagccctccctcagatgcaggcctttcccccgaatgcagtccccctcctccaggtgcagcccccataccgggacgtggcctcgcccgtcccaccccgtgacgcatccaggcccctccccctccctccctctccccctccccttcccccgcctggagtcctcctcgcccctccgcccgcggcccgtagccgcctcgtcattggccagaacgcttcgggtggcgcgctcgggactggtgaaggcctgcgttgctcccgccctcggcccggggcgcggcccgcgattggctggcgtgggcagagcgtcttctcgggcctgggcggcgcagacgaggcctgaggcggcggcgcgaggcaggtgagctcccggcgggccgggccaagggcaccccggggcgggcgccgggctgcggggacgcgaggcgggggcccgggggccggggggacgcggggtcgcggcctgggcgccctcagcgcgggctgcgccagggcctcctgggccaacggctgccgcccccgcccgtcccgcgccccgcagctaccccggcccgcgcaggtgaagacgcccggagaccctggcggtcgtggcgcaggggtcctgctcctccccggggtgtcgccagccggctcgtggcgcggggtcgggggcggagcggggagaggcgcgggaggccgcggcgggcggcccgggctgggcgtggaggagcgtcctccccgcgttctcaggcctcggcccgggctgcccgcctggaccccgttgcggggtcccagcccctggaagtagcggcggggccgtgggtggggtggtgggaagacggttttatttaagagggggggtctcgctgtgtttcccaggctggtctcgacctcctgagcgcgagctatcctcccgcctccgcctcccgaagcgctcggatcacaggcgtgagccaccgcgcccggctgatagtcgtattttttgtagggttgtggtctctccatgctgcccaggtcggactcctaggctcaagcgatcccctcgccccagcctgcctggaggcgcgcgcgtggtctccgcgccctgttgcgccttcaaagtgcccagaatggtgtctggtgcaaaataagcagcggcggggaacaccttgccactgtcaccgtcatggggaggatttctcccggctccccagggctccccaggacaggtgggcggtgcggtccgaggtctctgctctcgctttgcagcttgtggttgctgcgtctggctctgattccgggtgggaagctgcccataattgtgtcttctaagcttcagtcatagtattgcccatgaagtgcttgcggctctaattgctaaagctt

SEQ ID NO: 11477 - DNA, 6000 bp, Homo sapiens
aaaaatacaaaaattagccaggtgtaggggcgcacacctgtggtcccagctaccccagaggctgaggtgggaggatcgtctgagccctgggaggtcgaggctgcagtgaaccaagatcgcaccactgcactgcagcctgggcaaaaaagtgagaccttgtctacaagaaaaaaggaaaagctcagaggagggaacgaaccttgtttgagccccagcaatcaaggtattgcaggtatttccacccggatccccagagcctggagcagtgcctggcacgctggacatgctccgtttatagctcgaagatgaatgaatccagctaagtaggtcttattatcctcatctgacacagagaaacagactcaaggggtcacagcccttgctgaagcttacgtggccgtgttcgcgttatctgccgctgcataacaaagcaccccaagcttagcagcagtcattacccgtgaacttgcacttgcacttgggcagggcttggtggagacattccacgaggcctgggccgggttagctccacttcggactggaggatccactcacgatggcacacgtggctggcaggcaggtgggctcagtgtcatgtggaagcctggccacggttccgtgggcctgggttcccctccacatgggcccctctacgagctgctgggcttccccacagcatggcggctgggtccacggcacaggtgtcctggggaaccaagaggaagctgcatcactgtttgggatccagcctccactgtgaccacaagtgcccacccagattcaaggagtcaactaaaggaaaattttgctttcgaagaagtaaagttagttttattcagattcctattgagcattgcaatccgggagggtgtttcagagtttcagttcgactgctccaaagcaatgtttcgggcctcagcttatcaacgggtggcggaggctctgcacctgctcagggggtaccttagagccaaatgcgatcgtcaaagtttcggtgcaagagtccatctcgtcatagattacagccactgatcctgtcagacgttatcttatgtgcaggaggagacaagggctaggatcgttgaccttatctttttaaaaaacgcagtgatttggccgggtgtggtggctcacacctataatcccagcactttgggtggccacggtgggcggatcatctgaggttaggagttcaagaccagcctggccaacatggtgaaaccccgtctctactaaaaatacaaaaattagccgggcgtggtggtgagtgcctgtagtcccagctactcgggaggctgaggcaggagaatcgcttgaacctgggaggcggaggttgcagtgaactccagcctgggcaacagagagggaaactccgtctcaaaaaaaaaaaaatgcagggattcaagcaagagccgtgggcacctgcgccatgcctgctcagtctctgggacattcttccagggggcgcgcccagtcactgaggcagggcgcacacttttttccgcacagttgcaaggatgccttaaactaaatttctggaaaccgggtcactgagccaagggacagttcctttttgatgtctggtggatctctagtacactgcaaaagcgtcccgtgaaactccactggtggaatgagcaaacacggcttctggcctctgctactttgtgtcacaaagggggaagaccacaagccctcctgtggagggagaagcgcagtgttacgttacgcaaagacagtgtggttgggagaatctgtgcggccatctctggaagccgccatctgccacagccgacaggtgcgggcctgagtttggaaccaggtctgtctgactccagcccctccgggggagcccacctacccacccacctcacccaccctgcctctgatgtcaggggcaggcaggacctgagccagccaatcacagcactgcattcctcctggtcacagagatggctcaggcctgagtatctgtctggcaggcctggaccaatcaggtctgatcagaacagtcccaagttccacttgagcagccaggctgcagttggcacacgtctctgcagggcgctggaggtccaccggacatcagaaagcaacaatgccttggctcagccacctggtttctaggaatttattttaagatatccttgcaactgtgcccatccttgcaagtatgcacacagatatttttatcaggatgttctgtgacagcctaagattggaaacaatgtaaatatgcaaatatgcacacccggccatgccccccagagcaagcaacacgtacaggcagccgttagaggagtactgttaattccccagtaacagttactttttttttttttttttttttgagatggagtctcactctgttgcccaggctggagtgcagtggtgccatctcagctcactgcaagctccgcctcccgggttcacgccattctcctgcctcagcctcctgagtagctgggactacaggcgcccgctatcacgcccggctaattttttgtatttttagtagagatggggttttgccgtgttagccaggatggtctcgatctccatctcctgacctcgtgatccgcccacctcagcctcccaaagtgctgggattacaggcataagccactgcgcctggccaacgagttacttttaaaagagggctgggcactgtggctcacgcctgtaatcccagtgctttgggaggccaaggcaggtggatcacttgaggtcaggagctcgagatcagcctggccaacatggcaaaaccccatctctactaaaaatacaaaaattagctgagtgtggttgcatatgcctgtaatcccagctacccgggaggctgaggcaggaggatcacttgaacacgggcgatggaggttgcagtgagccaagatcatgccactgcactctagcctggatgacgagagtgagactccatctcaaaaaaaaaaaaaaagaaaagaaaagaaaaagaggccggcccggcattggctcatgctagtaatcccagcgcttttggaggcggccacagtaggatcgcttgagcccaggaggagttgaagaccagcctctagactccgtctctaaaagaaacttacaaaattcccagcactttgggaggccgaggcgggcggatcatgatgaggtcaagagatcgagactgtcctggccaacatggtgaaaccccgtctctactaaagatacaaaaagtagccaggtgtggtggcatgtgcctgtaatcccagctactcgggaggctgaggcaggagaatcgctccaacccgggaggcggaggttgcagtgagccgagatcacgccattgtagtccagcctggcaacagagtgagattccgtctcaaaaacaacaaaaacccaaaacttaaaaaattaggccaggtgcagtggcttacacctgcaatcccaacactttgggaggtcgaggcaggaggattgcttgaacccaggagtgtgagaccagcctgagcaacgtagcaggacctccatttctacataaataaataaataaagttagctaggctgggtggtgcatgcctgtagtcccagctatttgggaggctgaggtgggaggatggcttgagccccggaggtggaggctgcagtgagcctgtactcacagcacggtaatccagcctgggcaacagagcaagaccctgtctcaaaaacaaaacacacaaaaatcaaaagtattccctgaattaattaagtaagctttgctaggcaggtaggacccccagcctacccagtagtggccctggtatgaggcactccctccccgccgcagccgcccagccctggccctgaggctgtacagcaggatagaggtagtgagctccccaccacaggaggcgtgcaactgtgcctggggctttccctcccagctaatcaagggggaccaacccgggaggggtgagggcctcaggctgcctcggctctgcggttcgtacagggcatgggcaacgccccagagacaggctgtggggagggtcccgcctgctggcaccagctccagctgcctcatgtcagggcaggctgtgcaaagcaggcccggccgcttctgctgccagcagccctcccacccctcacagcggtttaggagacagatggacagggctcgtaaaccccgccacctgccacccggcagcccttccatgttcctgtcctagctcagagggttgcatcccctgcccgggcggcagccctcgaaaaggagcaggctgctacctggggcgagaacaccctcagggagatgcaggtggtggcctgtgaggactgtgggatttgagtcccctcatgggcctccctgaggtctcactcctgtcccttgccccgtggggagctgatcagagaagagctgggtgcacacggatggggtttgggagaggcctgcaaaccctgagctccacagggtcccactcagagcctgtgaaaggcagggggctcccctccaagccagggcctcggccccaaagccctgtgaatcccagttctgaggggtggccaaggccaaggggcctggactggcaggttcagcagaaccaggggcagaacagtccacgtgccacatccttctctctggccaggagacatggatgcctgaccccagagggcccccgtcctgccctcccctccccggccccaccagggcctcagccccacattccacgcaggcctgcagctttaagccatccgctgggggctgccctgcaaactgctcgttccacattctcggggtggtggggtgggtggggtgcgggcacgccctcccgcggaggcctataagggtgcgggggggacggggcccaggaggggagtggagcctcaccagccacgtcctcatggccctgctgctcttgctgttcctgggcctcctggggctctgggggctgctctgcgcctgcgcccaagacccctccccagctgcccggtggcccccggggcctcgcccgctgccgctcgtcgggaacctgcacttgctgcgtctgtcgcaacaggaccggtccctgatggaggtaagtcagggagcccgggcagctcttgccgcttggacagctgccgtgtcctggcccccctcctggggaagcccagcccggtttccactgcctgttcccacatggtgccgggcccagcggggcacgcaggaggccggagggcccaccctgcttttgggaggggaaagccaccccgtcccacagggaagcagacacactgagtacgaagaagccctggaggtgccacccagggcccggcgcgggagcaggagtctggagggctccctggaggcggtggcgtctgctgagagcccgcaggaggccaggcttagggacagcagaggggaggagggcctgggcctgtcggctgcctgctcagcccccctcggccctcaggtgttcaacagcaaacacttcccacttttgagcctctgtttcctcatctgtgaaatgggaagaggacctgtgcctcctgggcagggatgctgaggacagagggtacggggacacggcacggggcagcctgactagcactgtcgctctgtcctcgctcaggcaggcagggtcagtgggacagggctgaccagtcaggcccgggccctgcctccggctgcccccaactgcgggctggggtgctgctggccgggctgtagccgaagacggatcagggtctctgggggccgagcctgtcaggccctcactctgtgcagactctggcctttcagaatgtgccaccccagcagacagccagcccccgaccttgccgcctggactcagggcttgagccccccaggaattttggctaaaaagaaaatcccacaacagccatgccaagcaccagatggcgagagggctctgtgggctccaggctgggcgctgccccctccaccctgcaccactggctttatggcatctaggcgtgccccctccacctgcccccattttccctctgtccccacccctacccagcacaggcccggcctgaggggac

SEQ ID NO: 11478 - DNA, 6000 bp, Homo sapiens
gcattatgcagagaaagaaatggaagtccaaggtcatgcagtggctgagtaacagcctcagcacccagccctgggttcctaccacctccctcttacctgacactgcccaaaagaatgcagtgaagaaagacagggggcctggcacggtggctcgtgcctgtaatcccagcactttgggaggccaaggcgggtggatcatgagatcaggagatcaagaccatcttggctaacatggtgaaaccctatctctactaaaaaaacaaaaaacttagctgggtgtggtggcgggcgcctgtagtctcagctactcgggaggctgaggcaggagaatggtgttaacctgggaggtggagcttgcagtgagccgagatggtgccactgctctccagcctgggtgccagagtgagactccgtctcaaaaaaaaaaaaaaaaaaaaaagaaagaaagacagggatggggtggggaggagtgagctcacagtgaattaggagggctcctcagtccattctcttggatttattttattattttattttattgtttttgtacagacagggcctcaccttgttacccaggctggtctggaactcctgagtgcaaatgatcctcctgccttggcctcccaaagagctgggatcataggtgtgagccatcgtgcctggccctcttggatttgcttttcttttctttttttgagacagagtctcactctgttgcccaggctggagtgcagtggcatgatctcggctcactgcaaccttcaccttccgggtgcaagtgattctcctgcctcagcctcccaagtagctgggattacagatgcctgccaccacacctggctaatttttgtatttttagtagagatggggtttcaccatgttggccaggctggtcttcaactcctgacctcaggtgatctgcccgcctcagcctcccaaagttctaggattataggtgtgagccactgtgcctggcccctcttggattttcatatcatctacatggttaattgaattttcaattcacagaccttgttttgttttgttttcatatcctgttaatgatgcttatatggatcccagggccagaggtcatcaggatctccccgcagcagcgtggccaacgtagcgagacctccatctctacaaaaaaactaaagaaattagcaaggcatggtggtgtgcacctgtagtcccagctactcagggagttgagcccaggaggctgaggctatagtaagccatgatggcaccattgcacactccagcttgggtgacagagcaagaccttgtctctaaaaaaagaaaaaaagaaaaagaaaaaaaaacaaacaaaccaaaaacaaaaaaacctcccggaattccatagctgttactatcagtagcagctaatgtttcctggctggcctcttgcccagaagccacagttaccgcttttcctttgttgcaaccctggctatgaaaccagaaatagttgttgctggtagagacactgaaatacctcaaagtaaaacccagaggttgggccaggctgtggtcagctccggggagaccacagactttgcagaggggcccagggtccctgaagatgggtggcagccaatggagctgctggggagggggatgggcagccagccagaaggagcctggagcctagaagaggaggagataaaaatcatcacagtgaggtgtctccagggccgagctgaggccctggcccaggaagtctcaaggctgtagcgtggctccatctttggggtccacaatttggattcaggtcctggctctgtcacttacacagctctgtgtctctggctagttggttaccttctctggtcccctgcttccttatctgtaaaccaggagataaggtatagccactgcagagtgggtaagtaaaatgtatctgcatgttgctgatgtaagaggcgaagttgccataaagtaaaagtaaccatttgaaagtgaacaattcaggagcatttagtgcattcgcaatgctgctgacgtaagaggtgaaattaacataacataaaagtaaccattttatttatttttatttttttattattatttttttgagacggagtctcgctctgtcgcccaggctggagtgcagtgacacgatctgggctcactgcaagctctccctcccaggttcacggattctcctgcctcagcctcctgagtagctgggactacaggcgcctgccactatgcccagctaattttttgtatttttagtagagatggggtttctctgcgttagccaggatggtctccatctcctgacctcgtgatcagcccgcctcggcctcccaaagtgctgggactacaggcgtgagccaccgctccgggcagaaagtaaccattttaaaatgaacaattcaggggtctttagtgtattcaaaatgttgctgatgtaagaggtgaagttgacataacacaaaagtaaccattttacttatttatttatttatttattatttttgagacagagtctcactctgtcacccaggctggggtgcagtggcatgatctccgcttccagcctccacctctcaggttttttgtttgtttgtctgagacggagtctcactttgttgcccaggctacagttcactggcgcggtctcggctcactgcaacctccagcccctgcgttcaagcgattctcctgcctcagcctcctaactgggattacaggtgcctgccaccacacccggctaattttttgtatttttagtagagacagggtttcatcatgtgttggccaggctggtctcgaattcctgatctcgtgatctgcccgcctacacctcccaaagcactgggatcacaggcgtgagccaacaagcccagctgacctctcaggcttaagcgattctcccacctcagcctcctgagtggctgggattgcaggcgcccgccaccaagcctggctaatttttgtatttttatttttagtagagacaggtttcaccacgttggccaggctggtcttgaactcctgacctcaagtgatccacccacttcggcctcccacagtgctgggattacaggtgtgagccactgcacacggctgatagtgagaaatttctaagctgagacaggcatcacagggtgacattgccagaggctgtcaccttatttacatacgtgcaattgcatatatgtatgtatacaacatagacatattatacatgcataatacaggtctatatgtatgtgtacaatatataaacatatatactacatacatacacataggtaacatgtatgcattacacatacgtataaacatattatctactgtgagtgtgtatataatatacacatatattttgtggtggttgtttgttgcttttcccccccactagaatacaggagggcaggggccttgcccgtctccctcacttccacatttccagggcccggtgggttcggaactcctttgggactggctgcagggagtggaagagtgaagagatgaccttggttggaaggctgcctcgggagtccatcggagggggccaactaaaaatatcacggattgaaaaagttcttggggtggatggtggggatgtgaaagtgcttaatgccactgcagggagtgcttaaaaatggttaagatgggccgggcgcggcggctcacgcctgtaatcccagcactttgggaggccgaggcgggcggatcacgaggtcaggagttcgagaccatcctggctaacacggtgaaaccccgtctctactaaaaatacaaaaaattagccgggcgtggtggcgggcgcctgtaagtcccagctacccgggaggctgaggcaggagaatggcgtgaacccgggaggcggagcttgcagtgagccgagatcgggccactgtattccagcctgggcgacagagcgagactctgtctcaacaacaacaacaacgacaacaacaacaacaacaacaacaacaaaggttaagatggtaaattttatgttctatatattttaccataatttaaaaaaaaaatgactgggcctggcgcggtggctcacgcctgtaatcccagagctctgggaggctgaggcaggaggattgcttgagtctaggggttcaagaccaccctgggcaacatagtgagacccccgtttctattaaaaattaaaaattagccgggtgtggtggcacctgtctgtagttccatctacttgggaggctgaggtgggaggatggcttgaacccaggaggtcgaggctgcagtgagctgtgactgcaccgctgcaccccatcctggacgacacggtgagatcctgtctctaaaaaaataaacaaacaaacacacaaaactacattgatgccaagaacaattactgcatgctcactatgcattaggcatcttgctaagctctttacccgtgtcatctcgtttgtctcacatactccctgaaaggtagggtcactaacctattatattttacggattggcgacaacctcagagaggttaagtcacttgcccaaggtcacacagcgagtctcaagccccagccggtgagcatcacgatcctttgccaatgagccgatgctcgagaaagggtcggatagacaacaggcactgcataaaggttggttaacgggatcgtgtttggctgcaacgtggagctcccgggtcgaacggcgagacagctgcgcgtccccgagccgccgcgcgcccggtccgccggggcggagtcaacgccgcggattggctgctgagaaaggggcgtggctcgtggcggccggtgggcggagtcgatctctggccgtaaatacggcgccacatggcactggctcgcgagggcgggggcgggcgggctggccgggcgcaggcgcgctgagggcgggcgcccctcggcctccgtggcccctccggcggccgcgacgtctcgcgagaagacgaccggtaggaggggctcctgcgccgggggcggggccggcgagggctgcctctggggggtccgctagtcgcggggcggcggcggcggctgcgggcgcgaggtgaggggcgcgaggtgagggtcgcgaggtgaggggcgcggcgggcggcgggctcggggcgcggtctccctctctctcggccagtgctgggctcccagggcccgggcgggggtcccgggccgcgctgaggggcgcgggtcggctctccttaacctggcctggcgggcgcggcttgggcctgggttcgagttcccgcgccggcgcgcagtgtgaccttggccctgcgcgcgccctctctgagccccgctcgtcgtcctcggccagggggacccagccctggggccctgatcagcgcgttctgcggctcctcggggtctggacgagaaatctgtggttctgattcagcgacagcagaggctgcagcggccccgccggcccccaggagtccccctgcccggcatcagcctctgccgcccggcaggggtaggaccaattcccgggcttggagttccaggatccccagctcccgagggcccccgtgtgcctgctgtcacctgaacggggctccccggccccgccgaccgcagccctggagcctgcagacgccagcagcaccggcaggtcgctcagggtatcccttaaatgacctctcactccagaagccgcagccctgcccctctgggagaggaaaccgtgcatttagtccgggaacagtgggacttagacctcctctgcgggctcccggccaccgagacaccgccggcaaagccttggctcgggcagaggctccgtctggcaggcagcacaacaagccatagtgtttccagcattattaaattatttagttcataagcggggctgtggggactcggaagccccggggtgaataggaatgtgagttgcaggcgcggtgctggacgcagtacatcttccaggacaccaggccctacggtgctgttcccggctgtgggtggttggggacagctcagcgggtcccccacttacccccacgcggggacccgggttagcccctcaccg

SEQ ID NO: 11479 - DNA, 6000 bp, Homo sapiens
ccacctcggtctcctgagcagctgagactacagctgtgcaccaccatgcctggctaatttttaaattttttgtagagatggggtctcgctatgttgttcaggctggtctcaaacttttggccccaagcgatcctccagcctcagcctcctaaagtgctgggattacaggcatgacccaaagtgcccagcctcctcctactcctgtggacatcctcccttggctttctttgccagctcctctttttctgctggtcccaggaagttggagagcctcagcctcttctctccttatacactcttgctcttcctaaggaattgcatccattctgagtgaccttgcacaactgtaactgcagctttgtggctaaaatttccttctccttcctttgcaaacacgttcccttgaatctgcacccggagattgctgccaggaaggaattgtattaatagatttgcctttgagtctgggaaatgaaggacacgcatcaaaagttcctaccatgccccaagcatctcatgttctcactcttgcaccttcattcatcgggggttgaattttttttttttttttgagacggagtctcactctgttgcccaggctggagtgcagtggcgtgatctctgctcactgcaacctctgcctcccgggttcaagcggtgctcctgcctcagcctcccgagtagctgggattacaagcacccaccaccacacccagctaatgttttgtgttttcagtagagacggggtttctccatgttggccagggtggtctcggactctggacctcaggtgatccacccgcctaggtctccaaaagtgctgggattacaggcatgagccaccgcacccggccctgggttgaatttttttttttttgagacagagtctcgctctgtcgcccaggctggagtgcagtggcttgatctcagctcactgcaagctccgcctcccaggttcacgccattctcctgcctcagcctccccagtagctgggactacaggcgcccaccacctcgcccggctaatttttttttatgtttttagtagagacggggtttcaccgtgttagccaggatggtctcgatctcctgacctcgtgatctgccctcctcggcctcccaaagtgctgggattacaggcataagccaccatgcccggccctgggtagaatcttaatttgaagagacatttttgacacattccttgcatcattccagatatcacttattagatgtccactgattgattgcctacctggccagcatccatgtaccttcccagtagggcccacacatccttccagaatccagcccctcacctgagcaactcatgtgctttgggggaaactgatcctctgtagcttcagcaggaggccttgttttacccaagacaaaggccacattccattttcctggtggcatcatggttcaggggtgagtctatgacccaagccagcttaatcacactgaatgtcagtactcctacttgggcctggagggagacctccccactctcccttcactggatgtgggtgtggatgcatgaagccccagctatggctggtggccatcccatcatcaggaggaaagctggtcttcagatgaagctgatcttccagtcagagtgagggataaaaagaacattgattcttgatcatgccattgggctgcgggttcaagtcattcctgaagccagcatcatttctggacattccaatggcagggaccaagatgtctcttttgttgtttaatctactttgagggctgggcgtggtggctcacacctgtaatcccagcactttgtgaggctgaggcaggtggatcacctgaggtcaggtgttcaaggctagtctggccaacacgacgaaaccctgtctttactaaaaatacaaaaattagctgagtgtggtggcgcatgcctgcagtctcagatactcgggaggctgaggcaggagaatcacttgaacccaggaggcagaggttgcagtgagctgagatcccgccactgcactccagcctgggcaacagagcgagactgtctcaaaaaaaagaaaaaaaaaaaaaaaggcacggggcagcaattacagtagcaaaggcaaagtggaaatttgggtgtaaactgggcacccataatgtatgctccaagccagctaatagtgacaactgtggccccacctactggccacaggaattttttttgagtgatatcaaggatgtagatttccttctgatataagttatcattttctttcattcattcagttgatacatttttattgggcatctactatgagctaggtgctaaaatagttgctactgatataacagtaagccaacacagatccagtccttttttttttcttttcttttctttttttttttttttgagacagggtcttgctctattgcccaagctgaaatacagtggcacagtcatggttcactgcagtctcaaattcctggactcaagcaatcttcctgcctcatcctgcctcagcctccccaagtagctgagactacaggtgtacaccaccacacctaactaattgaaaacttttttgtagcggtgaggtctcactaggttgctcagccttgtcttaaactcctggtctcaagggatcagccctcctcagcctcccaaagtgttgggattaccggtataagccactatgcatggttcaaaaatacttttatgttcctttccttcttcttaatttctccatggcaaaattcctcatggtcaataaatcactgattgtaaacaagcatcatgtgtgatatgccttttgcaagcgtagctacgaagtcctgtatcccatttccaaagtatagcatccatcattcccttggggacaagagatcgtggtgtaaagctggttgatcctgtcaactgatctcacagcaggtaaaaaactgatactgcaggtccagtttcaggagctgacaggagcgtttagcaacactccaaagaggaattctttgctccatgcatcacaagcaaggcaatccttttgatcacacttgaatttttggttttaagcttaagtagtctgttttctcttatgctatttataaaatgcaggtgtcaaggtttgcgcttggatgttttaaagaggcaaaaaatcaaacatgcctaggtttcaggaactgaccaagtgctgagagattaatctttttttttttttttttctgaaccagggtcttgttttgtggtccaggctggaatgcagtggtgtgatcctaacgcactgcagccttgacctcctgggctcaaacaatcctcccacctcagcttcctaagtagctgggaccacatgtgcatgccagcacacccggctaatttttaaattttttgtagagacaaggtctccatatgttgcccagactgttcccaaactcctgggctcaagcgatcctcccacctcggcctcctgaagtgctggaattataggtatgagccttggtttttcaattctgggtccataaatttatgaagaccttggatacaatgtacacaggagaaggcatcctgttggtaaggagtttcataaaaaggaaaagaaaacgcatcaagaagctgacgtaggtagcaaagagacaggaaaagagaagagctttaaggccagtgtttggagatcagacatttcccctcaaaggaggacaggcctggctcaggtcttcagaggcatcaggaatagaccctggcctcagctgattcagagatggtcagagcaaaggacaccccacagggccttctcagggctatgtttggaagcagctcttgttaccccaagcctgcctagcatcaaacacccttcccttttatcctcaacgtttgtggtcaagtatttgtcactgccccgaggatatttagggctgtacagagcaacatgtccttgtcatcaggagcaaggacacacatggagcggaatctgactgatgggtacacattgtgctttctgcccgcttctgcaacggaagatgctggaaatgttctgctagatctcaacagtgtgggtggctgaaagcaaactctgtccaccacacagacatagtctgagagccccctaagtgtgactgccctgggccacctggatccccctgctgggctctgagcagggacatgactggtctctgtgcaggccgcagggcagcttagtccctgtcacagccccagaatgatcgcccccaccaggcccaggtcggtcctcctgtaagtctcctggcaatactgctctaaaatcccacttccagcccagtgcagggactcacgcctgtaatctcaacactctgggaggccgaggtgggaggatcacttgagcccgggagttcgagatcagcttgggcaacatagtgagacacccgtctctacaaaaaaaaaaaaaaaaaaaaaaaaattaggcgggtgtggtggcatgcacctgtggtcccagctacttgggaggctgaggcaggaggcattgcttgagcccaggagttggaggttgtagtgtgctaggatagcgccattgcactccggcttgggcgacagagcgaggctgtttctgaatgaatgaacgaatacataagtaaataagaaaataggtaatacataaaataaaataaataaaataaaataaaataaaataaaataaaataaaataaaataaataaaataaaataaataaaataaaataaataaaataaaataaataaaataaaataaataaaataaaataaaataaaataaaataaaataaaataaaataaaataaaataaaataaaatcgcacttcccagcggttacacccggccacggaggtccccaggctggctgcgagggcgccggggaggtcactgttactccagccccgcaacccgcggcggccctcgcacacttccgccggaagtcagcccctcaggggcgccgtgctgatgtcacgagcccgcaggaagtctcgtatcgcgcccgggaggcgccggagcccagcggctggcggtaaggccgcctccgcggggctgtgggaagcttgggctgtcccaggaccgtcagtctcctcctctgaccctccctttccccttgtgtgtagggccgccgtcccacccccacctcgcccgagtccggggcggccccggtgtcccctccgagcctgctgcactccacgtccccctaccagggctccagcccccagggaaatctccgaccaggcccgcccaggaggtgccttggatgggggtggcttcgggaggccctaatggggagtggcggggagagacccaaggctaccgacttggcttatttcttcccaactagctgtttctcacaaagtctttattattattgtattttgagacggggtttcgctcttgtttcccaggctgtagtgcagtggcgcgatctcggcttactgcaccctccgcctcccggattcaagcaattctgcctcagcctccccagtagcttggattacaggcatgcgccatcacgcccagctaattttttttgtatttagtagagacggatttcaccatgttggtcaggctggtctcgaactcctgacctcaggtgttctacccgcctcggcctcccaaagtgctgggattataggcgtgagccaccgcgcccggcctcttttattgtttttagagatggggtccagctctatggcccaggctggaaggcagtggcacgatcacagctcactgcagcctcgacctcctgggctcaagccatccttccacctcagcctcccaagtagctgggaccacaggcgcgggccaccacgccccactgatttttaaatttttatgtagggacagtgatctcactgtgttgcccaggctggtctcgaactcttaacctcaagctatcctcctgcctgggcctcccaaagatttgggagcaggcctaagcaacttagtctgggccatttctcccaaagtcttacccattcatgctgggggtgctgaaaatcccctacttccaaatccttttccacaggtattctgcctttgactgca

SEQ ID NO: 11480 - DNA, 6000 bp, Homo sapiens
gaactcactaattaaaactccccacgggaaacccccggaaccaataagggcacttgcccacagacccccctctctccccctgcgcagactcctggatatctctgtgtgtggcctccaggcatgcaggtacccagtaagtaataaaacctttatttccatcttgtgtctcttctaatcattggaggagtactctacatcttaaagatcttaaattaaaacagtttagaaggccagtttttaagaaatacaattcaattatccattctattgattttgtggataaagacaactttattgtataaaaataaaaccttggccaggcccggcgtctcacgcctataatcccagcactttgggaggctgaggtgggtggatcacctgaggtcaggagttccagaccagcctggctaacatggtgaaaccccgtctctactaaaaatacaaaaaattagcagggtttggtggcacgcacctgtaatcccagctacttgggaggctgaggcaggagaattgcttgaacccgggaggtggaggttgctgtgagccaagatagtgccgttgcactccagcttgggcaacaagagtgaaactccatctaaaaataaaataaaataaaataaaagctctccttccactcagaaatatatgtaatctcatagcttagtctccagtataactctgtgagaagaactgtagtccagtgtcccattctttttttcacttaaaaaaaggcagtttttcatcaaaggaacaatatggaggcataatatgaaagaaggacattgcctatggcagattttattttctaaagacaccacagtacgtctcatcacatatgctcttccaaaatgtggccttgcaaacttgaagaaaaatagagcctgaagtaaataatatttactcccagaaaatggcacatcccttattctgtcaggctgctggtgtggttgcctaagtccatctaaactatagttaagctgaattagggtttgttataggtttaatagattcagttcattattggcttcaaatattcttgaaggcatgatcaagactttcctcttacagaaaggaggtctgcatagagatttcttcgtgctttgcagcctagccaccagcaatctgagccttgggagatctttgtgctttacagcctgctacctttttgtttgctggggaatagtctttgctctccactcacatccttggctttctgtatcttgtgagatctcttgctatcctgtgtggaatcctattccagccattggagggctctttcagtgtaccatagagagagttttcttttctgctgctacgttagtcctggagttaaagaaccagattgctttgctggaatttttcttatttttcctcactttaccccagcttttagccactatcttgcatttggggaaggcttatacaccttgaaatagttggagatgaagaatatctattagcacttgacatggtttggctgtgtcctcacccaaatctcagcttgaattgtatcttccagaattgccagatgttttgggaggtacccagggtaggtaattgaatcatgggggccggtctttcccatgctattctcgtgatagtgaataagtctcatgacatctgatgagtttatcaagggtttctgcttttacttcttcctcatttttctcttgccaccactatgtaagaagtgcctttcgcctcccaccatgattctgaggcctccccagccatgtggaaatataagtccaattaaacctctttttctgcccagtttcaggtacgtctttatcagcagcatgaaaacgaactaatgcagcaatcttgcctgaccacggcctttgtagcttatatgtcttgttttaaaagaaagcccatgggttagagctggcaaatagttgcagtcattctgtagctggggctctggattataaactgtcacatagtccaggtaggggcagtagaagatggttaaatagtcatttagtttctccttatccctctcaaaggtagtttctcccttccacagccagtctataagagatgaaagtgactatgagtttttttccccctctaataatgtctcatcacttcttggattttagttcctctagtgcctttagcccctcagttcttcgatagttttttgttgtaagtatgatttggtagcttatctagcttgtttttacttactttgagacagggtcttggtctgcacccaggctggagtgctgtggcgccatcatagctgactgcagccttgatctcctgggctccagcaatccttccccctcaggctcctgagtagctgggatagctgggattacaggtatgcaccaccacacccagctaatattttcaatttttagtagagatggggtctcactatgttgtccagactgcttgttcttattagggtgggaacaaatggtcttttgaaaatttctatatccaaatcaggagaaattgcaacatgtccatttgttttcctattttcagacattgttttgtttcctctatcaaaagccgtatctcctatcagacaactctcctacaactatagctcttgcctggcttctgtaactgttcccttaaatcacccccttagtcttaggggtaattagaacttcctgctcttactatctctgagctgcctcatcatgctttgttggtttccttttctttttgagacagaatttcactctgtcacccaggctggagagcagtggcgcgatcttggctcactgcaacctccacctcctgggttcaagtgattctcctgcctcagcctcccaagtagctgggattacaggtgcccgctaccacgcctggctaatttttgtagttttagtagagacggggtttcaccatgttggtcagtctggtctcaaactcctgacctcaggtgatccactaccctcggcctcccaaagtgctgggattacaggtgtgagccaccgcacccagccggtttcctttaactttgtccacacttttgaaaatagtccctttttgaaattcttctcagttatgctatttgaacgagtcatctcctttttgctgggaccctgactgataggtggtacttctctgggaaaacaaagtgattcagcctatagggagatagtgaagatattatgcagaagccaaagagagagttgcaatagttggttgagtgatagttgaagtggtactaatgttggtgacacccaggaatgggaagagaatgaatagatttccctgccaatgcctcatcttttgtaaacctctggctattaaaaaggaaagttgagcatcatcaaagcattgtttgtgtttgaggatcattttccaggttagtttttgaaatatttctagctgtatataaaaggttaatgtggaatagaaagcctaacaaattaatgaggtcttgttggtatggtggggtcaggggagggaaggagaggctggaagagggagcagagaattctaagaagacgaattattttaatcagctgcaatgtttaatttaatttaatacaatttagcatttgcaattacataatttactccgtatgaacctttaggttagatatagtattgtaaacttgcaaatctctttataaaacctttttctttggtagaaactactatgaagtaaataaacctttattgccttcgcttagtgcctggaacacagtaggcctttacaaaatgtcagatctatgaatactagctgacatttattgaggccttcccctgtgccagccactatgcaaaaagtgcttgacatacttctaaaatctcaatttataggtgaggaattaaggatacaagatgcatttctatagtagagaagcagtaaactgataatgaattaattgaggtgaagtctgagttatttgaagattttcagttatttttgtgaaaaaataagtttattgaaattcacgaccagaacacaaaaataatctctcttgattttctttttaaaattttttaaaaaacttttgttgacacgtagcagatgtatatatttacggggtacatgagatgttttgatacaggcatgcaatgtgaaataagcacatcacggagaatagggtatccatcctctgaaacatttatcctttgagttacaaacaatccaattacattctttaagttattttaaaatacacaattaagttcttattaacgattgtcactttattgtgctatcaaatagtaggtcttattcattctttctatttttttggacctattaaccatccccaccttctcccgctcttgattttcctttgcatgcatgtattcataaagtttattagtattttgcaaatctttgtaggataagtctgacctgtccaggtcacaattatagggcacatatcttattttctgagagaagcagggattttattttattttttattgtttcacttattttctccctttcatttgcctctacttcgttctcttttaaatctttcacatgttttcattcattacttgcttcctgccttccttccctcaaacaaggccaggtgcttagttttgaaatctcattcaaaatggtgccacgtcatctgccagggccaagaatccagaggtgctgtcatatttctccttgccagcgtggatctcctccgagccccgccctccctcctcacctgctcctggggaaactacaccaaggccgccgctctggcctggggctccctcccacacggccttggccctctccccctcgccccgggaccgctccgcccctcccggatcccggtcggcggagcgcatttatttgcatatttctacctttgttccctgccagcggccaatcagcgcgcggggcgagacgaaggggctgggcggggctcgggctcctgctccggctcagctgcggcggccgcaggttccaaagcgggtccgagccgccgccgcgcgcgcgccgcgcactgcagccccaggccccggccccccacccacgtctgcgttgctgccccgcctgggccaggccccaaaggcaaggacaaagcagctgtcagggaacctccgccggagtcgaatttacgtgcagctgccggcaaccacaggttccaagatggtttgcgggggcttcgcgtgttccaagaactgcctgtgcgccctcaacctgctttacaccgtgagtatccccagtccgttcctgctcgcttgggggctttgcacctgcttgggagctctttggcttccctgcctggtcagcgactcactcgttgcatcccgcgcccccttcccggcttcccacgtctgcgcgcccccggcctcaccatccgtccccgccggggaccgggcgccggcgcttgtcgcagtctcttcctttcgttcattgtgaagccgcggtctctcaggctcgctggccgcgtctctgccacattgctccaccccgccccctcacccaccgccttgtttttcaaacattcaaccggacctctccgctttcccaccccgtacccttctgccgctcgctcctgacatccagacgcatctgggccaggcgtggaggcgcgagagccgtcagggcttgcggacagttttgcggaatggcgtggcctgaaactgacgaggcggcatatggctggtgtgcctctgggttagctcttggtaccctcgggattttaattgaggccactgagtaggttcacaggatgtccgctgcttccgaagtttgtttcgtgctcacagtaaagggatgtctttttgtttttgttgttgtcagttttgctagtacttggtgctttttctgtgtgtcttgtccatgatcaatatcctaactccattttaaaccaagtcctccaggaaataagcgagcccccacccaagtcgtttctttccctgccaaccagcttgggcctcttagttttaacgctgcaggctctctttgtgattttttgaggcgcaattctgggtgaacaggaggatgggcaggacagatcgacatttattgaatgcctatcacgtcccaggttttacatacac

SEQ ID NO: 11481 - DNA, 6000 bp, Homo sapiens
ggctggtctcgaactcctgacctcaggtgattctcctgccttggcctcccaaagtgctgggattacaggtgtgagccaccacacccagccaatagtttccttttttacttagaacagccataatctgactctttacttgaaactagaagtcatcacaatatgagataattgaggagaatcagagctctgatttctgcctgctcatgaattcccttgaaaaagtgaggttggtttctttgccagtctttgtctcagtttccacatttgtaaaatggggctagctctgtagcatgcttcgaggaaaattaatctgtgagatgttctctcatacaggtttcttcctttggagaatctaatggcatgctgctctattgagtttccggaaattcctctagtaagggatttaatttgactttaattcagcatttcccaagcttaatcatggaagtcttgtttcagaaaacattaatatctcacagattgagtcatccataaactatcttggcaagagacactggctccagcagttcatttttctttgaatttgcacctgacactgatctctgttattaaacactcatgaggcctttaaggagtctctgtattaacccattaaagtaggaagttcttaaacttcagagcatataaaaaccatttgaggaccttggtataatgcagattgctgagcaccatacaagatctactaattcagaatctcctggaatagagacaaggaattagaactcagaattactctatgggggattgtgttgtatgcagtcttcagtctacagtatgagaaacactgtcttatgtaacaattcagtgaaaaataccttcaagcaatttatgtactttatcattagaagaagctagaggtcatagtcacaataatatatctcactggtctgaccattaatcatcttctgagatgtctcaggcaagcttatagataacttgtgaatacccacccaaaacgtactgaatggctctgatcccaacttcaaaaagatgtaacattaaaattcaaatgtgtctgtaggtgccactatgagatcaataatttgggcacatctagttaaagtgtgaatagccacagctgtatgtggtgtcttacacctataatcccagctacacagaaggctgaggtgggaggatagcttgagttcaaacttgaaccaggagttcaaggccagtttgggcaacatagtgagatagcaagattccatttcttaaaaaacagtctgagtgtctccctcactcctgctacctatctatagcttattcattctcaccataaactcacttagtgagaaatcaaggttaaaggagtagggaagaaatttaagtaatttaattttatgactttttagtaactcagctcaaagactctaatgataggaagcctggaatgaataactaaaatgttatttttagactatctgtgaatttcatttcctctcattaccacaaatgatgaaaaattagctgtcagaaatttcaaagcaatatagcagaacatgatggaaaaacaaattaatcaagtcaccatcttccgaaacatttttcctttattagaattcttcaggtaatatgacgaagataacaatactgcatttctttaaaatatgctgtacatttcctcataggaaaaagggtgagttatggtgaccagtgacattaactggaaacaagcaaacttttggttcctgggccactagttgtatttactttaagaaaaccctaaagatgatttgcagtctttcagagagtttacttttatgtttacagcccaaaatgtgcagataacttgtttgtaaataactggcaggggtcacagtgtcacatctaggagatttcattttattttatttcgacaaccagagttacagcctctttacaactgagaagtggtaataaatggtattgtgcttattcttcaacaactccatagcactggcacctgacatatatttgcatgaatttcatgtaacaaaatgtagaaatctttctttctaaagggcttcaaaatttcccgaaacagacttctgaacttcattttattcctcttgctacatggttgttctggattagtatatatatcaacacctaaaaacagagttacaaaaattagtgcatacctcatcaatttcataaagttacatcctttcttgtttgcatacatttatattttatttattactgtaactgccacttacaacccagcaacaaagagttgtattttagaatattatggaatggtgatatgatagacactttaaagtgtattgacatgtccttatgggaattagggatttaattttttttttttttgattgaagcactgcatgtctcaagggtggctgcattcagtaggtctgtgacataacccctggaaaatacccaggctgcccaatggaagagtcactaatcagatattgaatatgatatttttgtgttcaaattttcaagtcctcacacccatcctaactaatttttaggcctttcctttaagacaaccaaaaaacaaaactataactgttcaaacttggaactaaggaaaggaaataaatattaaagcggagctggatttatttctatttatttagagtacatcacctccagtagaattatgttgctaaggttgggatcacggctttggtctcgcgaagggacctgctttgcagatccagggctcgtttaattttccagctgggttcctgctttgcttaactaatcctgtgcaccccgttgtgcggtccacacctgaaagggggagtttcgatgttgtggtttattaaccaggtactttccattcactcagtcaacagaaagaaagagagagaccgcgcctcctactttttttttttttttttttttaactacaaataaggagacggaaactattaaataagaaggggggaaactcccgcatatttcaccttgacctggctggactggtctgctgcctctaagaggcgggtgttgtattaaaatgagaggtcaaactcctcgaatgggaatcgctcctgcccctagagggaaaagagaaccatcaccgtgttaaactggaaacactgccttgtttccaatgcgggggactgagttccctccctcgacttagcgtggtaatgacaggacccgaggaggcgcgctgcttccgggcagttgcccagcataacacccgcaccctacttgcacctaaatttctgagctgcaagcaggcagaagtgccttccactttctctccttagctcccctctccccgctttgctgctgtctgtaactttttgttccgtttactgggaaggtgacgcttaagatcaaaagacccactgtaacttgcaaaagcccagagccaccaccagacgctggggaaaaacagggctgtccagtccagggttaaggttttgagcagagaaggagcagcgagaaatctcggccagtcgctccgggaacagcccctgcagactggtccaactctccaaaggctagggacaccggggcagccttgtggtggggtagaggacgagctcctaactgcaagcaaagtgctgagtagagggcgttgggggcaggggaggtcccttgactccactttgtatgcagcagctgcggggcagtgagtatctccgaacaaagcggcgagcagcgcgggggtgagagattggggtttgctcgcagctgccgctggcgctgagcgagtctcccaccacccccgcgagcgttggggtgcaaggattcgggggaggagggagaagggaacgaggcgtgccattcctgttgcgcggctacgcttcaggagttcttgtgaacgatgggaatggcaactatcagagccaagggggaaaagaaagagctggagtgagcaaaacaaagagcgagtgtgggccgcggtgacttcatgcctcaccaatgtcccgcccacgctgctccgagctgttactgctgctcctgcccgggctgcagccgcgcctgcgggcagccgaggcgaggcgctccggtagcgtggggaggtttcctagcaactctctgccctgagtgcacccggctacccgcaggtctggagccccccggggggccagagcaggaccacccctctcccgcccatcgccggcctcgcctctctcgcatcctagccgtgtgcaccccagagcgcgccagcaactcgggctctggactgcgggacgcctgagccgcgcactgaggcgaaaaggacaagggcacgcagcccccgccccgcgaagccgggctccggcacctcgcggaacctcccctcctgcgctcgcagccgcaggccccactccccgccagggagggagcggcgatgcctcgctctgtgcctgcgggtgtcggcgggtgcttctagggcgctcccagagccgcctccccctgttgctggcatcccgagcttcctcccttgccagccaggacgctgccgacttgtctttgcccgctgctccgcagacggggctgcaaagctgcaactaatggtgttggcctccctgcccacctgtggaagcaactgcgctgattgatgcgccacagacttttttcccctcgacctcgccggcgtcccctcccacagatccagcatcacccagtgaatgtacattagggtggtttcccccccagcttcgggctttgtttgggtttgattgtgtttggctcttcgctaagctgatttatgcagcagaagccccaccggctggagagaaacaaaagctcttttctttgtcccggagcaggctgcggagcccttgcagagccctctctccagtcgccgccggggcccttggccgtcgaaggaggtgcttctcgcggagaccgcgggacccgccgtgccgagccgggagggccgcaggggccctgagatgccgagcggtgcccgggcccgcttacctgcaccgcttgctccgagccgcggggtccgcctgctaggcctgcggaaaacgtcctagcgacactcggcccgcgggccccgaggtgcgcccgggaggcgcgagcccgcgtccggaaggcagtcaggcggcgggcgcggggcgggctgttttgcattatgtgcggctcggccctggctttttttaccgctgcatttgtctgcctgcaaaacgaccggcgaggtcccgcctcgttcctctgggcagcctgggtgttttcacttgttcttggactgggccaaggtggtaagttgttttgttttgttttgttttcttctcttccccaaaggtcttgggctggcacgaagagctgcccggccagagcatcccggccaggtaagttgcggtcatcagagaacttcaagggggcgggtgcggggcagcgtcctccagcacagatggcctagaggccaggtgtcaagcatttctgccctggagcgacagcaaggactaattatcagaggagacactctgtgttactcctaggtgttgaggaagccctaatagaaaggaattttggaaaagagggtgtcctgtttacagaagtcatttaggggccctggtccattcttaagggcatcgtctgtacacaatgttctccctatctttctaacatttgggtccactaaggactaacttgcctttaactcgaggctgtagataagttggttataatgggagtagtcttcaatttttgagtccagaaaaagacagcatacaagtttctgctatcattagtgctcaatctgaatgaattacccacactggagggatattaatgctttaagtcatcatcctttcggcttaaaaaaaaaaaatactatctaattgatccctcactgagatcaatctctgagacagagaagcagaaagaactctgaaccaggattaacagctttctgtccaggcaaaccatttgtgtaagagctaccttaatgtggagaggttaactctttacgaaatgcattgtcctcatctgtaaaacgaggtttattaataatacctgccttctctaaatcacaaaggaaagttcaagtcaaatagcatatgagaaggtgtt

SEQ ID NO: 11482 - DNA, 6000 bp, Homo sapiens
cccgtttacttccttcctagaaaaacctatttttttttctccttgtgtattgtctgcctcctgccagaattggaggacttattatcttgctcatggctgtgtctctagaccctcacacatagtgggcactcagtatacatttattaaataattacatttcttatctgatctcctcctgtataatatttggattgttttcagcttttctatattgttacaaatgctgcaaagaccagttatatagatgaatctttgtatatattaccttagggtgaattccttaagttgaatttggggctgactatgtatagtttttaagctttttatcaaatgcttttgactgctatcattatttttttaccctccagttccacctacaattaccttgattgactcaatggaactttttcatatgaaagtattaaaaatactgaaagaagatataagtagcaagaatgttttaaaatactaatttctgataataatgtaaaagatacactctatgttttaccaggaaacctagatcattatattcaatgcacttcactctcatggcatgttatttttagttctttttctagttctagcataaatttcctcaatcaaatactgtgatcgattttttatgtgtgtaacaagataaaaatgttgtgcttcagtctcacattctaatactctttcttcaggttgaccctgtattatgttggaataggtgttgctgccttgatttttggttacatacagatttccttgtggattataactgcagcacgacagaccaagaggattcgaaaacagttttttcattcagttttggcacaggacatcggctggtttgatagctgtgacatcggtgaacttaacactcgcatgacagagtaagaggatgatattgtagtacgttagctttgttttcatatgtgacatgtaaatgacctaactacatttatttgcttgtttcagtgacattgacaaaatcagtgatggtattggagataagattgctctgttgtttcaaaacatgtctactttttcgattggcctggcagttggtttggtgaagggctggaaactcaccctagtgactctatccacgtctcctcttataatggcttcagcggcagcatgttctagggtaagtgagatggctaatgcaatattgaatggaagcagcagtgtggactaaatgactcactgagtttgttcaaaaatggcttttctattcacttgccatgtcccaaactacaaagggatattatacaccacaaatacttttgattttgttcaccattaatcccctttctatcttcaagttatttggctaagatgaaatgtttttaatagcttactaacattgaaaacatttctcttcatttagcagtctaacacaacttcaagtggtagcatggataaagtatgatgtccttatacatgtgatgtttagttgttgctgttgggacagacttgtttgctctaaattcacagatcaacatggtacgattcatttcactgggtagaatggaataagaaaatcctaaaacaataaacatctttttatatcatcctcttaaagtttatgtatatatgtaaagttttttttttttttgaggcaaggtctcactgtgtcacacaggctggagtgcagtggtgcaaacatggttcactgcagcctcaacttcccaggctcaagtcatcctcccatctcagatcccaagtagctgggactacaggcaaccacgcccagctaacttttgtattttttgtagagacagattttcaccatgttgcccaggctgatctcgaattcttgggctgaagctatccgcccacctcggccccacaaactgctgggattgcaggccagtgagccaccgcacccagccaagtttatacttcagtaaggctttcaattacatttcagatttctgctaatatctatttttatgtactacacaaatatgtttcagttttttaaacaaattatgtactcgcattctaaattacatttttagcactgttttgctgtaagtataacacaaaattgtaatcttatctacagcctggttttgaaaccgatactctgtgaaatctaaaaacaacaaatgtatctgtaatattattcttcaaatcatatcttttggaaattctaccattgtatatactcatcttctagataggaggcacagtgctttaaatttggcaacactaatcattctttatggaaatccagttcctaaaatttccagagtttatttactaacaatatagtaattcaaccaaacaagaattttcagcaataaaactattctataatggctaatcccttaacaataggcttggagatttggacagcatgtctttacttagtgtgactccgagtgttgactttgtagcctttatcaaaatcttcatcctcaacttatttgaaatgaggaaggaaatctcagtagaaagattgcctgcagtaagttagtaagatcagaaccttaacgtccacagaagagaagtaaatgaggagttgtaaaggaatagcagtgggtagtctaaattctattattgtattcattgatcatggagaggaagcaggtgaaggtcagagttatccagtgaaggtcagagttatccaaaggatgcgataccagagtggatggcttctagcttccttcaattcaacttgacaattatctattaaatacttgctaagtacaaggctttgtgccaggtggtgtttcccctctagtgatctactataggaataattatctttagtaagtgaattcagaaaataatgagtattattccgcttctgctactctctcactttaacagttatccaagcatgtcttatataaaatcagctcctattatgtggaatatattttttaggtggatagacttgctatgcgaataggcaatagttatgaattcacagctctgaaggcagtatccccgctgttcccttttgtggaactgttgtgttaattacaaaattgtaaaaggattattaaatgggacatataatggagaaaagggcatgtgaaatcaggtaaacctgtctagtcaccaatagtgatattttcccttttctctctgaaatcttacctcttagtatttgaagacaaatttttaaaaatacagagataaagtctaaaaaaataccattagtctacttagaattcaaattctgcctgacttaaatgttcagaacattattactacacagagtcattttttaactgtggttgtggtttattacagatggtcatctcattgaccagtaaggaattaagtgcctattccaaagctggggctgtggcagaagaagtcttgtcatcaatccgaacagtcatagcctttagggcccaggagaaagaacttcaaaggtctttccttttaaatataacaagatatgcttggttttattttccccagtggctactaagttgtgttctgtttttgtaaggtatacacagaatctcaaagatgcaaaggattttggcataaaaaggactatagcttcaaaagtgtctcttggtgctgtgtacttctttatgaatggaacctatggacttgctttttggtatggaacctccttgattcttaatggagaacctggatataccatcgggactgttcttgctgtaagtcttgtttgagaacaaggtgtcaggcctggataatctttccttacctagtttagccaaaattcctctttgaagataaatattcaaagatggatgtttttattaaacaaatatttgtttccctcaaattatctgtatacacctttaaattatagttatgaattgacagcatttattcatccagcatgttttagtgtcctcgctgtgtcaagcatctgcattccgcttttggaagaatcataattgaattccccactgggaaatacactgagttttgttaatctagcagtgaaaaaggccattctcttgtgagacttttcctttcatctgggctgagatcagacggagttctgcattcaccttgctaaatgtcttctctctggaaatggtctgtagagtttacactcacctcctcttcctctgtcctttcagcatgtagtaatttaaaaaacagactacatatagctctgtccagtatcacagtttggagacttttaaattcttatgggttatgtgttaaataataatttattcagttatcctcttaagttacaataaacagatcagttcaggattaagaaacatttgtcttgaggaaccaaaatgatctgctctttatactttgatccttgtttggcctttccattcttacagatttctcttctttccattaaattcatcttttgaatttgaggcattcataattaagacttttagctattcatttatttcatataaagtgaaatgtgagcatgaacgatttttcactcatccttgctcctcaatttatgtgtggctgggtatctggcttactaagcctaagcatcctcatctatatgataggagtaagagctcctagcttgagggattcttttcttatttgactttttgcagagatgagtctgtcttaaaatggacagctgtcccctaatacaaaaattcaaaaacggtttgagtgaaaacagtacaatgtctctgagccaataaaatctactgaatttttctttttaaagttcaaggggtcacccaacaaggaggggagtgcaactcaccatggggtttatacatggtcagcacacttcagttagcagatttttctggtcacacatcccagcatgtgataaccacaagactatgagataatcaaaagttgttccttattaggaaaaggccaaggatacttggattaatctgtgtttctattgcttctcggccttttggctaagatcaagtgtaatctgtgttcttttttatttggtcatatcttccattctttcttacctaattcctctaatatctctctgtgagcctaaaccaataattatatattacattctattgtctttcttatataactgcagaaagataaatatcactttgtttgttcctgtaggttttctttagtgtaatccatagcagttattgcattggagcagcagtccctcactttgaaaccttcgcaatagcccgaggagctgcctttcatattttccaggttattgataaggtaagacctcttattgctttgaagaataactatcattactgcaagaaggagacaaaaaaacatacaccctcattttcactaaaacaataggatggacaaatttaatgttggccagttgtttatgggaaagagagactgcctttaattcttttctaagaggagattgtgttgtattgaaaccttcatgtctaactcaatgcacttctaaagcagaaaggaaactgtcatggaagaaaaccatccttatactatttttaaaatgtagagactgtcagtttactcctttgaagatttataacatttcctttgtttttccaagaaacccagtatagataacttttccacagctggatataaacctgaatccatagaaggaactgtggaatttaaaaatgtttctttcaattatccatcaagaccatctatcaaggtaggttaaaacaaattacgcaattgtgcagttttctgatattatcttctactggccaagatcttctctgacatgattacttaggatcacttttttccaagattttggctactttgcttagagacttgaggaggtagataaataatggacaaataactctggatcaactagttatattttgcagcattctttctatattcaactgactaaagcattttcagctccgtgaaattcttctactctgggtttgggaacacacctaaatgtcttgggttgacgctgccacctgttggtggttcctagatgctaccccactcaacatactcattttaaccccctcctctctaacctaggagaattatgcacatgtgcctttcccttcttcctttcctggggcttttactgcagcagcaattgcg

SEQ ID NO: 11483 - DNA, 6000 bp, Homo sapiens
ttttttaaaaaaaatgtttgtagccagcactccaagaagaaaacccctttgcctgcatccagtatcaaattcctccaggtgaaaaaacaggctaaaaacacagtagccattgtcattgcaaaggtgactgaaaaggatgcactaacctttgtgatgttttttgttttttttttttgagacagagtctcactttgtcacccaggctggagtgcagtggctctattgcagcttactgcagccatgacctctgggctccattgattctcccacctcagcctcccgagtagctgggactataggcatccactactatgcctggctaattttctttctttttttttttttttgtagagatgggggtctcactatgttacccaggctggtcttgaactcctgaacttaagcgatcctcccgcctccacctctcaaagtgctggaattacagggatgagccactgcacctggcctgtgattcgctttcttttctttttccaaaaagccagggaaacacattttggtgggagagtaatttgaaagcttagtaaacctggaaacaagggattttgattacccattcatgtagagaatacccagacaggagagtccgaagaactatacacaaagcagaagtctctgagtcattggctaatgcttaaatctgaaatccatgactctgattatgacatgtaaaaacgcccacattgggacagggcagtcacatgagctgtctctctttttgaactgattcctctacctgtagtttgttcttgcctttctgttctgccaaatatcaaagctttgtttcaacaagtctgtaacctgtgagaggtactttccatcactgcttccatcacatgctttctttaaaaatagaatttgttgagctggtgcaatggtgtgcacctgaaatcccagcgacttgagaggctgaagagggggaattgcttgagcccaggagttcgagtccagcctgggcaacatagtgagacctcatctctaaaaataaaaattaaaaaaaattgtttttaccatgtcgtctgctgtataactgtgctagacagaataatggtccccgaagacttccacatcctaacccccaggacctgtaaatgtgttatatggcaaggagcagatgaaggttgctaatccgctggacttaaggcaaggagatgatttcagattatctaggtgggctcagtataatcacaagggtccttgtgagtgggagagggagacgtgggaatcagtgccagagggctgccagagacagaggggccaatgagacaggaaatgtgggcagcccctagaagctggaaaggcaaggaaatcaattctgccctagagccgccctgccaacactgtgatgttagttcagtgaggccatttcacacttcggcttccagaaatgtaagatcataaatttgtgttgttttcagactccaagtttctgaccatgtgttgggagaaaaggatcttaactaatttttatgatcttgcttacaaacaccagtttaaattgagcaattcctaaaattaaagatgttaattcctttttttctttccctgaaaaactaaggaaaaacattttggtaggagagtaatttcaaagcttagtaaatctggagacagttcaaataccagtttaaactgagcagttcctaaaattaaagatgtgaattccttggcagcctgccgggattcctgggtgtgcctgctgcctgccatttcgaaggtctcctttggggtggctgcctcagtcctcacagctcaagcatcgctcctcaagtcgggactgtggccaccaggaggagtgtcagaagccaagagaaggcaatttggggcatttctcaaaagttgactattctggtcgggcgcggtggctcacgcctgtaatcccagcactttgggaggccgagacgggcggatcacgaggtcaggagatcgagaccattctggctaacacggtgaaaccccgtcgctactaaaaatacaaaaaattagccgggcgaggtggtggtcgcctgtagccccagctacgcgggaggctgaggcaggagaatggcgtgaaccctggggggcggagcctgcagtgagccgagatcgcgccactgcactccagcctgggcgacagcgagactccgcctcaaaaaaaaaaaaaaaaaaaaaaaaaaaagttgactattctttgctttcctccacatcatttccgaacagagtaattgtatctgtaattccagataattgagatgtttcccttttcatttctcaattgccttaaggcgagttgattagcaaccttcatccccccagccatataatatatttaccagacctggcaattaggatctgaacggaacaatttttctttcttttcttttttcttttcttttcttttcttgtcttttctttctttctttctttctttctttctttctttctttctttctttctttctctttctttctttcctttctttctctttctttccttccttctttctttcttttctttctttttctttctttctttcttaagagatgaagtctcactacattgcccaggctggactcaaactcctgggcttaagcaatcttcccgcttcagcctctgaagtcactgggacttcaggtacacatcagtacaccagctcaaaaaattatttcaacaaaatatttcaaactttctttacagtataattttatctttccaaaacaaacaaacaggcttgagaatattctttacccaaaatggccctgtctctgagtcctacatagagttaactactttatatattatcaaccattgattatcaagaaacagattatccaacttgtagttctttggaatgaagatctttctcttgttctcttattcacctctgtccagctgcctacattttgactcttgtcctatcagtgcctcttctctttgatggtgcagggaaggaaaaaagacataaaagttgatttgatcattgtgtctccctaaacaaaacgaaggttttgttacagaagaatttaacacttccaatttatttagagacggggtggctaatctggctagaaatatgagccagaactgtgtctgcaacaaaggacaaaaatatctttaaaaatgttaatagtagcttttccttaaattgaaaaggtgtttttttttaattgtaaaagttatgtgtttgtcataaaaagcaaatagtgctgtaggcagctgaggtgggaagatcacttgaggccaggagttcaagaccagcctgggcagcatagtgagatttttgtctctacaaaaaataaaaagcaaataaaaaattagccgagtgtggtggtgtgtgcctgtagtcctacctacttggaaggctgaggtgggaggatcacttgagcctaggagttcaaggctgcaatgagctataatcatgccactgcactccggcctgggcaacagagtgagagcctgtctctaaaaaaaaaaaaaaaaaaagtttttaagtaatttaaaaagcaaataactatatacattattcgctttacattacatgaaactaataagtatttccattattcctttattcatcaatatttgaaaattgtttcagtcatgaataatgtgttcctttcgttgttttccccttcatatttgctgcaaaggctgtaaaaggcactctacagagttgtttgccgccttagggatggaagtcagccactcctgctgtatggattttagtttcataggctatttccattcctccttgacacactgaaccataaatcaataccccaagttttaccctcacctgcaaccaaggtttctactgcactgaaaatggccatgtgaatgtgagtttgagaaaggtcacatatggtaaagttttcatgttgccacattttctgcatactctgtaaccaggaatgatttgactgtataaatttatcttacagacacacttgtttgtacatttaatgcctgctttctataatatgaaaaaatacacagaacgttttatgcaattggctctgagtaatgcaacacataaatgctttgagagcagttaccaaaaattatgcaggttattacaaaagttatatggaattgcacagatattctaaatgtgcttttgagtaaatttctcagctaccagaggcctgggcagctgtttccagcacatcctggcacaacattcatgttatcatccacttatgtattccacaatttcaaatgattgataagacacctcccccatctttgcttcctcttggaggaaaaaaatatacaagcaatcacgagcacaggagcaggtggacaactacatcttaggaaagggtgcgtaactgtgaactctaaacgtgagctgggtgcctgatgcagtataggaaccacagtaagtcgataatcagtgaggctggaggattgaaattttatttggtaaagaatattgagccaggcgcggtggctcatgcctgtaatcccagcactttgggaagccgaggcgggcagatcacaaggtcaggagatcgagaccagcctggccaacatagtgaaacctgcctctactaaaaatacaaaaaattagccgggcatggtggcgggcacctgtaattccagctactcaggaggctgaggcaggagaatggcttgaacctgggaggtggaagttgcagtgagctgagatcgtgccattgcactccagcctgggagacagtgtgagactccatctcaaaaaaaaaaaatgaatattgaaatagagtctataggaaaaaaactccttgaatctagtaaatgtggaatcacaaaattgaaataatgtgcatctgaaaagtgaataaatagatgccaagaaggagtgagtcataagcacatgagttgtaagaggttgaacttgagagaccagatcaggcagtgccgcttaataccatcacatgatcctccccgaggccctgtatttaattaaaatagagagggaggcaccacagatgccagaagaacactgttgctcttggtggacgggcccagaggaattcagagttaaaccttgagtgcctgcgtccgtgagaattcagcatggaatgtctctactatttcctgggatttctgctcctggctgcaagattgccacttgatgccgccaaacgtgagtaacccttaatttctatgtttaacccattctctggccattggctgaaatgatggctaataatatcctctgaactagaggttggactgaagttcttcaggaagctttcatctctggctcactcatctcttcttctgcaaactgttgggaaggctgaaactacagcaaaatgcctccagctccattctttgctttcggctcatggaaagtaaaaactatgctgcccttctcttgtgaagcttcttttccattgcaattgcaacccattcttgccagacagtggttgggggagggttggacagcctccggccacagaacaaagcaactccaccaactaaactatgtccagcttccatccaaaagggtggagacctcacatgaaatggggtctccaatctggaggcaaatttacgaatctccccagccctgaagctattgctcctcctgcggggcttcctcacagacctgcaggagcttgctgggagaggagctgaagcccaggctctctaccctggtcaggcaggagaggccagggcatttttaacaatactgatacccacgcaatgaaaccggaatctttgggagtggggtcagaggatccttgttttaaaagttcctcttgggatctgcctatgcagccagggtccagaccactgaagcagtgtgcagattcgcgagaggaagagagctgagccgctgtaaccctgggcctgggattgcggggacgggacgggtgggaagcggccaaaggcgcagcggcttctggtcagagccgcagaggcctgagacgtgggccgcgccccggcccaggagaccccgcggccgcgccctaaccctcagtctcccgactgcgactgcgacccgggaaaacg

SEQ ID NO: 11484 - DNA, 6000 bp, Homo sapiens
cacatgcccagccctgtgctcagctctgcagcggggcatggtgggcagagacacagaggccaaggccctgcttcggggacggtgggcctgggatgagcatggccttggccttcgccgagagttctcttgtgaaggaggggtcaggaggggctgctgcagctggggaggagggcgatggcactgtggcagaaggaagagtgtgggtgccagcacccaggcacggccagcctggggtatggagccggggcctctgtctagagcaggaaggtatggtgaggacctcaaaaggacagccactggagagctccaggcagaggaacttgagaggccctggggccatcctgtctcttttctgggtctgtgtgctctgggcctgggcccttcctctgctcccccgggcttggagagggctggccttgcctcgtgcaaaggaccactctagactggtaccaagtctggcccatggcctcctgtgggtgcaggcctgtgcgggtgacctgagagccagggctggcaggtcagagtcaggagagggatggcagtggatgccctgtgcaggatctttaagcagagccaggagccactggtcagttgggatggattcactgggaggagcattttctgattttcaccacctcctttcttagcagcctcagggactgggtcctttcttcccaccctccatcagggttctctgccccaattcaggaaagcctgaatgattctggaaaattcatccaagctgtgggcgagctgatggtgactagatggtcaggaccagtctgctgtctgagtcccctcctaccccaaactccatcttcctggtggccctcctggagggaatgaagtcactgtttcccctagccaggcttgtgggtgggaaatccctgctggccccagaggaatggtccatcccgcctcagcccctctgccctgcacttagcagaagcttctggccagtgatagcctcagccacacccaaggtctggaccctcagccaacatccgaggctccgtccactctcctccggatgaagcccaaggctctcccaccgggagacggggcccagacagtcctgggaacagccagctctggctggaacgtgggtcacccaggcacgtcaggaatgaggcacatctggaaaagcctttgccgagaccattgctgtcagcagggccaggcagtgcccagcttcagtggcctcaagccccgcccagggttcagaagtgggggtgggggctgcccccttactagcttggctcgggcccgagtccatgggaggacccaggagccagcagagggcgagggaacagcacctgctaagtcaggaagtcctggaagagagctgggctgcacacagtacctgccctggagcccagcctcctagggctcactgggaccacaggggtggctctggctgccctcagctcctctgttgcccactcttagcccggtgcttccattcccaccccaccaccctaattatacagggttgttggaggctgtcccctccctccctccccacccccaacccatcctggcacctctctgggcctgcagcccccagattttgtactgggatttctgtctggtaaccaggtcattgggggcccttcctgacaggtgtgcagagaactgcatttgggctctgggatgggggcatcctgagttttagtgccagctctgcctttccttggcaagtcacttacaatctgagcctttcggggttgcaggaaacaggccccagctggacactgtgtcctttcttcctttcttccttctctggttggcctggatttgtggcagatcagggaaaaggaggcggaggggttggagacgtccctgggcctggggctccagcggcaagcctttcccctttttagccacatggccgggtaacagccacagggcccctcggaggtggtgggcacgtgagctctgtattggcattcctggccgtgcctgcattctggtggcgcctcctggcgacagccatgccttcctccaaaagaatggcaccataatggtggtattaaaggcagaggccacactcacaagggggagaggttgggagatgcaaggggtggtggagtgacaccctgaggacccgcatagcctcctgagattggtgggcacctacttgcctggacaaaagtgctttgcctgaccacttccccctggtccccctggcctcctgccccaatgcagaacaagggcttctgctgagtgcacacacacacacacacacacacacacacacacacacacacacactctgcaatacctcgatcatcagccaccgtgtcctcacctaacctgcgggccctcacaccaagatggaaactgcatgtgaacaggagctggtctgtctggctcgtggctgtctcccctgtacacagagcaatgtctggcatgtgacacacactaaacatttatccaactatatgttggataaattagtaagttccagatgactctcacccacatgggccccctggaaaatcatgggtcctcggctgcacagatgctgacccagccacggacaccatcatggacacacgggacatgcctgggtccatgcaggcccgttttcctgtctctgccactctgcatggccacactggcctgagttcagtggctccttgcggcctggtgcctgctctgcccctgcttctttcctcaagtcttcttggctgggtcccagcacccgacagcctcagaacatagcagggcagggacaggtgaggggaggaggaggtgtgtatgtccctcagtagacatggtctacgggagatgcccaggagcctgtggcctgaagggaaatggccatgttccagaggaccctggtctaaggggtgccacccctgccctcaggagccaggtctgcaggagaaacagtttgccctccaaaacttcaaggtgaggggatcctagccctgcagagagagctctggttggacgcccctgaaactgaccagagagctcctcatgtgggtcagtgtccctgccagggcatggggccaggggccaggggccaggggcatgagggagcctcccagagactggaatgctgagccagggctcctcagaggaaaggatgtagaggagggcccaggaagtagcccagtggggccagtttcctctcctggacagctaagaaagtacttatgaccttcggccacctgggctgtctgagcaggcagggcctgctggccaccaccgtcctgtacaggcacttaggggaatgaatcttccccacctgcagccccagcaaacacacaccaggctggtccctggcaattcaccccaagagccaggccacagctgggcagaggggtggccagtaacagctggtgtcattctctgcaggatagcccctggacaagaggcataagacccactcatccttgccctgccccaggcacacttagaaaagtcctctcaccgggcctcagtttcccacctataaatgggaagatgccaacacgcccgagtgggactgtggtggggcaggcaggaggtgggaggagagcccagatcatcccaggccttccctaggggacgcagggggaccctcccttctgggcctggttcttccagcacgttccatgcagcaggcaagagggccaggcccaggggttcctgacagcttgctggccctggagtccagattcttgtttgttggctggcgctaggcctctggattggagatgcccggggcacaggcggcccacggggatctgcagcagggcctcggcccctccctctgcaggggctcgtctggtccctcccgctctctgcctctcctcatttatctctccctttctgcttcttggctctgggtccagtcctatctcccctgtttcagtttgtcttttcctagccctttgcgctctctctgtctctctcagccctgcttgtctcactgtctctggctgggggatctgtctctttcacttccacttttgctctatttccctgctactgtctttcctttctccttgtctgtctcttctcctcccctcagccagcatctgtctgtctctgcctttctctcctgctccctccctccctcctctccagcaccttccaatgccaggtggggctgccattccttccaccttcccagtgacccgccagtgtgactgccttgagaggaaagtcctaaactgtccctatcttcaccagcctgccctcaaatcattggttcaaatcgctgtcgagaagtttgggagctcccagggcgggggctttctaacagctctgcctagctcgggcctgccctcaaccgcagcatgcagggcagccacagacaacctctctgcaacttctgatgcctccgtgcccccatccacagagccctggctctgggggactggggactctgggacatccctaacatggcatgcagtggcggtgcgggaggacttgactgcccctctggagccctgggcccggggactccaggccagtgcctctctgggtcgggatggggatgtcaggccagcaggatcatggtacctgcctccagggagggcaacgtccacccactgagtccagcccgcccaccccacccactccggagcacctggctctgccctcaggaactccctgagctttgcacacagggccgagacacctggatttctctggttccctgagtggggccagcttggaagaatttcccaaagcctattagagcaacggctgcctcctgcctgcctccttgggctgggcagggctgagggcggagggagagagagagagagggagggggagaggaggaaggaaaaagttggcaggccgacagcacagccgtgtctgcatccatccagaggaggtctgtgtggtgtggggcgggccaggagcgaagagaggccttcctccctttgtgctccccccgccccccggccctataaataggcccagcccaggctgtggctcagctctcagagggaattgagcacccggcagcggtctcaggccaagccccctgccagcatggccagcgagttcaagaagaagctcttctggagggcagtggtggccgagttcctggccacgaccctctttgtcttcatcagcatcggttctgccctgggcttcaaatacccggtggggaacaaccagacggcggtccaggacaacgtgaaggtgtcgctggccttcgggctgagcatcgccacgctggcgcagagtgtgggccacatcagcggcgcccacctcaacccggctgtcacactggggctgctgctcagctgccagatcagcatcttccgtgccctcatgtacatcatcgcccagtgcgtgggggccatcgtcgccaccgccatcctctcaggcatcacctcctccctgactgggaactcgcttggccgcaatgacgtgagtggggtgtccctgggcttgggggggttctagaatgatgctgaaaggcactggttccatcctctgcccattgtgcagatggggacactgaggaacggagaggacaagaggttgctggaggtcacgtagagagctggggggaagagctggggctggaactcagctatgcatgcctcccaaagcctgttttctgccaggcactgtgggaagctgagatccagagaataatggtcttgccaatgtcccctgcagggcatctattatggggaataagcttggccagcagttcctcgccccttggctgtagctttttggcccttctcagtcctgcctgtgccgccagctccctcctcctgcagccctgcaccctggggaaactttgcccgctgtccccagccaccctgaaccaaatgcccagcctgtctgcagctggctctgcaagtgtgtgagcaggactccctcagggagccccccatattcacactagtttccaaataaaccacctctaggaatcaagagaaaggccctcttccactcttttgcccctgagattagacaaagataagggagtgaaaacactctctggggctgtttgaaggcagttttcctgga

SEQ ID NO: 11485 - DNA, 6000 bp, Homo sapiens
tggtaaagatcaggctatgtgttctaaaaatcagacccccaagttgtttctttatgtactaagttagattgtgatgcactatgaaggaactcaaagtatggagacagcatcaggtcaatggcctcctgtttatttaatttaacaatggcgatcagaaatattgccatcttaactatattgtcttcaattcttgaatacggtatgcaattccaattatttatgtattaaattgcttttagcaatgatttttagttttcagtatacgagtctttcattgtttaaatttatttctaggtattttaatttttgaatgcttatgtaaatgaaattttcttaatttacttttcagtttgttcattaatagtgcaaaaaatacaacttaaatttgtgtttatcttgtacctgcaactttgctaaattattagttttagttgtgtcattcttgttttttcagattccttggaattccctagatataagaccatgccatctctgaatagagagttttactttttcctctctaatttgtatgcattttatttcttttccttgcccaactgctctaactagaacttccagtacaatgttgaagagcagtagtagaagtgggcatccttgtcttgttcttgatcttagggggaaagctttctttatttcattattgagtatgatgttaggtaggtgtgggtttaggaatttcccttcttttcttagtttcctgagtgtttttatcaagaaacaatgttgatttttttcaaatgctctgtgtcaattgacatgatcacatggtttctttcattttattattatgatgtgttaagcaaactgattctcttttgttgaaccacccttccattactaggatataccccacttggtcacagtgtataaccttttaatatgcttttggattcaaatagctgatattttgttgaggattttgagtctatattcatataggaatattggtctctagttttcttatggtgtctttgtctggctttggtatgagaatactagtggcctcatagattcagttaggaagtgttcccacctcttcaattttttggaagagtttgagaaggattggtgttaattctttaaatgtccagtagaattcaccagtgaagccatctggtctttgacttttgttttttaaggttttgttgttgttgtttttaaaggactgattaaatctctttgttatagatctggttatagttcctattttttcttgagttagttttggtaatttctgtgtttctaggaacatgtccttttcattcaggttatttgtcagcacacaactgttcacagtcaaatcttacaatcctttttccatatataagtttgatataatgtcttcactttcatttctcattttatttaattgaatcttatctttctcttttcaaatttggggagttctgagacatttttctccgctaatgtagtttttctttttctctcttttccttgtgtgacttctgtaatatatatttcggtatccttgttgatatcccataggttccttaggctttgctcattttcctgttatttctttctgctcctaagactggataatttcagttttcctatcttaaagtttactgattcatccttcaacatgcgaaaatgtttcttgaaattctcaagtgaagttttcacttcacttatttgtacttgcaagcccaagattttctatttggttccttttgataatttctatctttttattgatattttccttttgtttatacatcattaccctagtttccttcaggttttatgttcttggttttgtgtctagaattggtgagtttcttggtctcgctgacttcatgaataaagctgcggaccctcacggtgagtgttacagttcttaaagatggtgtgtccagagtttgttccttctggagggttcatggtcttgctgacttcaggagtgaagccacagatcttcacagtaagtgttacagctctttaaggtggcatatccagagttgtttgtttctcccggtgggttcgtggtctcgctgacttcaggagtgaagctgcagaccttcgcagtgagtgttacaactcttaaagcagcgcatctggagttgttcattcctcctgttgggttcgtggtctccccggcttcaggagtgaagctgcagacatttgcggtgagtattacaactcataaaggtaatgcggacccaaagagtgagcagcagcaagatctattgcaaagagcgaaagaacaaagcttccacagtgtggaagtcgaggtgggttgctgctactggctcgggtggcctgcttctattcccttatttggccacactcacatcctgctgattggtccattttacagagcgctgattggtccatttacagagtgctgattggtccgtttttacagagtgctgactggtgcgtttacaaacctttagccagacacagagtgctgattggtgcatctacaatcctttagcttgacagaaaagttctccaagtccccacccgattagccagacacagagtgctaattggtgcatttacaaacctttagctagacacagagtgctgattggtgtgtttacaatcctttagctagacagaaaagttctccaagtccccacccaacctagaagcccagccggcttcatctctcagtttcctttagttctttgagcatatgtaagacagttgacttaaatcattatctaataagtccactatctgggcttccttaggaatggtttccatcaatttctttgagacttcagaggctacacatgagtgaatgcaattaaatccacaatgtgatgcctctacatattcaccagaatgtataacatttaaaaaggaaaagaaaaaggaagaacacaaaacacaaatgagtatagtaagtgttggcaaagatgcagagtaactgaaattttcattcacgactagggcatgtataaattagtaaaacctaaaaactatttggcagtgtctattaatgttgaatatattgaatatataccctgtgcatagtaacactacttccagggatcttccaaaatcaaatgtgtaactatgtgcatcataagacaggtacaagaatattcatagcagcgtcatttgtaattaccccaaactttaaataatctaatgtcaaacaacagtagaataggcaagtaaattttagaattatatacaaaaatgaaaatgaaactattatattcttgaatatggatcaatcttacaaatatagtattaagcaaaaagagccacataagagtgcgtattatgtatgactatttataaacattcagaagcaggcaaaactaattgggtggtaggattcagaattgtgcctatctgtgtgtaggggtataatgactaagactgagcatgaggaaagcttctaaattgctggtaaacatttaaaattttgctgtgaggcggtggttacacaagtttgttcacactgtcactaagacaagcacttatgattattacacttattttgtatatgtgttatgctttaaaaggttttcacatctatcagtttataaaatttttttaaattgtattttatcagtattggcgaggatacagggaaaaattgctcaaatactagcagtgggaatgtaagttaaaacaactactcaggggagcaaatcagtgaaatctattaaggatttacatcgtgcaaactctgtgatccagtacattctcttgttggtatctgcactctagagaaatacttggacctaagtacaaaaaggcatctacatatatatttatggtaccattgcttctcataataatattaataaacaaacgtgagggtgggggaatggtacattaattatgtatgtatatatatacacatattggttctgaggacatgcagcattttcagagaatgaggtagatttatatacagatatggaaagatttcaatgctaagtgtaaaaaagtaacatctacacttgcaaatgcacaggaactaggagtcatcatctacagactgggtttgtaattagggcctaaaagggatataagcataattgtaacgtttaagctttttttttttttcgcatggacaaaatcttacttgtgtaatttaaaattaataacggtacttagaatgactttggaaaaatatacaaataatgaaatggggatccaaagaatgttcactgtatacctctgtacttctaaaaatgtgaataagtgtagcatccgttgggagaaaagtttaattaaattttaaataaaacaataaaaggtgcctaacttcgtgtgaaaacagacatatagatataattaaatgtgactaccgcttagagatgttagttatgaactaggagcgctgagaaaaggtatcctaaataggtctgggggaagtgagagttagaagaggtgactcttgagctgagtaccgacatagaaatggtatgccctgtttttattcctggagggctcagcatgaggtgcccaagaggccctgaaacccatttccatgacattttcccacgagctggagcataaacccccaccgaataactgaagggaagcggaaggcgcagaaacgcggacgaagaggaagcgggcgcttgttaaaccgtgcgatgcacaatgcgggaaagtccaaccagctccgtgtttcaaagctggatgcccagatttcccacccattcctacaggcagaccggctcgccctctccctccttcccgcgtcgtttactggtcagtagaagattgacatgtcatctggccaataggttggctcctctatggaggcactcaggaaccagtcgggtctttggtccctcgagcgagatgcgagctgtgtgcgtcgacgtcagcgtgctgacgtcacgggccggaggtcccggggctgctgggtgcgggcggtgggctgcgcgttgtccgctggactgggtcccggtcacgccccgccaagccccgcccctcaggccggggcgcgaccgcggatccgcagttcccgggccagcctggggcggccggccaggaaccacccgttaaggtaggctgggtttctcgttcccctatttgacaggttggaaaactgagtctcctgggtcagatgacttacatgggggcgtacaggggacccgcggacggaggccatatcctggtcctgttctgtttcctgagtcctgcgcgagcctccaggggaggaggaggggcgaggcaggctgtgctcataatggacacaagagtgaagttgcagaatgctgagccccgctgctcccacggcgtgggccgggattcagggatggatataggtagcgggagtgtcctcattcctccagcctgcggaccctgaggagtccccggtggggtcggccccgggctggcgccatgggcccccaagaaggaccaagaattggtgactgggtgtaatgcgtgggttgtccagacacaggcggttgtgagtctcttctattcattgagaaaagtcgtgttcaaaaaaaaaaaaaagaaagaaagcacgaatcatgaatgttctccctgtggtttcagttaactgcttcacctactcgtagatatctcgccattgtttgaaatcttagttgcttgaatacttttgatttagggttagggatttttccccctctcttttagttcaaacatgggtggacattgtggaacttttctttgttcactgtgtcatttgtcttctatttcacagatggaatcactgaattcatcacttgacacagtactagtttggataagtttagcaaggtaaccaagtaacgggtctaattaaatctttactggaattagtccagtttgccacatttccttgttaggaagaattctgaaaggtaattcccgtctgtataccatatctacccatacgcctctttctagaagcaggatctcacaaaacgacttatggtatccttgttttattgatggattctgataaggtggtggattattcatgttcataaaatgaaaacatacaatatgttgtcgtgt

SEQ ID NO: 11486 - DNA, 6000 bp, Homo sapiens
cagccaaagcatattcaatctggacaagtttaccagacgggcttaaaagaaacacaggtatttgtaagttcacatatcatcaaatatttattgtaagaacatctctgagatagtacagacatacaggtcaaatccaatttatccaactccagggagtaactggcctttgacctctatcatgaagtggcacagaaaccaagtttacagctgggcgcaatgactcaagtttgtaatcccagcactttggaaggccaagacgggtggatcacctgaggtcaggagttcgagaccagcctgactaacatggtgaaaccctgtctctactaaatatacaaaaattagccgggtatggtggtgcatgcctgtaatcccagctacttgggaggctgaggcaggagaattgcttgaatccgggaggtggaggttgcagtaagccaagattgcaccattgcactctagcctgggcaacaaggccgaaacctcgtctcaaaaaaaaaaagagaaagacagaaagaaagaaaccaagtttacaaggcaattggaacatactcctactgaagcactactttctctttggttgttttttgtctgccacatggagcagtggtattactgttgcttcttttcaccctaagttttctatgcctgttttctcacctgtaaaatgaggacacagtaaccacaactggttttccgtatcagtggattccacagggctgactacaggacttgaatacgccctcacttggtatttgtgggggtactgaaatcaccgtcccctacaagtgtcctgtacctatttcaaagcattgttgtgattaagtgaagtaattcctataaaactgtctggcataaaatcagtaacaagcacatactgaatagtaatgttattaagaacatgtatgtgtctgttaaaaaccaaacagcagcacatatttcaggtcggagggtggttttagaaaacagacatggcctaagacaataagacctagatatcactcacaattaagtattctctatataatatacaactatttctagaagtcatgagatggtcacacttaacagatctggttccatggatttggtagctaaacgcaagtctcaaactggccttttaaagttatcctttatttcaacctagttgtttaaatggaatcatcataaaccaacctaatttcatagataaagtctgagtgaaagtaatttgtccaaagtgacacagctaggtccttatctcccgtctactaatgaaaatataaatttcagaaggccgtattttctcttcatataattacgaatattcccttggtcactcaaatctcaactccatccctccttgctccaaacacatagactactctcagacttcaaacgcctcattgacaagctaatccctccatctgaaatgcatttctctattgccctgtgaactcctttcattcaatcatgtcctaagggaagttgccctgaaccctcaagattaagttgaatacctattcactgatgcctgtgatgtcctgcacttcctctttgtctaagattcatcatatctgaattgttattttttttttttagtaacagggtcttgctatgctgcccaggctggtctcaaacacctcgtctcaagcaatcctcctgcctcggtctctttattatttttacaatatttgtcttcctcaataaagtagctatgttcagtcaggattccagcacataacctaataccaggaatccacaatcatttggctgacagagacacatctagaccaattaaagaaacagacctaagggtgacagctttaaggctcttgatataattaatttgagcagaataacatcaactgacatttaaattaaaaaattaggctgaacttttcctttaatagtcactatttcaataatcatatcataactttctgggtccatccagctttcaattattgttcaatacctaattcatatacccctgggtaacatttaaaggctcatgtaaacttaatagctaccatttctctgttcctattacctgtacatacctatctttaccactgcatgatttcactgcgtgaaagctcactaacctgtgagctggctgagcaatcaaccatctttatattccataatgccactatcccattccatagcatcagcatccctacatgggataactgaaatagccttctaactggttttcctctttctcaaccttacttccacccccagccaaagttacctttggaccatgtcacctacacttagattttgtaataacttctttgttcacgtaaaataaaatctccttctctggcctacaaagtcctacacgattagccctctcccacattatctccttgctcactatagcacatttgcctcatttttattcctttaagagctcaagctccttcccagtttcagggctttcatacatgctgttccctctgtctacaagtctccttattcctgaatcttcaaatagctggttacttttaatcttccagtctcaaaaatcacccccaagcacaagcctttcctgattactcaatctaaagtcatattccttccttcacccatttaaaataaaattccttagtaagagaatgtattagtaggcaccaatttgtttactcatttattgtcaattcctcaaccaaatgtagtccacaagaactgtttcatcctgtatggtctctagtcccttccaccattagtttacttctgattatgagaggctagaaacaaatattttctttttatctaaaacaggtgaatccaccatgttaaaacacacacacacacacacgcacacacacacacacacacacacaagtttggtttttttaaaaaaaacttttagatatggggtatcactttgtgacccaggctggagtgcagtggcagaatcacagctcactgaatcctaaactcttgggttcaagtgctcctctcgccctcagcctcccaaatagcttggattacaggcacatgcctggctaattttttaatttttttcagagatagggtcttgctgtgttgcccaggctagtcttgaactcctgggctaaagtgatcctcctgcctcagtctcctgagtagctgggattacaggtgtgagtcaccctgcctggccaaaagtttattttaataaagaaaatttgttataaaaagattcagtccctgaaggtatacggttgttttatgttttcagctccactaggattacactttcttcgcgataaaagaccacatttgcagcctgggcaacatcgcaagacctcatgccttaaaaaaaaaaattagcaggcagggtggtgcacacctctagtcccagctactccagagactgaggcaggaggatcccttgagcccaagagctggaggctgccaagtccctgtccctaaaaaaaggaccacatttgttttcttcataaataggaacagtgaatacatcctgcacacactattctgtcatatgtaatataatgagaccttttattgcataattaaattaatctcgttcaaaggttacaaaaaaactattacatacacccactgcttactgaaaactgccaagagaaaagtacttttggaatttaagacaacgttatgtaatggaaagtgtatttttgttatcagaaaaaaaacccagtttgaatgtcaactcagctactcaccgatgaccttagacaagttgtttaatttgtacaagctgcggttagttcatctgtaagaagctgagataacattcattatagcagtggaaagagatggagcaggttaaggttaagttgcacctaacaaagtactcaacaagttagatcccgcctgccttcagttgtcaggagtacattttaagtaaactgggcattactgatccttaagaaaatgggtaagtcagaaaacttccccagtcaatttttaaaagtcttcggcgatggttttctcacgttgagagccatggttcgccccaactgtattttggaaagtaaacttattattctaatccccttttctacaatagaaaaacctacaatcttgtttaaagtaaacatccccctccccgacgttccccccagtccaccaaaaaaagaccaaaactcaaacttgcctcgttgttaggggttcacaaaaaagtgataggggctttcggtttttagtccttatgtttctaattcgtgcatcgaagaaaccgaaagcgggaggttttgaaagacactagtgccaaatggagaccaagactccgacttaactgtaaagctgagagttttccaagaaaagggaaccccacatatttgaccaagattccaagtttcagaaaccaccgcatcaggtctacttgagccaggaaaaaaatcctgagttcggaacgggccacccagagatggttaagctaaaactgccttcttttctggtctccaaagtgaaagcgaatccttggctatgtgcctcaccgtcccgcagccccatgttaaccccgcaaaaccgcatccccccgaccctccagcagcctccgaccaaggaagctccaggaatcccgggtcggcctggcaaatgactttgcaaagccgcatttccaactccattccctactggaccctccagaagcaccaatgccgacgtcaggatgggaaaaactaaatcgacagagtaccagcaacctcgactacgctgaagacctcgagggccccttccatacctgaatgtagtcagcgaaaagctgtacccgcgctccgccatctttacccgaagagccaaagcacagccgcacacatgcgcactgtggccgatttcctttcatttccccgcccctcacctttcctttactctctatgattggaggagagtcagagctgctccaagagcatgcggggtgttgtagttctaagaagcgaggcttgcccgattctgtgcctgtgcgcatgctgaaagcaggggcgggaccggggcggtcttccagcagggaaaatggcgctggccatgctggtcttggtggtttcgccgtggtctgcggcccggggagtgcttcgaaactactgggagcgactgctacggaagcttccgcagagccggccgggctttcccagtcctccgtggggtaggtaaagaagggctccgtgggagagggggctgatgacgggacctcgggcagcgtagcagacgcagcttacacagttcgccctcagccccggttctgatccgcggcctcatgtcggggacgtagttcgtgacattcccatattagcgagaacagaacgactgtttttgcgctccctccaccgcaaaaaaaaaaaaaaaaaaattcctctgcttgttccattcgtacacagaatgtaacccaagcttgtgtcaaagataaatcatagccagccagtaagtaaagcgctgaaaacagattttattcagtaactactgcaggtaaagagctgagctccatcccggtttgtgcagaggtgactttgggcgttttaaagggagaatgagcgaggcgggagtgtaggggctctgtagagtcagagaagtgtagtatagtgaagtcagtgcaaatgtgattagccggctgtgtctgctagctcgcagttgtcttagggagaattctatcctcccgcagagactgggagacaaaggccctatccttcctaatgattagatttcgaaggaatggctctcagggccttgaaagaaaagcttccgagttagttgcaagggatacgtatttacaattatatgccctttccaggaaatgctctaagggagttcgggacctactatcggggtatgttggccaaaataaataggaaattttccaggcagcgttgagctttctcaggcaggcactttaaagggggggccgaggtcatcctaggatacagccttatgctgctagaaactatgctagagtttggtcaagtctgtggagttcagggatttgtacagagttgtcctgagaggacagttctgcaggtctcacttggcatcaaggctcaccactctctggat

SEQ ID NO: 11487 - DNA, 6000 bp, Homo sapiens
tgattttgtgatgtgtcagtgctgggactgaatccaagttgggtgacagctggggcgatgcagcagaaggcaggtcttgctttttggtaacacagtgagcttgggaagtctgcaaccacatgactatgaatgaggcttcctggaacagtagaggctgagtgaggccagagaggagcaggaagagttgccaggagtgggctgcatgacagtttgttaagcatttcactgttgacatctgaaccccaactctgtcccttaccaaccatctccttaaattgaatctcagtctctatgtctgtagggtggcaataatattttcccctgtttttgtgaggattaaatgatgtggcacatggaaagtacttggcataaggtaaactttgggacagccactataatgtgtcaagtggatacactgaaatttattccatccaagcgctgtcttcctgatctttttgcacaactttcagtggaaggaagaggggctccagagactttcctcagaaatggctctcacctgcctcctatagggaaatggtgtcagtgcaagcagttgagcctggactgatagcacccagcaacccagcttgtcagactactgtgtccatatctgtgggtggctgagcctagccacggccaatggctgttcctaatgtttactaccaaaacaggggaaatgtggaaaagccctttccaccctctgtacttggaaacacccagggaagagggttggtgacagaggtactgagtgagtgggcaggtggtgggaacttcctttcaccacagattatttaaagcaatgtttctcagctgggcgcagtggcttaagcttgtaatcccagcaatttgggaggtcgaggtgggtggatcacatgaggccaggagtttcagaccagcctggccaacatggtgaaatcccatctctattaaaaatacaaaaattagccgcgtgtatggatgcattcctgtaatcccagctactcgggaggctgaggcatgagaatcgcttgaacctgggaggcagaggttgcagtgagtgggatcacaccattgcacttctgcctgggcaacagagtaagaccctgtcacaaagcaaaacaaacaaacaaacatatatatctgcaaagcaatgtttctcaaaactactgctcccaaaggacattttgacgtttttgattgtgcagtggggagggggtgggttggtactgacatttctacaaaggcctgagatgctgcctacacaatgtacagggcagtctcccaacaagaaagaactatctaacccaaaatgtcaatagtgccaaggttgagaaaccttgatttagagtaatgtttaaagtgatgctgttgtttttccaatatatcatctctttcccataatctcagatacggctgcttctagcatcacaactttgtgaccttactgacaacttccaaagaccaagtttctttcagttgtatgtgtcttgcaagttcctttctgattacatgtgaaactgtgcccgacagggttaaagaaactggtaactaacagaaatcttgagcttgtcttgcagggcagccgataaggaaacagtttgctataatcccctctgcttatacaacttgctggaacaggttggaaccaatatggctgactggagcctgtgcaaaatagacttactagcccgaggagcggccctttgatgtcacagcccaaattcccacagcttgttttataccacctcctgaatctgcatgtgacccttgaagcagcatgaagaagcaacagctcatgaccaagagattttctaaacacttcttcgtttcagccaatcaccgtccagcccgaaactccacttccaaaatctctcccttaaatctactgctgcgaagcaagtattgggagacagatttgagcccgtcttctgtccccttgcaaggctgcttggcaatacatctttcttgctacaaaaatccaatgcttgggtgtttggttttatgttgtgcgcaggcaaatgcagccggtttagtttggtaacacgtgatgtcacttaatacacaagaaacgggcaagatatggcatcctcagggagctgtgcctcactcattcctatccatagacttgccttctttcaacaacgcaagcaaaaagaagggttcatttgggttggttccaagtctttgctattgtgaacagtgccacaataaacatacgtgtgcatgtgtccttatagcagcatgatttataatcctttgggtatatacctagtaatgggatggctgggtcaaatggtatttccagttctagatccctgaggaatcgccacactgacttccacaatggttgaactagtttacagtcccacgaacagtgtaaaagtgttcctatttctccacatcctctccagcacctgttgtttcctgactttttaatgatcaccattctaactggtgtgagatggtatctcattgtggttttgatttgcatttctctgatggccagtgatgatgagcattttttcatgtgttttttggctacataaatgtcttcttttgagaagtgtctgttcatatccttcgcccatttgttgatggggttgtttgtttttttcttgtaaatttgtttgagttcattgtagattctggatattagccctttgtcagatgagtaggttgcaaaaattttctcccattctgtaggttgcctgttcactctgatggtagtttcttttgctgtgcagaagctctttagtttaattagatcccatttgtcaattttggcttttgttgccattgcttttggtgttttagacatgaagtccttgcccatgcctatgtcctgaatggtattgcctaggttttcttctagggtttttatggttttaggtctaacatgtaagtctttaatccatcttgaattaatttttgtataaggtgtaaggaagggatccagtttcagctttctacatatggctagccagttttcccagcaccatttattaaatagggaatcctttccccattgcttgtttttgtcaggtttgtcaaagatcagatgcttgtagatatgcggcattatttctgagggctctgttctgttccattgctctatatctctgttttggtaccagtagcatgctgttttggttactgtagccttgtagtatagttagaagtcaggtagtgtgatgcctccagctttgttcttttggcttaggattgacttggcaatgcgggctcttttttggttccatatgaactttagttttttccaattctgtgaagaaagtcattggtagcttgatagggatggcattgaatctataaattaccttgggcagtatggccattttcacgatactgattcttcctacccatgagcatggaatgttcttccatttgtttgtatcctcttttatttcattgagcagtcgtttgtagttctccttgaagaggtccttcacatcccttgtaagttggattcctaggtattttattctctttgaagcaattgtgaatgggagttcactcatgatttggctctctgtctgttattggtgtataagactgcttgtgatttttgcacattgattttgtatcctgagactttgctgaagttgcttatcagcttaaggagattttgggctgagacgatggggttttctagatatacaatcatgtcatctgcaaacagggacaatttgacttcctcttttcttaattgaataccctttatttccttctcctacctgattgccctggccagaacttccaacactatgttgaaaaggagtggtgagagagggcatcccagtcttgtgccagttttcaaagggaatgcttccagtttttgtccattcagtatgatattggctgtgggtttgtcatagatagctcttattattttgagatacgtcccatcaatacctaatttattgagagtttttagcatgagggttgttgaattttgtcaaaggccttttctgcatctattgagataatcatgtggtttttgtctttggttctgtttatatgctggattacgtttactgattttcgtatgttgaaccagccttgcatcccagggatgaagcccacttgatcatggtggataagctttttgatgtgttgctggattcggtttgccagtattttactgaggatttttgcttcaatgttcatcaaggatattggtctaaaattctttttttgttgtgtctctctctgccaccctttggtatcaggatgatgctggcctcataaaatgagttagggaggattctctctttttcttttgattggaatagtttcagaaggaatggtacaagctcctcctaaaatgtggcacatatacaccatggaatactatgcagccataaaaaatgatgagttcatgtcctttgtagggacatggatgaagctggaaaccatcattctcagcaaactattgcaaggacaaaaaaccaaacaccgcatgttctcactcataggtgggaattgaacaataagaacacatggacacaggaaggcgaacatcacacaccggggactgttgtggggtggggggaggggggagggatagcattaggagatatacttaatgctaaatgacgagttaatgggtgcagcacaccaacatggcacatgtatacatatgtaacaaacctgcacgttgtgcacatgtaccctaaaacttaaagtataataataaaaaaaatgcttactttaaaaaaagaaagaaaagaaaaaaaaaaaaaagaagggttcaggccgctgtgggaggcccagcaccacccagcacaagacagtacggtatcccgccgcgcgcccgactccacctggcgagcagggaggggccaagcttacgcgaggcgtggcatcccgcccctcgctgcattgtacttccgggctcacatttctgcatccggagtatgagaaccctcaaccaggctgaccggatccggaagtggattgcgagccaggaggaggaagccggcggtggccccgtcagcagccggctgctgagaggccggtaggcggcggcggtcccgaggggcggcggccgcgctgctccctgagaacgggtcccgcagctgggcaggcgggcggcctgagggcgcggagccatgaagctgtacagcctcagcgtcctctacaaaggcgaggccaaggtggtgctgctcaaagccgcatacgatgtgtcttccttcagctttttccagagatccaggtgagcggcacaggctggtgggccgtggcggtcgggcggagaggactggggtgggggtccgagtcggagtgggcctggggtcggcggagggatgaggggagggtggaggaggccaagggtaggggcagggcggggtggccgagtgcccggggtctgagaaggctggtgtccgagtcagaggcggggcggggtggggagggcccggggtctgctgtccgggcttggtctcctataatggaatctggccgtggactctacctttgaggaaccaacattagctctttaagagcttataccattctagaatatagttctctactcagtgtttttcaaatttctgtcgtgtaaaaattttaaggagactgtgaagtagtgcagatttccaagcttcatgccaagatgttctgaattagtagattgaggcctcggtatttatattttagaccaacacttcccacccagtgattctgactctgggagcttgggtgccgcatcttgagagccatattttgattttcttgcggggcttcccaacaattctgtatgagagatagtgatatacttttttttgtttgtttttaatgggtgaagtcactgaggtaccaagaggttatatcacaaccagctagaactgaaagccaggtttaacgctttttagttggacactagtggtacaaaaggattccacacggaagatgcaaatgaagcatgggatctgtagggcttacaggcttttacttgtttctggggcgctttaattgctggaacgtgttagaagtaacacagac

SEQ ID NO: 11488 - DNA, 6000 bp, Homo sapiens
gggcccctgtctgcctgtccttagggtgtggattaggctctggcttctgtgatggtgcaagaggcaggatggtctccagacaccttcttgcagagtgattttgaccaatgcctttccagcaccttcccctggttatgacagggagctcccaggccaggccacatgaccccacaggtaggctgaccccatggacccactggagactttgagggcagagctcgggcacctttcatcttccttgggtggtcctcatgtcgctgtccgctcatgttcctggtgttctggcatcaccttgtgccggtgggggctgggctcccgtgaggtcctagggcagaaggaggtgcttgcagggcctctcgctgctactgggacatccacaggacctaatgtttatgtggaatctccaggctgccatcgagggctcctgagctcatcctgaggacccagggtccatctgagctggctgtgggctgagatcctggctggggccctgctgtcaacctctcctccaggccctgccttgtccctgctcctgtgctttcctctcttcaggacaaatggtttgtccttatggtcccctttccactaggattttctcatcctcatctgtctatcccagccggatttaaagcagtcacttcagacaggagccacagggagcctgtgagggagtagtgcggtggtggtgagtgtggctgccctggctcccccagctcaccgtggtgctgtccttgacccacgagctgttgagaagggtgcagagcccctggcacagccaaccctgttgcccccagtgccgctgcccagcttcggccatccaggtggtgggtagacagaggagtgaaccccaaaggtgtccatgccccagttctaagccctgtggccaggtgctgtcacacagcaaaggggactttgcaggtggaattagggttagggatctaaggatgggaggggaacttggtttatctgggtgggctcagtgaccccttggaatggctgagggaggcaggagagcctggaaagattcgaagtgtcacagagatggtgccgtcattgctggcttaaagacaaggggccaggagccaacaccagaggccactccacaaccccagcgccagtcagcaaggaagccgggtgtcgctcacacaaccagaaggagctgagtttggcaacaacccaagtgagcctgaagcagattcgccccagagcctccaggcgtgagtggagcccagtccagcgacaccttggtttggcctgtgagactgagaagagagccagccacgccatgctgtgcctggggtccacagagccgggaggtcacacatgtacatcctggaagctgcccaaggtgtggccacttgtagggcagtgagaggaagccgtcgcggggaccatgctgccttctctgggctcacgactgttctggaaaggaccccatggcagacttggcaaggtctccacttcaggggcaaacatctccatcatcagcaactccaaaccccagccacttcctgggagttcaggaactgtgtttagccataatgtcccttggggtttggtgaaaaacaacttcctttttatttgtgggaaaactgtattatattgccttatttatttttaatcatgtacaatattcatgtacaaatgttagagccattcgggtaggattctctctaaattatttattgaagaggctttgtaaatagtgcaccagtgacaggtgctgcctgtttactcgtaccaaaaatgaagacaagccccacacccacctcagcccttgcttggccatgctgtggccctttggaaatgaccctgtgtgctcccctcgcgacccttgcatgcctttcatgcctgatgccgtagagtagaacacagccccggaatgcttccagttgcttgcaagggaccatgccggcccgggtggtccatgcctgcggggtgtctgtatcctgcaggaggacgcccctacagacccagcaacccaagttgccagcccgtgtttctcagactttaaagccaccagggcttctggaacacctgtcatagaagcaataactctaactctatactgtagagatgagtctggtccgaagcagattagtaatttagagataagccatgcatacaagtttgccccattctctggcttggggtggtgggaggcggggagctgccactcccaaagcctccaccccttcctgaagacccagctatgaaaccgcagttcctgtgggttgggctgcccaggctggtcagagctcagcaccccaggtctggtgagcagacagagccggcgttaaaccccgatcaggtcattgtcaccacacccttgcttggatgaggaaggaaggaggcaaaggcacccactccatccaagatccgttccaattgatgagcctcagtactggcctcacactgaccaacggtggtatgctgcagtttgttggtttggtgcagagtctaaaggataacatatcaaggcttacctgtgataggccattttaaggaaatggtggcactctgaaggctgtccccattcaccttccacaatgctggtaccatcctggtagaagagccctctgaacaggacacctgttcaggcctgggggccccatgctaggcttgcctgggtgtgagaaggtcgaactgggtggcttaggccttcaaattgagcttgggggtgtccaagagaggggtcttattcgaggaactcacataccccaaataaccatcagtgcacaaatcattccatgctctttggcaccaggcaggagatgctgcaggcaggtgtccgtagttggcaaaaatgggcagtaggggaaatggagttgcttcaacctttctcagtcccggccctcactgcacccaccaagtcaagcagagctgggtgggctgagaccagcatcccagctggactgagcctggggggaggggctggagccaaggagcccccctgggtgggggcatcaggagcaggggcagggcctgaggactgctccccctgcatggagggcaggccaggatggagcccagggtagactttgaggaaggctcagtgggctcagcagaaggaaggctcttctcatagttgtggtttttcacagatggatttgggtgatctgagtgtggtcaggccctgccgttggggaatgaatgccacacggggtttgtctgtaagctgcagtgtctgtgattctgtgtgaactgacagcagggagctgaaggacaggccccggccttgggagaggacacgggcatgggctgctggatgcagggctcccagggctgtgaaggcagaggggtctctggaggcagacagggtgggctgggggccagcagcagggggcagagccccagccagggcagctgcttcctgcacatagacattcctcctgcgcagggccaagtgcccatgagcacagccccagacagacacggtggggagcttggagccctccgctcacctagaggagccctgggacacgcactggaaagtattctaggggcttcctgccttatccttctgtttgttcatacacttagtgaaagcagatcctgtactaggatgtgaggatatctgtcacctgcgtggtccattccataaacaccagattccatttcagttgccacacattttggggctagacttccctaaacaacatgccattgtgaaataatgcatatatttgtatttttaaatttccctgaaaatttaatctattctgttccatatgaagtctgtttcactaccttaaaaaatagatactccactagaggctgtgcttaattcaaatccatgtgtgtgcctgcattacatgtgtgaacacgtgtttctgtcgtgtgtgtcatgcacatctgtgtgttgcatagcataagccaaatgaaaatcatttgttcatgggattcatatgaggaacaaaattaaatttgaatacagtcagataactgccacgcagggcatttggggaaccatccccgaatgccctgatgtgatttccctcagaaaatccttgttattagaggagaaggtctgggcaggggcagcagcatctcagacatcaagtcaactttatcatctactacatcagcactgaagtccaggggcattgaggcactaactaggttccattttctttggtttggttacttattttttctttttgggttctcggtgtgcagaggctgtagagagagcctcagggcggtgaccgctgcaggaattcggccctccagctcccctccagttaccaggagccgatttggaggccaggccttcccagctgagtgtctgtcagcttcattctctctcagctgtgcagtggaagagcaacaacagacaggtgaccttcttgggttgtgcttcacaatggactgggaaaaacatctttgaaatcaggaaatcaggccgggcgcagtggctcatgcctgtaagcccagcactttgggaggcggaggcgggtggatccattgaggtcaggagctcaagaccagcctggtcaacatggtgaaaccccgtctctactaaaaatacaaaaaaaaaattagctgggcgtgttggcgggagcctgtagtcccagctacacgggaggctaaggtgggagaattgcttgaacccgggaggcggaggttgcagtgagctgagattgcaccattgcactccagcctgggcgacagagcaagactctctcaaaaaaaaaaaaaaaagaaagaaagaaatcagaaaatcgaccacagtggtagccacctggcctaatgctgtgtttttgtacctgacaggggtcactcattttaggcacaactccttcattctttgtgaaattagtgagtttccttctacccgtcaccagattcaatatgttctattaatacaccgataaccacaggggaagggcacttgtcgctctcccacctggttaccacagtctccatgggtcttttgccgtgaccacaaataaaggaaacactcatcactagtatctaagtcgggctttacagtaactatgcaccttctgtgtgcttcacctcactctctacttcaaacagcccatggagggaggtattattatactccttatgttgacagtgaagaatctgaggcccagagaggttggggacttgagtaaagtcacacagccctgagaggcaggaccagggttccattcctgctctatccagttccaagcccttgtgttttccattatgtttagtgcctctttgctaacagcaacatctgcaagatttgtgttggttttgatggagaactctagctcatccacatgctagtgcccaagtggtggaggggccacctcagcaggtgggttctgaatgcagccaaggctgtccccgcaatgggtgagactcgctccaactgcccgccctcagagcaggtgcctaagtcctccctggcactggcaggccttacctcacattgctaaattaaagcaatgcaattcctcttgggtaagaggaattcctccttctttactaactgatccccagcaaggaaataaaatgttaggctttaaaaatccctactttgtcatatcagactatattctaaaactatatttgagcgaaacctgtcattgcgtctaatttcaaatatacagaatctccttaagagctgttgccttatttttttgtaaagcctctctgacatcaaatggggagaaatggtggcacctccagacaccctgaaactacacaccatttcttccctgctcagcttctgctcaggagttctgtgagctatgggaaggccattggttgtatttgctacttttactttcatcttcctctgctgtagagccatttaatgttattgtcatatgctgctggtgaggtaaaggtgggtccgggtgccttcccaggggttagaggatgttcaaagggccgatttcagcaggagttcagagggcttatgatggatggtgagagatttgacaaccaccagagcacatgtgctctgaccctctcctgggcattggttcctgctggtac

SEQ ID NO: 11489 - DNA, 6000 bp, Homo sapiens
ttttgattaatgttcagtgtattttttttttagacggagtctcactctgtcgcccaggctggagtgcagtggcacgatctcggctcactgcaacttctacctcccaggttcaagcaattctcttgcctcagcctcctgagtagctgggactacaggcacccaccaccacgcctggctaattttttgtatttttaatagagacagggtttcaccatgttagccaggatggtctcgatctcctgaccttgggatccgcccatctcagcctcccaaagtgctgggattacaggcatgaggtacgacacctaactctgtgtatttatttaagaaaacaattgatgttctttaaacagtcagcattcctctacttatttggacatttgcaactaataaataaaaaattaagaatttctaaaattagatatgcctactcttttaaacattaacttcagatgtaaacagatcttaatgtttcattatatccaaacctaaactgtcagattctattaaatgctttaaacacttcaagaaacagaaaagatacacccagatgtcacaatcattataccaaaaccagttgaaaaatgttaactgcgtggatttaatttttttcttatccttatttgaacacttttccaattggaacagggttccaattttccatatgtttctaggtttatgttttttttttttgacagagtctcactctgtcacccaggctggagtgcaatggcacaatctcagctcactgcaacctctacctcccaggttcaagcaattctcttgcctcagcctcccaaggagctgggattacaggtgcccactaccacgcccagctacttttgtgtatttttagtagagacggggtttcgccatattggccaggctggtctcgaactccgacctcaggtgatccacctgccttggcctcccaaagtgctgggatttcaggcctgagccacactgcacccgaccttttttttttttttttttttttgagacagagtcttgctctgttgtccaggctggagtgcagtggcatgatctcagctcactgcaatctccgtctcctgggttcaagcaattcttctgcttcagtctccctagtagctgggattacaggcatgcaccaccacgcccggctattttttttttttttttgtatttttaagagagatgaggtttcaccatattggccaggctggtctccaactcccgaccttgtgatccgcctgccaatcttaccagacccaaaataataatactgtctcaaactaaattgtagcatatgcattagcaatgcctcatccttggtcacgtcatccataagaccttgcatcaatgaaataactcttatttggtcttttataacaaaatatcacttgtagtgttgtgggacattttaagaccttttgtataaactttaaatttttgagacttgaactttcccaaaagtatctagccattgtctggtcatttttttgacaggacataatgatctttttagctagcattattccaaagcctttatattccttatttgtataatcaaaaggccatccagctccttcttcgtgaagagtgcagtttttgtagtcagcttttcattgtagaacatttggctgcttaatcattttgaaacacactgttgaatcctgcttctccttggttattattgtatgtaatcattagagccaattaactgttagaccgtctttctactttgttgaagtaactattttaactgttagaccatctttctactttgttgaagtaactttttccaagattacttggcttgcctagcaccccaatgtttattatttcttgattaaacaggaacaaatctatatacacatacatatatatgtgtgtgtgtacatatgctcgtacctagtaagaaaaaaatatatatttttaggtcaataatgaataaggctgggtgcagtggctcacgcctgtaatcccagcactttgggaggtcagggcaggtggatcatttgaggtcgggagttcaagagcagcctggccaacaagatgaaaccctgtctctactaacaatacaaaaattagccgggtatggtgacgagtgcctgtgatcccagctactcgggaggctgagggaggagaatcacctgaacccaggatgcagaggttgcagtgagcgaagatcaccccactgcactccagcctcagtgacagagtgagactctgtctcaaaaaaaaaaaaaaaagactattgtacattcacatagtaaagttctgtgcaactgaaaagaaagatcagcatgttcagtacactccagaagctgatttggagcgattcttccaggatatgttaagtgaaaagggcaaatacaaagcagtctacatagaatgttacttttgtaagagaatatatacaatctttgcaaaaagaaatataagcaggccaaaccagaaactaataaattagttacctatgggaaacaagaacaagatcaaaaagattgggaatggaatgaaatttctctgcttgtatctttttaaagttttagtccttccttctcccctcccctcccctccccttcccttcccccctcccttcccgtccctttttttttttttttttttttttttttttgagacagagtctcactccctcacccaggctggagtgcactggcaccatctccgctcactgcaacctccaccttccaggttcaagcgattctcctgccttagcctcctgagtaggtgggattacaggcgtgtgtcactatgcccagctaatttttgtatttttagtagggatggagtttcaccatgttgccacaggctgatctcgaactcctggcctcaggtgatccgcatgcctcggcctcccaaagggctgggattataggcgtgagccactgcgcccagccttaaagttttaatttttgaaccattttaatgatttacacattcaaaaaataagattaaaaggatatggtttttcctatcctcgaatacaaaattgtatacaaacatataaaaatgaaggccaggcacggtggctcacgcctgtaatcccaacactttgggaggccgaggcgggcggatcattaggtcacaagatggagaccatcctggctaacgcggtgaaactccatctctactaaaaatacaagaaaaattagccgggcgtggtggcgggtgcctgtagtcccagccacccgggatgctgaggcaggagaatggcgtaaacccaggaggcagagcttgcagtgagccgagattgtgagcgagactccgtctgaaaaaaaaaaaaaaatctaattgtatagaatattgttacaaccacacagaagaaaaaaaaagaatcccaagaaatgttgaacacagtgctgtcattgtacactctaaggacaaaaagaaccacaaaaaataatctcacgcatcacttagaaagtttgtttttagtcgggatattgttagtacaactccaaaagcatatagtgtatactataggatttagcattaatcattgatgttgtcggggtagggaccagagttctaactgtggaagaaaggagataaaaatacggaactggtgaagcaaaagaagaaacccactggtggctcatgcctgtaatcccagcactttgggaagccgagacgggcggatcacgaggtcaggagatcgagaccatcctggcttacacggtgaaaccccgtctccactaaaaaaaatacaaaaaattagccggcctggtggcaggcgcctgtagtcccagctactcggaaggctgaggcaggagaatggcgtgaacccgggaggcggagcttgcagtgagccgagatcgcgccagtgcactccagcctgggcgacagagacagcctccgtcccaaaaaagaaagaaacccactgctgtttaaaggtaggtgtgtgtgtgcgtgtgtgtatgtttcaatgtatcgatagctacatctgctgaaatagcctacaggcaggaaaatcccagtagcaagttgctcacctagcactcagagctttgttgctaagtaccactccccactgatatttttcgtttgaaaaacttctgatacaataactggtcagggaaagtataggtaaatctggaccagccaggcacagtggctcatgcctgtaatcccagaactttgggagtccgaaataggtggatcacttgaggccaagagttcaagaacagcctggccaacatggtgaaatcccgtctctactaaaaataaaaaaaattagctggacgtggtgccagatgcctgtagtcccagctactcaggaggctgaggcaggagaatcccttaaacccaggaggcagaggttgcagtgagtcaagatcatgccactgcactccagcctgggcaacaagagtgagaccctgtctcaaaaaaaaaaaaaaaaaaaacacttttaggccaggcacggtggctcacgcctgtaattccaacactttgaaaggccaaagtggttggatcacttaaggccaggagttcgagaccagcctggccaacatgtgaaaccctgtctctactaaaaatacaaaaattagctgggcatggtggtgcacgcctgtaatcccagctacttgggaggttgaggcagaagaatcgcttgaacccgggaggcagaggttgcagtgagcagagatcgcgccactgcacaccagcctgggcgacagagcgagactccgtctcaaaaaaaaaaaaaaaaaaaagaaacaaaacaaaagaatgaaagaaaagtccgaaacctcctgcgccactgtccactagctgcgcgcgttaggaaaccagaggtcagcgcccccgaccccgccaccgccgcgggtccctttaagggagagtgggcggggtcctgcctttaactccgcccacggctaaggagatgcacggcctacgagaggggtagtgtgggactgagccaatgcgtacggcgtgacgccatcccgctgcgaccggcgctccccggggcaggtggctgcatagtcttggcggaggtgagtctcgtggtggaggtgagggcaggctccggggtattgctgccgggggaggatttgctggggacccaaggcaccctcgcgtgagagccctgagagcgaatcgcttcgtctgacctcggggttgtctggggcgagggcacgaatcaccccaacctttccgaagcctggtggaatggcttgtgaactgatctcaaaagcagcccaagtcatccgtcgctgggccggggagggggacaccgcggcggccccgccgagtgctacctgggcactgagcctgtggggagaggcgacccagcggggtggagagagataagggaccagtaacgtccagcgtttgtccgtggtattgagcgttctgtgggtcaaattctcaaagcactcctgcgaaataggcctgcccattttgcagaaggggaacgtgaggcttggcgaagttaaagttaccgctttgtaagcgctgtaaagatgagaggttgggtagtggggaacgtgtaagcatctctgaaatggtgattcaagccgggcgcggtggctcacgcctcttaatcccagcactttgggaggcttgaggcgggcggatcacctgaggtcaggagttcgagaccagtctggccaacatggtgaaactctgtctttactaaaaatacaaaaattagctcggcgtggtggtgcgggcctgtagtcccggctactcgggaggctgagggagaagaatcgcttgaacccgggaggcggaggttgcagtgagccgagatcgcgccacttcactccagactgggcgaaagaactaaacttcatctaaagaaaaatacatatggccgggcgcggtggctcacgcctgtaatcctagcactctgggaggccgaggcgggcggatcacgaggtcaggagatcaagaccatcctggctaacacggtgaaactccatctctactaaaaatacaaaaaaattagccgggcgttgtggcgggcgcctgtagtcccagctgctcggg

SEQ ID NO: 11490 - DNA, 6000 bp, Homo sapiens
cacttgtgtagtctgatatctgtgaaaataacatgcttggctgtttttgctttgagagtacatatcactaataagcagcttaaaaaaaaagatcaccttagttcaaccattgtggaagacagtgtggcgattcctcaagaatctagaaccagaaataccatttgatccagcaatcccattactgggtatgtactcaaaggattataaatcattctactataaatacacatgcacacatatgtttattgcagcgctacttacaatagcaaagacctggaaccaacccaaatgcccatcaatgatagactggataaagaaaatgtgacacatatacaccatggaatactatgcagccattaaaaagaatgagttcatgtcctttacagggacatggatgaagctggaaaccatcattctcagcaaactaacacaggaacagaaaaccaaacactgcatgttctcactcaagtgggagttgaacaatgagaacacatcgacacagggcgaggaacatcacacaccggggcctgttggggcaagggaagggagaccattaggacaaatacctaatgcatatggggcttaaaacatagatgatgggttgataggtgcagcaaaccaccatggcacatgtatacctatgtaacaaacctgcatgttctacacatgtatcccagaacttaaaattaaaaaaaaaattaaaaataaagcatcagacgtctccaagtggtgctcctagcatatggtgacacatgtgtcaccagctctgggatggagtccaagccgtctctaaaatattttaaaggtttaaatatttaaacatttataaataagcatcatttataaatatgttaaaatataaatgatgcttaagtaccaatgaagtattaaagtataaatataaaattaaaagcatgtgaaaatataaatagtacctaagtaccatcaaaggattaaaatataaatgatgatggccaggcgtggtggctcacgcctgtaatcccagcactttgggaggctgaggcaggcggatcatgagatcaggagttggagaccagcctgaccaacacggtgaaaccccatttctactaaaaatacaaaagttagccggggcgtggtggtgcacacatgtaatcccagctactcaggagactgaggcagattctcaaggagaatcgcttgaacctgggaggcggaggttgcagtcagccaagatcgtgccactgcactccagtctgggtgacaagagtgagactccatctcaaaaaaataaaaaataaaataaaatataaatgatgtataagtaccattgaagtattaaaatatgaatgatacctaagtaccattgaagcattaaaatataagtgatacctaagtatcattcaagtattaaaatagaaatgatacttaagtaccatcgaagtattaaaatataaattatacctaagtaccactgaaatgttaacatataaatgatacttgtttatattttaacacatactttttcctgagagtctttgtataaaacttatgctccaggaagacttgctatgtttattctatggcttcaaatatctgaagccacacagctgtgaaatcagagtaccctctttttccccagtaaaaagtcctgagtgaatggaactccacaacaaaatgatagtggagaaaagcaatgcaggctaagcaggctaatactaaacacaaaagcaaggtcagcaaagaagtgtctagctacagtttatatttcagaataaatttaaaagcaggtgtctcatgaaacagagctgagaaattgggggcatttgtgacagtcacaggagctcatccacccttaaagaggcctggcctcctgctctgtagggctgggccaagtccttgataccctggagagagctcacttctgcctctctttggagtgtgagaaacacactcacccattcaaacccaaagaatggacttagaggcatgaagaacagtgaaagtgagacttttttttttttttgagagtctgtcttgatctgtcactgaggctggagtgcagcagtgcgatctcagctcattgctgagctgagatcacctcccaggtgaatctccatctcccaggttcaagtgattttcctgcctcagcctcccgagtagctaggattacaggcatgcgccaccacacccggctaatttttgtatttttagtagagatggggtttcaccatgttggccaggctggtcttgaactcctgacctcaggtgatccaccagcctcagccccccaaaatgctgggattataggcatgagccaccgcacccggacaaaagtaagactttttaataatggttttgcaagatcggatgtgtgatgggcaggcacacccagtgcagtttcaacaatttatcccctagagcacaggtccctccccagttcctcacaggctgagtaatatggggttgcagtcttcctggacatcacctaagttccattatccccttattaggttacatcttgtcctcttccctacttgaagtttcgatttcccaatggctaagctttctttccttttatggattagacacccctgccacttttctccctcccctctgacttctgtgagttttatcactcttcccagatgtctgtacccgtgcatcttgtcacatccacaagggaactgcccagacttgtctgttttctgaaaatggaccacttaaaaagtacttcttacagggttctccacagctttactaagcatacactagttgaggccaggaggtcctcagccacacagcctctggcctcctatccttgtgtcccttggcctccatcccactggcctccaagggacaggtgcctttccctgctctggggcaaagccctcctccatccacagggtccacctctgtcctccctggtggctccttgccatattaacgtgttcaaattctaccccagtcagaaaactgcaccccttgagccctgatgctcccttggcccccaagattaccagcttcagggaacctcccagtttttgtccaccttatgacctccaagcaacccagtcctgagggcactttcctctctgcctctgcagccccgcactggcctggaaatgctccctttggtggccagagcccctacttctcccaggttctcccccacccccagggtccagcttccttcctcctgccctcaccttggttgcagttttcatggttatatttgtggcttttttctttttcttttctttttttttttgagatggagtctcactctgttgcccaggctggagtgcagaggcacaatctcggctcactgcaccctccacctcccaggttcaagcaattctcccacttcagcctctcgagtagctgggattacaggcacccgacaacatgcctgcctaatttttgtatttttgtagagatgggatttcaccatattggccaggctggtctcggactcctgacctcaggtgatccgcccgcctcggccacccgaagtgctgggattacagacgtgagccaccgtgcctggctcatttgtggctttttaaaaaatcttcctggaggacacatttttccctctatagcgccagccacccagatccacgcctttgcttaagttatttcctcaagacagggatgccctcccttcttcccctgggactgatatgtcctgccagctccttggagaactttctccccatctatcctctaattcacagccacccccggttacatgctctctttccgtgcctctttcgtgtctcatgaacctgtccattttgacacttaacacactcggtccaatcatcattgtacattctgtccccactagacccagacggccttgagggtaaggtaccaaggactccccatggccagtgcccaccggtgctgaaatgaatgggaacgatgcagtcccaagacctcaagagaaccttcccagtcctttctccttaattttttttgtgtgtgtatggtgttttttaattttttcctcacttgctttcttttcttttcctttctctctttctttctttctcctgcctccctcccttcctttctttctccttccttccctcctttctttctcctgcctcccttccttcctcctttctttctccttccttccttcctttccctccctttctttctctctctttctctctttctttctttcgctacaggacgtcgtgtgtttgcccaggctggagtgcagtggcacgatcatagttcactacagcctccacctcctgaactcaagcgatccttctgcctcagtctccagtgtagctggcatcacagacgtgctcctccatgcccggctaatttaaaaatgtttttgcacagtgagggctcgctatgttgcccaggttggtctcgaactcctggcctcaagagatctccggcctcagcctcccaaagtgctgggatgacaggcgtgagctattgcgtccggccccagaatgcacttgttaaagcgttgtggggctttttgaaatgacaatatattcatatactacaaaatttaaaagacattggcggggtggggtgggggtaaacccactgccactgccccgccccaggccctggattcccctaggcacagtgttactctttccttttggagttttccctgatcattgaagttatgcccttgtcccttctgcacccgcgcttctgggcaccgagctcctcccgctgaagtgatcggcttgcactgactgcgcttgggcttcgcgctttcccgcagcggccgggccttggcgcctggacgccccgccgacccccgcggccgcgcgccctgctccccctggcggccgcgccccgcactgcagtggccgcgttggggcccggccgggggaggggtcgcgcggcggcggcgtcagcggcggcgcccgggcggtgggagccgaggcgccgagcaagatggcggcgcgagtgctgcgcgcccgcggagcggcctgggccggcggcctcctgcagcgggcggccccctgcagcctcctgcccaggctccggtgagcagcgccgcccttcccgggaggtgccggggaggggccgccgcgaggcggagggcgcgggtttcccggcgccggtctccgccccggccctgtccccagcgcgggtggctgcccggcctcggggcagtggggccggagctggggtggggccggagctggggcggggtcggggcgtcctcgggctcaaggtcacggaggggacgggccgctctgcggctccaccctcgcccgggaaggcccccgaggcttggcccggaggccacatcctccccgcggcgctggcccggcctgcagggccctgaccggcgcgacccgtggccagggacagggacagcgcgcgcctgaggccgcaggccccggacgccgtctgctgggtcctcgccggaggctgttccaagcctgagtggctgcgtctgccgaggacgttggtgaccctggtctctgaggtgccgggagtagggaataaaagagtaaagcattgtcccgggccagctctccgcggagcgtaggggaagttagagcttggaggaggtcaaatcacttaacgtcttggagttgaaatttaaagccggccgtggatctaaaagtacttagagttatcagcactaagttcaggcgtggggctcttgtttaaacttttttttttttctaacttcagtggattggacgtttggttgtccaaattcatcaccttgatatttgcatgtgctgttttccacattcaaacagcaaagcctatcctgacttacccagagttgctttctcgtattcattgctttgggtagtttaaattacctaaggaactgtgtgttaaactcgccatgggccagggaggtttcagtaacatggtttattattattattattgttgttgtttatttatttatatttttgagacggagttttgctctcgttgccccggctgaagtgcaacggcacgatcttgtctcactgcaacctccgcctcccgggttcaagt

SEQ ID NO: 11491 - DNA, 6000 bp, Homo sapiens
ctgcaatccaaccagcaatctcactactagatatctacccaaagggaaagaaatcaatatatcaaaaagtacctgtactcatatgtttatcacagcactattcatagtagcaaagatatggaatcaacctaagtgtccatcaacagatgattggataaagaaaatatggtacatgtacaccacggaacatgacctagccacataaagaatgaaatcgtgtcttttgcatcactgtggatagaactggaggccattctcctcagtgaaataattcagaaacaaagtcaaatactgaatgttctcatacatgggagttaaacaataggtacacatgaggagcaacagatattggagactccaaaagatgggaggatgggaggagggtgaggggtgaaaatttcctattgagtacaatgttcactatttgaatcatggctacacacaaagcccagacctcagcactccacaatatatgcatatagcactccacaatatttgcccctggtccagttgtgaagtctcatacagagtatcaatcagtcaatgttctcccttggttttgaatgtatttcttttacttcaagagtaagttgtcaagtgtggtggctcacacctgtaatcccagcactttgggaggccgaggcgggcagatcacttgaggtcaggagatcaagaccagcctggccaacatgatgaaaacctgtctttactaaaaatacaaaaattagccaggcatggtggcaggcacctgtagtctcagctactcaaaggctgaggcaggagaatctcttcaacctggctgatggaggttgcagtgagtcaagatcacaccactgcactccagcctgcgtgacagagctaaaaaaaaaatttataaaaataaaactaaataaataaaaattgtaaaaaaagcacacgggatggcagaacttgttgcagccaccttggaatatagaatttgccacagagggcaagtagaaaagtatgtcagagtttaagatttcagaaatctagccatccaaaaggatcataagagccattcctgtggcggctttggggagtggatgcaaaggtcatcagagctgagaaagacgtgggatgatgagtcaggcgaattgcatgctcatccacatggatgctgacatcctcaggaaagcagaaggacttcagataacagagggcaaaacacgatttcattctttttttttttttttttttttttttttagagacagggtctttctctgtcacccaggctggagtgcagtggcatgatcatagctcactgtagccttgaactcctgggctcaagtaatccttctgccttggcctcctgaatagttagggctacagtgtgtgccaccacgcctggctaatgttgtatttttattttttgtagagatggggtcttgctatgttgcccaggctggttgataactcctggcctcaagcgattctcccacattggcctcccaaagcattgggattacaagcgtgagccactgtgctctgcctcaaaacactcttttaaaagcttttgtttttttttttctgtagtggtgaaataattaacctctgtggtgaggacttcctttttatttgggaaaagatatttgctgtgggcctattgtttctgcaaaaatactagtagctaacattttttgagtgtccattcattcattcattcattcaaaatatatatatgggggccagacatggtggctcacacctgtaatcccaaggccaaagcgggtggatcacctgaggtcaggagttcgagaccagcctgaccaatatggtgaaaccccatctctactaagtacagaaaaaaaaaaaaaaaaaagccaggcgtggtggtgcatgcctgtaatcccagctacttgggaggctgaggcaggagaatcacttgaacatgggaggtggaggttgcagtgagtcgagattgcatcattgccctccagcctgggcaacaagagcaaaactctgtctcaaatttaaaaataaaaataaaaataagtgagggcttatgaggcatcaaaggtcatttatagaatgttgttagcaatttaattcatgatagctaaaaatgggccagatgtccatccgtagtagaatggacacgtaaaattgtggatatctaatataatggactattatacagtaatgaaaaataacaatcactattcacaatagcatgggtaaacctcccagacctattgatgaaagaagccagatgatcaagagatctcatcaactgagtaaaggaatctataagaagggaagttgcaggagtctacttagatttattaaaatcattagggatgtagagtgaggtttttgttttttgtttttgtttcttaatcagtgtgtcattctgtcatccaggctggagtgcagtggggcaacgttggctcattgcagcctcaatccacacccctgccccaagccctctgggctcagtcagtcctcccaagtagctggaacaacaggcatgcaccacaccttgctaattttgtatatatttttgcagagaccagggctccctatgttgctcaggctggtcttgaactgctggcctcaagcaatcctcctgcctcagcctctcaaagtgttgtgagccaccccacctgggcagagcaaggatgtttttgaggactgtggtagatagcttcctcatattcatgtcctgtgtaatcctctccctctgagcatgggctggacctagggactattttctttttctttctttctttcttttttttcttctttttttgagatggagtttttccttgtaagccaggctggagtgcaatggtgtgagcttggctcactgcaacctccacctcccaggttcaagtgattctcatgcctcagcttcccaagtagctgggtttacaggcatgtgccaccgcatccggctaatttttgtatttttagtagagacggggtttcaccatgttggtcagctggtctcgaactcctgacctcaggtgctctacccacctcggcctcccaaaattctgggattacaggtgtgagccaccatgactggctggacctagagactattttctaagtagcaatagacttcgtaaaagtgatgggatgtcacttctgggattaggtttcaaaaaaggactgtgatctcactctcattttctttttctgtctcttcctctttctcctccctctccctggggtaagcctgccgcttcttaccaagaggtgcaagtggacaggaaatgatgtctccagccaacagccagagaggacctcaggcctgccagcagcagtggaagtgagtttgaaagaggattctgaagccttgagagagctgcagccctggctgacagcttgattgtatcctcatgagagcctgagccagaggacacagctaacctcacccagattcctagcccgtggaaactgtgagggaaaaaaaagtttattgtttattaactgctaaatttggggtgatttttacccaacaatagataacgaatacaaggatattgcttattattcaaaatcactatataaagcccctgaaaaattgaaagctgcaaccagggaaacactgaaaatctccaagaaccctgtgtttcttcttaaagacagtgagaaaaagcacatacatctgttttccttttagttttggccaccaggaagctcagagccaaatttatgatgcaattttaataactatgtaagcccctatggcctgcttatctgtgttcttattcctggcctttcattttattctgacttttctttttcttcgtcctgattgtattagctcatctttatttttctatattatatgagttatggtaagcaacttcaaattcagcttacggaaaagcaaggcattcgtaaatctctctttttttttttgagactcttactctatcgcccaggctggagtgcagtggcacgatcttggctcactgcaacctccacctcccgggttccggcaattctcatgcctcagtctcccgagtagctgggattacaggcgcccaccacgacaccgggctaatttgtttttgtttgttttttgtatttttagtagagacgcggttacgccatgtaggccaggctggtctcgaactcctgacctcaagtgatccacctgcctcggcctcccaaagtgttgggattacgggtgtaagccactgtacccggtccataaatcattttttaaaaatagtttttaaatttaaaacatagttttgcacattaaaaaaaaagttttgcacaggtctaaccgaaggtggtggtgggaagatcaggtcataggtgtgggtctctggagctccaagcattggccagggttgatttggattgggtcagaaatatacaacgaaaaagggaaaaaggatggcaattgattgccatccccagagggaggggccgagggttcgcccagtcacccacagtggcatccttgcaatgtgctagttagaccgctcctttaagtccctcccgcactggcccgctcggccccgcccctctctggctccgcccctccccacccctgccccgcccatccccacccctgccccacccctttctcccccgggctccacccctcgcgcgcgaccggccgcgcggcgcagcgccacgccgcctcagtctccgcccgccgatccggcctcttcggccgttgcgcactccaccccctccctccgcgcccgcgcgcgccttccccgccccgtccgcctcactccttttggggcggttgggccgcgcgcctgtgggggcggggcccggagcaggccaccgagccaatggggcgcggcggcggcggcggcggtggtggcggcggcggcggaggcggcggtggcggcggtggcggctgggtcgggccccgacgggcggcggcggctgaggtggaggcggagggaggcggcggcggcggcggcgggaagatggcggctcccgtcctgctaagagtgtcggtgccgcggtgggagcgggtggcccggtatgcagtgtgcgctgccggaatcctgctctccatctacgcctaccacgtggagcgggagaaggagcgggaccccgagcaccgggccctctgcgacctggggccctgggtgaagtgctccgccgcccttgcctccaggtagccggcttgggggagtgggccaggagcggccgagcggggcgagggtggagtctcggggtggggagcgcgcggcgggagctcaggcctgggggcggcggggaccgggccgctggggaactgacggggtcgggtcggggccaggcggggggcggcggcggggcgctcctgcccggggggcggcctgagcccaggccgcggggcggaggtggcggggccgcgaggcagccggggagggatgaggtggcagagtgcagccgggaggccggggcggacgcggagcggtcgggcgggctggggcccggctgtgcaggagcgcgagggggctgcggagggtgggtccaggctggcttgacaggtttcctggttctcgggaggcgggccgggggtgtgggaccttgtccaccgcacccttgagaccagcggcaacctcttgtccccccgatcgctgcagccgaggctttggggccggcgcggagacaggggggttgcctttcccactgtcttcctggtgctaggacaggtgtttccgtggtcaggcctctttgtactccagcgctagtgagaatttgcagacttaactgggacggtgacatttgctggcaaacacgaatttgaccctactgtggaagaagatacccgcacttaacatatctgatttcttggattccctctcgtatgtttcagtgtgccaggagaaggaaatggtctgagtttgggtctagtttaagcttcattggagtaaaggacaagtatgttatgtatatggtggtgttttaggcattggaatgacttttaaacgttgttgcctattagcatattcgagaccagcatattggtcaggctggtctcgaactcctgacctcaggtaatcca

SEQ ID NO: 11492 - DNA, 6000 bp, Homo sapiens
caggctgtgagccctttgaattgcctgaagatggggcaaagccatctatacacaggtgaagttatctttttttttttttttttgagatggagtttcgctctgtcacccaggctggagtgcagtggcgcaatctcggctcactgcaagctccgcctccgggattcacgccattctcctgcctcagcctcccgggtagctggaactacaggcgcccgccagcacacccggctaatttttttgtatttttagtagagacggggtttcaccgtgttagccagggtggtcttgatctcctgacctcatgatccatccgcttcggcctcccaaagtgctgggattgcaggcgtgagccaccgcgcccgaccgaggttatctttttttaatttttttgagacagagatttgcgctgtcgctcaggctggagtgcagttgcacagtctccgctcaccgcagcctccacatcctgagttcaagcgattctcctgcctcagcctcccgagttgctgggattacaggtgtgcccccaccacacctggctaatttttgtgtttttagtagagattgggttttaccatgttgaccaggctggtctcgaactactgatctcaagtgatctgccctcctcagactcccaaagtgctggcattacaggtgtgagccaccatacctggctgatgctctctggtgaggtgatctaattctgggctgatcacctggaaaggtaaagcccgggagagaaaatagaaacgcagaaagagtgttcagaatctatgaggctcattaaattacacagaggaatagaaatgtggtgtgaatcagatgtgcatacagtcttggacagtttttcaggaacaagttttcctttaaaaaaaagttatgtattcattccttgtaaataggtaatccaggccaggcgtgatggctcatgcctataatcccaccactttgggaggccagcgttggaggactgcttgagcccaggagttcaagaccagtttgggcaacatagcaagatcccatctctaccaaaaaaaaaaaaaaaaaaaaagtaaaaggctgggcacggtggcttacacctgaaatcccagcactttgggaggccaaggtgggcagatcacatgaggccaggagttcgagaccagcctggccaacatggtgaaaccctgtctctactaaaaatacaaaaattagctgggcgtggtggtgggcacctgtaatcccagctactcgagaggctgatgcaggagaattgcttgaacctgggaggcagaggttgcagtcagccgatatcatgccactgcacaccagcctgggcaacagagcgagactctgtctaaaaaaaaaaaaattagcagggagtgggtggcgtgcacccgtagtcttagctactcaggaggctgaggtgggaggatcacttgagcccaggcgtttgaggctgcagtgagctatgactatgccactgtactccagcctgggtgacagaatgggaccctgcctattaaaataagaaaaaaaaaaaaaaaaggtaatccaagcatatagcacataatttttaaaggtgcccaagagtacatagcaaagaattagtctctttcctattcctgtgcccaagtccttcagtttccctcccagagacaacactgttaccaatttaatgtgtgcatctttcttgatatttcctctgaaaataacaagtgtgtgtgtatgtgtattttaaatatatacaaatgggtatattatacacactgttttgaactttgttcttttcacttgagtatattttggagttttttttccttctagcacatatactatatgtgttggggcagatttagaaagcaggaaaagttcatcttgttctcaataaccctgagctttgcttcagatcaagctgtttcttacttctgcctcagaggctggaccctgtcagaggctggaccctgcttcttacttctgcctcagagtgtagtccccggatcacctgaagctgtcctgctcagtgagacatcctgccgtatgacaggtttcactgaaaggatcgtgtcctttcttcttactgaattccccacatctagaattcgttctcacagtttaatacgtgctaggaggaccagtgtcagctccctatgtggctactcaattctttttctaggtcttataggtgggggaaggattttctgggcagtgtgggaggttatctcagatctccatctctactttgtggaaagagcctggcaggggctgtgcaccggtggtggcttccgtattactgaggccatggtgagtccttttcctgaagaggtctgaaatgtagaaagcagaatgtaacttggcccttgcttaacattaaaagactggttagaggatcgcttgaggtcagaagttcgagactagcttgggcaacatagtgagaccctgtctctaaaaacaaaacaaaaggtgggcgcggtggctcacacctgtaatcccgtcactttggaaggtggagccgggcagatcatctgaggtcaggagtttgagaccagcccggccaacatggcaaaaccctgtctctaataaaactacaaaaaaattagctgggcatggtggcaggcgcctgtaatcccagctactggggaggctgaggctgaagaatcacttgaactcgggaggcggaggttgtagtgagccaaggtcatacataccattgcactccagcctgggcaacaagagcgaaactccatctcaaaacaaaaacaaacaaacaacaaaattgctgtctaccatcttatagtcagttttcttatctatctctgtgtgtgtgtgtgtatacacccacacacatatatacacacacacacatatacacacaaacacacacacacacacacatatatataattattatttttttttttgggtgagaggcaaggtctcagtctgtcacccaggctggagtgcagtggtgccatcatggctcactgcagcctagaactcctgggctcacgggaccctcctgcctgggtttcccaaactgctgggattacaggcgtgagccaccacacccagtcagctgattatctgtagaaggagatatcatatgtaccttagacagttgctgtaaagatcaaatgaggtccacacaaaaacttctttttttttttttttttgagacggagtctcactctgttgcccaggctggagtgcagtggcacaatcttggctcactgcaacctccacctcccgggttcacgccattctcctgcctctgcctcccgagtagctgggactacaggcgccagccaccatgcctggctaaatttttgtatttttagtagagacggggtttcaccgtgttaaccaggatggtctcgatctcctgaccttgtgatccgcccacctcggcctctcaaactgctgggattacaggcgtgagccactgcacccggccacacacaaaaacttctacacaaatgttcatagcagcatcatgtataatagccaaaaaagtagaaacagatgtccatcaatggattaatggataaataaaagatgatgtccagccaggcacggtggcccatgcctgtaatcccagcactttgggaggccaaggcaggcagatcacttgaggccaggagttcaagatcagcctgggcaacttgatgaaaccccgtctctactaaaaatataaaaattagccaggcatggtggcacatgcatgtaattctagctactttggaggcggaggcatgagaatcacttgagcccaggaggtggaggttgcagtgagccaagatcacataactccactccagcctgggagacagagtgagactcttcaaaaaaaaaaaaggtgatgtctgtataatggactattattcggccgtaacaaggaatgaagtgccgatacatgctacaacatggatgaactttgaaaatattatactgtgtgcaaaggaaggtagttaccttcccgggttcaagcaattctcctgccacagcctccccagtagctgggacgacaggcgtccgccaccatgcccggctaatttttgtatttttagcagggacggggtttcactatgttggccaggctggtctcgaactcctgacctcaggtgattcaccagctttggcttcccaaagtgctgtgattagaggcatgagccaccccacctggcctagcagagagcaattttgaatacagctgttagattctgcactcatgccttctctaatccatgtcactggagtagaaataattgctttgacagaacctggtgtagatgtgtctgtaggaagaaactgtaaaatgaatggatcattttgtgaaatatctgccctttccccacctttcttttgcttctttgcctttttctccctagttttcatttctttcttttagggcgtcagccccccacctctgtggttgggagggactattgcacgtctacactctcgtggggatgaaatagtgtttgagttcgttatttgcatttgcgcgttatctccccgaggagatgacagcttctctgccagcagcgggcaaaggtgggctctgaagcagaggagaggaattatcaggaaaagctcattttcttctcctgtcctagggtttcactgatgaaggcctctgggacacccacgttgggggtgggggcggtgaggaccgccacctgcccgcggctcccctgcagccaggccacgcgcgctgttgctagggcaaccacccggccaggcctgcggctgccgggaagccccctcgggagcgcgcacgggaagggctgtgggggcgctggccggctgcgacgtcagacccccgcccctcggcgcctgccggacccagctccattcccagccgcgcctccttcggtgggcagccggccggaactcacgaatcagagcagccgacacatcgtccgctcagccaatcgtagcagatgtgtgatcccgccacctccccggaccctggcggttgtcgctgagttggcgaccgcgggagacgctgctgaggcggcttcggttgcgggtcggaacggcgctgctctgcggggccggtccaggctggcagctgccggcgcttggcggtgagggcgggctcccgagtggccccccaccgaaggcggtgggaccagcggctgaggccaggatgccgtccaggcggcgcggcggctcctcactcatcccaggtaagggggacgcggcgctcgctgcggctccgctcccctctcgtctcctcacacccggccctgtgccccgtcctggcatcccttggccccttgtcgccttctgctcggtgcctcccggttgtccaaccccgcccccgagcgcggagccccgggtctggcccgtccggcccctgctcccacgccccttcccccatcgccggcatttcccgggctcggcttcgccccggccgccggggcctctcccctctgccctttctctcccttctcgcagccctgggaccacgtcctagccccgcagtcccctgggatgagaccctcgtctcgccgggatcggacatttgcccccacgtctaccccggctgcgcttcttgagctcatcgccccatcatcctacccgttgtacgtagtcctgtctgcatggcagtcgcccgccccgctccaggtgtccctgggtcttgcccttttgctcctaagcaccttcctttcccaactcgcctcttctcccctcactttgaccacccaccatcgcaatctcctcttccttctcttactcttaaacctccagacactttcccactctctgcaatgccggattcatcgctttttttttttttttttttgagagatggagtctctatgttgcccaggctggcttcgaactcctgacctcaagctatccttctgcctcggcctccaaagtgctgggattacaggcgtgagccactgcgcctggctcagatccatagtgtaatatcttcattcgtccttacatgagctgcaccccataacatgtaaagtcccttgcccagagtctagcacacagtaggcctgg

SEQ ID NO: 11493 - DNA, 6000 bp, Homo sapiens
cccagaagcttttctttttcttttctttctttctttttttttttttttttttgagatggaaactcactctgtcgcccaggctggagtgcagtagggcgatcttggcccaccgcaacctctgtctcctgggttcaagtaattcttttgcttcagcttccctagtagctgggaggtgtcccaccacgcccagctaatttttgcatttttagcagagacaagatttcaccatgttagccaggctggtctcgaactcctgacctcaggtgatctgcccaccttggcctctcaaagtgctgggatttcaggcgtgagccacctcgctcagcccctagaagtttttcttttctttcctctgcctgcctttgagtttctaccacatgcaaggaatgatggctgactcccttgcaatagcaagctcagaatagacagcctttgcttgtcctcacttgggtggtctttgtttatttccatggtgcttattagatgcctagcactgagctaagcaatttacacatattagctcatttatgcttgcaacttcaagaggtaatattatggatattattcctgtttgacagctagaaaaataaaaatgggtaatgcccagagaagtgaggtaatttgctcaaggtcacacagcagattcaatggtgaggctaggctgatgcatgtacaatgcctgacacacaatacctaggcactgagcacagtcagcacagcttggtctctccctgtttacttatctcccgtgtaagctccccaccactgctacactgtgaattcttgaagcggggaggtagattcatgtctttttgtttcctcctttaaaaaatctgtagctgggcgcggtggctcactcctgtaatcccagcactttgggaggctgaggtgggcaaatcacctgaggtcaggagttcaagaccagcctgaccaacatggagaaaccctgtctctataaaaaaaaaaaaatacaaaaattagcctggtgtggtggcatgtgcctgtaatctcagccactcgggatgctgagacagaagaatcgcttgaacctgggaggcggaggttgtggtgagccgagatcatgccattgcactccagcctgggcgacaagagagaaactccgtccaaaaaacaaaacaaaacaaaataaaaaacaccctgcaggtaggaggccataatcctaagaggattaacgcaggaacagaaaaccaattactgcatgttttcacttataagcgggcactagacattgagtatgtgtggacatcaagatggggacaatggacactggggctactacaaggggggtgggggggaaatggattgaaaaactaccagccgggcacagtggctcactcttgtaatctcagcactttgggaggccgaggcaggcagatcacctgaggtcagaagttcgagacctgcctggccaacatggcgaaatcccatctctattaaaaatgcaaaaattagccaggcgtggtggccctgcctgtaatcccagctacttgggaggctgaggcaggagaatcggttgaacccaggaggtggaggttgcagtgaacccagatcgtgccactgcactccagcctgggcaacggcaagacttctctcaaaaaaaaaaaaaaaagaaagaaagaaagaaagaaaactacctattggttctattggttactatgctcattagtacctgggtgacagaatccgtaccccaaaccttagcatcacacaatatactcatgtaacaaacctgcacgtataccctctgtgtctaaaatgaaagttgaaattataacaaccaaaactccagtatcttttgcaatgctcagggttttatgagagtgaaggctttgcctcgcgaattctagcaagagtaaatgagttggccaaacctctgtagagagatgagtccctggtttcccttggcgaaactccaagtattttaactcctgttatggactcagatgagatgcgatacatttttaacagacaaacaaaggggacagagtcatgtcaaaggcatatgttatttgaaccatggttgagtgaaaaatgtatttgaaataaaaaatccttgcacagaaataccattggtctctttcctttcagtttgctcaaccaaccaaccaaagaaactcttttgataaagcttttgtagttaaactgagttttatgactgggaatggttttgggtgccatccaagataaatttcttcttttaaagtcaagaacagatttattctttggtgaccgaaatgggactggaacccagaccttatggcgagcagaccacacagccactgaagtgtagttttgttggtttcagaagcagctggtatataataaacgtttagttgattatgtttttgcatatataacatgctaggcaggtccttaaacttttagggtcattgactatgttgagaatctgatgaaacttacaggtcttttccccagaaaaatgtctatgtaacatgcagatacactttttcatctgattgagagctattcatgaactcctgaagtctagctagggtgtctctagggagaggagctggctagggacatggaatagagcttttcagtagaatcgaaggcccaggtaaggttagacaccaccaattggaaatgcctgcaggctttgagatgatgtggtttttccctgggtacacttgctcttgcctttgtccttgggttgagaaagaagaaggtgaaattgattcagagttggggattgctaggctggggcagtggaaaaatatgatatacatgtgcatgatccttaatagcaggccctattaggaatgtgtttgaaataaatgactaaccatgaactccagaaagaggagggaaggaactccagaggggatagagaggcatggacacctgggaaggagaaggaagttgttggctggagaatatgtttgtttggagttgagaatgggagaggtaaaaagctagggaacagtaataacaggctgggattttagtgcaggattgcaggagtggaaggctcctctgtgaatacagggttcaggatgaggccatgacagtgggtcactcattgagtagtgtccagtgtcatttttgaacacagaagctgcccagaatgcgtgcaggagctgagaggaggctcctggaggatgcatgataaagccaaaagttaatttgcatcagggacctctctggctttagagaaagcacagaaatctctctgaaattgaaatttgcctggaaacttctcgattactctgaggctgtttcctctactttgtttcctgtcttccactcccaaatatgcacacgcttgagagtcagcctcaagcacatacttagagccacttactgcttctcgggcaccctagcccaatgcctcagcctccctggcttcagtcctgcggctgagtgaatgttcaaaaattatttttgcagaagcttccattgattgtgctagctccatctgtagtgtggttataataacacccaactcaactggatactccatgagatgctcagtaacccaagtttcttcccacacagcctctctcttgcctaacatgtgtggctaaaaatcatcccttgggcctttttaactgttttgtgtccactttcaggtagattttacaaagcatgcgccctgaggacccgattgcacccaggcagagaattccaagggaatgaaataaaaagactatttttttgcatatacatttctatgttaaaaatcaaaacttaaaataatacacaggcaaaaacaaaacaagaaaccaagccccagaaaaaaccaaaacaaccgcaaaaacaaaaacaaaaactttaatgagatcaaaatgatgaggggaaaacgatcagctccatttagctttgctgcccgatttttattagttggcggcctgatttctattttagacccaaggaattaaatggatcaaccggggtgggggggcgttgaattccagtatttcgagttcctgggttttgggaagaggaagaggtagtggaaaaccaggagccaaatgaatatgcttcttataataaaatttgaacagagcagcgggtgggcctagaagcagtgactggggaggttagaattcttgcacgcagagaacccccccaagcccgctcacgcccggcctggctccgaaggtctcagaatccgagcctccaggccagattttccctctagccattcctggccacgcagcgcggagccgcgagcacacagaaaaggatgtcttcatcgccaaccgggatggaacgaacccgcccgctcagggagtactgagaactaaagggtccctccagcgccggccgcagccagcatgccttgactgcctccatcccgcgcggtccccactctccagaagcccccgccctgcccgggtgcgcgcgcgcacgagtcggcgaaccggggagctgtgcgctcggcagcctgcgggcggcggcggcggccgccgacagcctctcggggacagggtggcgaagagcggcggaggaggagctggcgccgccgccgctcccctcgggccgcgccccgccctccgccgccacctgcgcgtcccctccgggctcctcagctccggggctgtgtggctctcggtgccgcagcggcggtgtcaccgcgtccgccaattgggagactcggcgttttggctcccgggggcgcgggacgagccgcgcggccggatctggcgagcggagggtgattcggcacgcgtacctccccgccgcgctgcccgcgacgttttgggagggggtagagaactgctgtgacttttgaggtccgactccttccggccagcctcgcgacgcgccagctccgagacaggccggtgtgccctgaaggccccgaaggctctcggcgcggtttgggggcttggaacgtgtccgggagccggcggcgctgtgagcgctggtgagtttgccggcggggtggggtggactccgcgcggggggcggagaggacgtagcgctcggcccggcgcccgccccctagtgctgcccccactttgagagtaattgagacttgagcgtgactgcggagcctggaggatgcgggctccccgagcgggcttcccctctgcccggcgcgatggagcgggtcggtgagcggaacaaaggcgcctgcccgggggagcgggtcttccgctgaagagcgcgggtggcgcgccgcgacggccgcctgcgggccaaggtgggaggctgtgcggccccaggcgcggcgcgctccgccgtgggcgggcggcgatccctgagtccggcacctgtgcgccgctccctctgtgcctcccgggcagccccgcctgccggcctcggagtccgcggcgccggcggctagaggtccagaggcgaaccacttgctggtgcagaagagaaaccctcaaatccctggcctttcgcggagacgcctggacggggccgtgcgccgtggactgagcaggcgtctcggggagcacttctgcagagcgaggacttccatgtgagcgattccgttctccccaccaccaatccgacctcccagccgtctccgccgcccgagcatccttgaggtgggacgagcaggggcttggatccctgccggccgtctggtgtgtgaggcttgcacggcccctggctgccccgcgcctcgccggagcccgagggggcgcaggtccggggcgagggccggccgggctgtttgatggcttcactgagaagagtcaaagtgctgttggtgttgaacttgatcgcggtagccggcttcgtgctcttcctggccaagtgccggcccatcgcggtgcgcagcggagacgccttccacgagatccggccgcgcgccgaggtggccaacctcagcgcgcacagcgccagccccatccaggatgcggtcctgaagcgcctgtcgctgctggaggacatcgtgtaccggcagctgaatggtaaggacgcacgccggcgcctccggggctcgacgcgggcgggccgggcacagggtgagccccagggtccttgcgcgctgcg

SEQ ID NO: 11494 - DNA, 6000 bp, Homo sapiens
ggacagttcaagagagatcctaaagaaagcaaaatcactgtggactgaaatgagcagacaaggttttctgagcatggtgaaatatgatctgggcctcgcttgggagggctgtggccaggccttgagtccttggctcagtgggaccttctgaaacagcctccaagctgcgcccctgcttcctttgcttttggatgaccccctccagcagctttggtgctgatgggaataagtcgacctgcagcggaagttcagcccaagtctcagcccagcagcctccccaaacctggccagggtctggtcatgctgccgtctctgcggttctctgtggagttgtggtttctgtaccttgaagagaacttccccttctgggacccagaaacccagtgaaccctcaggaaaaaagggaatgaaattactgaagacaactctgtggcagggagagggaaaagaggctctttgtttttgttttttattttttatttttttattttttgagacagagcttcactcttgttgcccagactggattgtaatggctcaatctcggctcactgcaacctctgcctcccatgttcaagcacttctcgtgcctccgcctccagagtagctgggacaataggcacacaccaccacacccagctaatttttgtatttgtagtagagatggggtttcgccatgttgcccaggctggtctcgaactcctggcctcaagtaatccacctgccttggcctcccaaagtgctgggactacagatgtgggccaccatgcccagccctcactgtatggattttctaaaaaaaaaaaaaaaaagattacatttgtcttacttgccaaaagggaaattaaccttatctcctctcctttttaaagagtatttccttgataaaccttgtaatataaataacttcttttgtgcctttgatatgtacctaaatcttttaaaaaggtaaatgaacttcttgccaacattacaacccaggaatttttttttttttttttttttttttttggagacagaatctcgctgtcacccaggctggagtgcaggggtataatctcggctcactgcaacctccacttcccgggttcaagcaattctcccatctcaacctcctgagtagctgagactacaggcgtctgccaccacgcctggctaatttttgtatttttagtagagacagggtttcaccttgttggtctggctggtcttgaactcctgacctcaggtgatccaccagcctcggcctcccaatgtgctgggattatgggcgtgagccaccgtgcctggtcacaatccaggaatttttttcttaagagcctaagagtcttgtctttgaaatgtaaacctggaggaaaatagtgtccctatcttcctgttgcctagggagtttagcctaggcaacttgagctgttactacctgcttgtcaaggagatgtgagaagttttattttttcattggatataggtaattaactagcatggatggccacgttgatttccaggtgaatttaggatgagtgtttaagaatgcatagcaggccaggcacggtggctcacacctgtaatcccagcactctgggggaggctgagacgggcggatcacttgaagccacacagaaatcgaaagaaggagtttgagtccagcctggccagtatggcgaaactctgtctatactaaaatacaaatattagctgggcatgatggcacatgtctgtaattccagctacttgggaggcttaggcacgagaatcacttgaacccaggagatggaggttacagtgagccaagaagatcacaccactacactccagcctggatgacagaatgagaccctgtctcaaaaaaaacaaaacaaaaaaaactgcatagcaagtccttttgcatgaggatgagttactatttatcttgagagcatgtatgcaatggattgtatctgccaggctatataaaaaggacactttggccgggtgcaatagctcacgcctataatcccagcactttgggaggcctaggtgggcgaattatgaggtcaggatttcgagaccatcctagctaacataacgaaaccccatctctactaaaaatacaaaaaattagccaggtgtggtggcacgcacctgtagtctcagttacttgagaggctgaggcaggagaatcgcttaaactggggaggcagaggttgcagtgagccgagatcgcaccactgcactccagcctgggcgatagagcaagattttgtctcaaaaaaaaaaaaaaaaaaaaaaaggagggtttatttctctttgcatctcattaatggatcacctgtgatgggcatcacagtctggtttaatgcttattcaataataaaattgttttctttattttctgaatttgtggagagaatattctaggttaacagaataatctatttatttacttatttatcttgagatggagtcttgctctgtctcccaggctggagtgcagtggcctgatctcggctcactgcaatctctgcctcccaggttcaagtgattcccctgcctcagcctcccaagtatctgggactacaggcacgcaccaccgcacccagctaattttttgtgttttagtagagacggggtttcaccatgttggccaggatagtcttgatttcctgacctcatgatccgccggcctcggcctcccaaagtgctgggattacaggcgtgagccactgcacctggcctcagaagtatttatttttagtcttttccttaccagtttttatgaaacaactgggcaagaacactgttagatttcaccaaaaaattgtgatgaatcattgtctttatgatcccatttttgaaaactgacattttaattgtaaaccaaaaataaaattctaagcccccacaactgactcagtggactcccctgttggccaacaggatccaaaataaacatggaaaactaatttaggtcatgatgggaaggagggggttggacatgccttgtcataattctcctcccgtcagagtttaggcacagctgaccaacattatgatctctattagaatagagatcataggactgacaaaacaggctctttttatcagtaagatacccatctccaaccagactctgacatagcatcacatgacagatagcagtccctgaagtaaatcacagtattttaccccataacatattttctttgacaaattttaaaatagtcctgcaaagccatctctttgggggaaatttgcattctgtagagaatctctttcccttacagaaaagactccaggtcttttctggagagtctgacaccttttaagatccaataagagatatttatcatctattctctctgaagcctgttctgaggcttcacctacataacaagaaccttggtttccacaatcccccttatcttaactcaaacttttctttcttttttttccctccctctttcttttccttccttccttcctctctctctttttctctctctctctttcttctctgttgcccaagctggaatgcagtggtgccatcatggctcactgtagcctcaacttcccaggctcaagcgatcctcccacctcagccttctgagtagctgagtctacaggcatgcaccaccacacctggttaattatttttttttgtagaagtggggggtctcactgtgttgcccaggctgtccttgaactcctggcctcaagggatcctcccagctcaccctcccaaaatgctgggattataggcatgagccaccgcaatagcccatttctttatgtagtcttccagctgttcagccaacacttaactctgaaccaactgccaatctttcaatctactagtgacctgaaagcctttcctggctgacccaacatatacttcccgtgtattgatttatgtctttgcctgtaactactgtctccctaagatgcataaaaccaagctgtaacccaatcactttgggctcacgttctgaggaccccctgaggctgtgtcaccagccatggtcactcaaataggaggcccagaataaaactctttacagactttgactctttttggtcaacataacctaaccctaaacataatcctcctggggaaggtaagatcacaggtatctcttcttcgttcagtttgtgtgtgtatgtccttatttctctacagtttttaggcattcgctgtgtgatctagaaaagctatggagtctcgctttgtcgccaggatggaatgcagtggtgtgatctcggctcactgcaacctccacctcccaggttcaagtgattctcctgccttagcctcccgagtagctgggattacaggcacacgccaccacgcccagctaatttttgtatttttagtagagacagggtttcatcatgttggccaggatgatctctatctcttgacctcgcgatctgcccgcctcggcctcccaaagtgctgggattacaggcttgagccaccacacccagctacaaattctattttctttttgttccttggaaagcatcgctgggcatttatcctgtcccagtatttgagtgaaacttctcagcatttcagagcagtgaccatgatacaccctttcctttccttctccttatgggaaacttggttctaacccagaggacttgggctccaggacccagtaacgcagccctggacttgaccctaaaagggagtaaagacaaaggtgaagttcagtctggggttcagggctgccaaagctcatagcctggagcttcttaacctttaggcggggtagagacatttaagacggcccctaaacttggggagcgcgtaggctcataggaaatagagtccgttacttgtcctgggaacggcggtgggtgtcccaggaggcggacttccggtgcactcctgcgcgtgtgcacctctccctgcgtgcgtgttcgcgcgtgcgtgctcgcacatgcgcgccacctccgcactgccctcgcttcctgcgcctcttcaggtcaccgcttgctctagttcccaggctttggcctctagtggatgagaatcaccgagtctgcggggctggacgctgaccgcccgggccagcacctaggcgggcgggagctgtgcggcccagggttcgcgcgggccgggtagaggctcgagccgggacccccgagcgtgaaccccggagccagcggcgctggggccagaggggccaggcgggaggtggtggcggaggcgaaggggcgacgggacctgggcctggcccgtgtgtgtcctcggcggcctggcgccggccgtcgctgtacggtgagccccagggaggcggatctgggccccgagaaggacacccgcctggatttgccccgtaggcccggcccgggcccctcgggagcagaacagccttggtgaggtggacgggaggggacttcgcgagcagacgcgcgcgccagcgacagcagcccgccccggcctctcgggagccgtggggcagaggctgcagagccccaggagggtaagtcttgggttttcgggcccggagcgagaagggcctgagtgaagtcaccgtgtgttggggaccttagagtgtggggcagagggagcgtcccgattgcttgccggagagacatgtgttgggtttgagggcaaggtccggctgcaccgaacaggcgctgcatgggaagatctgggaggacaaggcttacggaagcgtggagggtgtcaccaccctcagctgcggacgtcatctccactccccgctaacccctaacagtccttcctcctcctctctgtgctccagatttcgaccgcctctaaacgtccgtcagcacttctattctctcacttaagtgtctgctgatcacccccttatatctgccctgggagaatcgtagtaatgcaggaacagtctgcagggattctctgctgctgcctcagttgctaggggaagagactgggccttagcaggtgggtgacttgaccaggtcaccggctttgtgggtagagctgctcatagtagaacccaggagacttatcttccaggc

SEQ ID NO: 11495 - DNA, 6000 bp, Homo sapiens
ggagtacgggctctgggagctagactgctcagctcacagagatctttttggctgcaggacagtggtccatcactggccctggggctcagatgccagcgggagcttggggttagaagggagactttgtttttgcccctttgctagggactcccagggagctgaactcagggcaagctgcatgtgtgtgtgttacaactggggacttggggccaggcggggtagctcacgcctgcaatcccagcattttgggaggctgaggagggcagatcacttgaggctagaagttcgggaccagcctggccaacatgctgaaaccctgtctctactaaaactacaaaaattagctgggcgtagtggcgagcacctgtagttccagctactcgggaggctgaggcaggagaatcgcttgaacctgggaggcagaggttgcagtgaaccgagattgcaccactgcactatagcctgggtgacagcgacattccgtctcaaaaaaagagaacaaaacaaaacaaaacaaaacaactggggacttggccaagcccctggaactctggggacaggggtctgaaaagtcctagctcccacctgttatgatcaggatccgaactgcgcagcagctgctttgcgtacggaactttgctccctcctcttgttattaaactttttggctcacaaagcatttttacttccttctctcatttcatgtgtatctcagactggggagtgggccccagtgttctcattgtacaaaggaggaagttggggctcagagatggaattggcttctccaaggtcacagggctggtaggatggcttatggatacacagcttcccagcttttgtcctgagctttttggctcatgaagcattttcacatccccatctcatttcacgtctgtttttgtttttgatcctggagggggtgcaacatcctcatttttacaaaggaggaagctgtggctcagagatggttcctgggctggaaagatggtttatggggtgggcagagatgggtgagctgatctggtggtttttatccttgatagaaaccagcaggtgtggccaggcgcagtggctcacgcctgcaatcccagcactttgggaggccgaggcgggcagatcatctgaggctggaagtttgagaccagcctggccaacatgctgaaaccctgtctctactaaaactacaaaaattagctgggcgtagtggtgtgcgcctgtactcccagctactcgggaggttaagccatgagaattgcttgaacccgggaagtggagactgcagtgagcagagatcgtgttgtctcaaaacaaaaaacaaacaacaaaaacaacaaaaaacaacaacaaaaaacaaaaaaaagcacgtgatccaattctgtcagcacaaaatcacacagtgcatgttataaagaagaaaaagaaaataaatgagtgccaaccctgtactctctgaccccaaaaccaaggtgatgaatggcagatgtcttataaggtgttcctgtaaaagatcttcgggctttgggaagagggccagatgcaggcctagaggtaaatttccttgttttcctctgccttagggctatgggagctggagcggagaggagagaagcaccttgcctttgctggtgtttttcccgcagcaggtgggtgggactgagccaacggtctcttggcatcaacaaagcatcaacaaatctctctccagctccacttgtgctgagctactggctgatccccaaggacatccttctggcctctccttcacacctgggtcccctagccctgcgtgagctctgtgcttcttcccctgccctgtgtctgctctatgcctggagcctctgtacctgccctctcctcaacccccaacccctccctgctctcagctcccgatacgcgtggctatgcctgggagggaaggacagcttcttagggccacaggtggactgttgtagggcttgcatgctcccctcccccatgcctgcttctccaagtggcacttggctgtgtcccaggaaagcaagggcaggaagtggcagggcgggggccgggggccgggggggcaggaggcgggcggggggttggggggggcaggttctggccatctggccaagtcacgtgtctactcagaaagcttgttaaaggctacctggctgggaccacaggtaagaggcacctggggaaggaggcacccatgctggagtgcccacccgtcctgggcaaggccctggccttctctgggcttcagtgtactcctttgagccaaggcaataaaagtccctgccctgctgactggcaggaggctgtgatgaggtcatctccaggaaagcacttatcgccaatcatgatgttacttatctctggtgttattcagcccataggctctgtgtgtagagggagccttgtaaagaaagccccagggaggcgtggtctgggcagaaaccatctctgtttgctttggtgtgtgtgcctatgatgggggtcaaggtataggagtgtgatttgaaactggagaatgcttcgttctttccatcatcaaacatgtctttttttttctttttttttagatggagtctcgctctatcacccaggctggagtgcaatggcgcgatcttggctcaccgcaacctccatctcccaggttaaagcgattctcctgcctcagtctcctgagtagctgtgattacaggcgtgcgccatcacacccagctaatttttgtattttttagtagagatggggtttcaccatgttggcctaactcctgacctcgtgatctgcccatcttggcctccgaaagtactgggattacaggtgtgagccactgcacccggcccaaacatttctttttcttttcttttgagacagagtcttgctctgttgcccgtggctggagtgaaatggtgcgattatagttcactgcagcctcaaactcctggccttaagcgatcctcccatcctggcctcccaaagtgctgggattataggcatgagccgcagcaaccactcctcacatttcttgagcatctgtgatgtatcaagccagatgctgggcactgaggttgcagaaggcattgttcctgtcttctaggagccccaggctagcagggaagacggatgtgtatagagttaaccacaataccaggcctcaacttcccgtctgtaacacaggtggaccatgctagattgtcccagcctgccctgtgcttcattagccggtcaacagatccatctcaaatacctcccatgggtactcactgattgctttaacccaaaccatggcactcttgaagactttccctcaggaagctcaaggactatgcatccttctgggtcagaactggacacacagccaccagtgctggacaatggcggcggctcagggacacactggagccctggcccctgcagagctcccagcatggttgggaagagagatgcaaaatgaccacacggcgggtgaggaggagctccctcggtgcggctgggatgagccctagacactctcaatcacccccacgatgaccccttcccagaggtcccctcagtcatctgccctgaaccaagctcttcctgatcctagaccctccaccctccctctatcttccagggcttggtgacattccaggcagaaatttctgacccttttactttggtccctccctccccagcccagtctctggtcaaactggattcctggctgttcccagaacgagctgcctttccccaccttgccacctctgcccttgttctctctgcctgaatgtcctccttcactagcctcgctgccttgcacatctctcctgagggctgtcatcccagaatgagctgcatttgtccagcctggcccaccgtctaccagaacgtcctccttcagcctgtcccactgccttgcaaaacttttctgggggacctgttcacgatgccttctgtagcatactccaagaatccggcgccccctggagttgtgccacacagcacccctttgcagtcaagctccctcagcaccaccacctccaccctggaagagttccccttccctttgaaatctcatgggactttgcacccactctggctttattggaaggctttgtatgtctccacagggtaaacacccatttactggggtgatgatgtctccaggatctagttcatgtttgtcgttggtgactggccccacccagttctgggcaagcaggctggatcccggcaggaacagagcccaccagcctaaacttccatggaggtggagaggggacaggcttctgtctctttttggctgaaggtgcatcatgtccaaggcccctcttctagccaagcagagaagctgggtgataaggatgggtgagagtgggtgatgtaccccggagtcctggcctcccggctcctcactcccctacacgtaactttatccggccaatgccgcaaagactgctggtgaggccagatgcatgagtgatcatactcacaacagtcgtgaaactgccagtgatgaaactggtaaggacaagaaatgacaataatcaaggtggggtttctcgtggacgtttccaagacttcattctcaaattctctccctcagggtccccaccctgtcctcccacctaagcctggaatgagggggcactggcctgtggggaccctggtcttcaggctcccaaacctggctgggtctggttgccccctggccttaacctgtgaacatccagctgtccctgggctgtgattcagtgtctgtctcccgggtgacctcagcatgggctttgaggaaggggagagagtagtttcttctgagactggatagtgactcagggacccggggctggggcctcaaaagtgcctttgttggcctgggctcaggaatccagagaaactggtcaggaggaggccccagtgacaaaaacccctccctctgcccccgcccctctgccagagccatataactgctcaacctgtccccgagagagagtgccctggcagctgtcggctggaaggaactggtctgctcacacttgctggcttgcgcatcaggactggctttatctcctgactcacggtgcaaaggtgcactctgcgaacgttaagtccgtccccagcgcttggaatcctacggcccccacagccggatcccctcagccttccaggtcctcaactcccgtggacgctgaacaatggcctccatggggctacaggtaatgggcatcgcgctggccgtcctgggctggctggccgtcatgctgtgctgcgcgctgcccatgtggcgcgtgacggccttcatcggcagcaacattgtcacctcgcagaccatctgggagggcctatggatgaactgcgtggtgcagagcaccggccagatgcagtgcaaggtgtacgactcgctgctggcactgccgcaggacctgcaggcggcccgcgccctcgtcatcatcagcatcatcgtggctgctctgggcgtgctgctgtccgtggtggggggcaagtgtaccaactgcctggaggatgaaagcgccaaggccaagaccatgatcgtggcgggcgtggtgttcctgttggccggccttatggtgatagtgccggtgtcctggacggcccacaacatcatccaagacttctacaatccgctggtggcctccgggcagaagcgggagatgggtgcctcgctctacgtcggctgggccgcctccggcctgctgctccttggcggggggctgctttgctgcaactgtccaccccgcacagacaagccttactccgccaagtattctgctgcccgctctgctgctgccagcaactacgtgtaaggtgccacggctccactctgttcctctctgctttgttcttccctggactgagctcagcgcaggctgtgaccccaggagggccctgccacgggccactggctgctggggactggggactgggcagagactgagccaggcaggaaggcagcagccttcagcctctctggcccactcggacaacttcccaaggccgcctcctgc

SEQ ID NO: 11496 - DNA, 6000 bp, Homo sapiens
aagtgctggaattacaggtgtgagccactctgccgggcccccactttatttattgtccctagggtaagagcatgtcaaccttgatgctatcacacaaattatagactgagacgcatatagcattcttgcctgttctggagggctgcctctcattatcttgctggaacatgcatcctcttttcctatgacgggcaagccctgggtctggacaaaacagtgcagagatctacccctctcccagctgtgcaagaccagacttattggctgggtgccgtagctcacgcctgtaatcccaacactttgggaaactgaggcaggtggatcacctgaggtcaggagttcgagaccagcctggccaacatagtgaaacccagtctctactaaaaatacaaatattagctgggtgtggtggtaggtgcctgtgatcccagctactagggaggctgaggcaggagaatcgctggaacccaggaggcagaggcagaggtgagccgagatcatgctactgcactccagcccgggtgacagaatgagactccatctcaaaaaaaaaaaaaaaaaaaaagaccacgcttctgtctgtaagatcgttttgcatatgaggtcctttcacagaccatttccctccagcacctaccagtgcccaggcccgtgaaggaagcagggagctagaacagagcaggtaggctgggtgcgatggctcatgcctgtaatcccagcactttgggaggctaaggtgggaggatcacttgaacccaggcattcaagaacagcctgggcaacacagtgagaccccatcactacaaagttttaaaatgagccaagcacagtggcctgcacctgtagtcccacctacaggcgaggcagaggtggaaggatcacttgagcccgagagttggaggctgcagtgagctatgatcttgccgctgcactccagcataggtgacagagcaagaccctgtcaaaaaaaaacaaaaacaaacaaacaaaaaacaaaaaccagaacagactgggtgcagtgtaatcccggcactctgggaggccgagcaggcagattacttgaatccaggagtttgagaccagcctggccaacatagtgaaaccccgtctgtactaaaagtacaaaaaattagccgggcgtggtggcaggtgtatgtaatcccaactactcaggaggctgaagcaggagaattgcttgaacccgggaggcagagtttgcagtgagccgagatcgccgcaccgctctccagcctgggtgaccaagcaagaccccatctaaaaaaaaaaaatgagaaaaaaagaaagaaaaagaacagcaggtaagtcctgtccaggtgcatagtctggggctggagggaaacagatgcaggtttgttcccattgtgtgaggaggagccagtcagggggtcccagcaaggaagccaggctttggcctctgggttcaaatccagcttcacctctgtgagcctctgtcttcttaccggttaccgtgggaaggaaacgtggtcctgaatccagtgcacttggcattgctggatggaacaagggagggtggcggttgctcgcacaggcacaggtctgggcgtctgatggccctagcttcagtcctagtccggccacagagggaggcagggtgagctcctgacacggacgcctgcagaatctctcagaaccggtctctggagcatgtgctaccctccttgtccacgaggtggcagcagcgggcctagccgctcgtctccgcggccacctctttctggccaggccgggacaccgcggccaaggctaaaagagaaacctagccccaagctgagagtgggaccccagagccagggtcccaggcctagaggcgtccaggactgggggccaaggttctgaaatgccagacatataggaggtgggggaccgtcatgctcttccctggtgtctccagcaggtgggataaacaccgggttcaatgggaccaggcgcggtggcctcacgcctgtaatccctgcactttgggaggctgaggatggaggatcgcttaaggccaggagttcaagaccagcctgggcaacatagtgagaccttgtctctacaaaaaaaaaaaaatacaaaaattagctgggcgtggtggcatgcacctggggttccagctaactctggaggctgaggtgggaggatcgtttgagcctgggaggcagaggttgcagtgagctgagattgcaccactgcactccagcctgagtgaccgggtgagaccccatctcaaaaaaaattttaaaaaaggggaaagaacagcaggtaacctctatccaggtgcacagtctggggctgaagggaaactgttgcaggcttgttcccattgtgtgaggaggagccagtcagggggtcccagtgaggaagccaggctttggggtctgggttcaaattcagcttcacctctggaccgagtgagaccctgtctcaaaaaaaaaaaaaaaaagcaggcgaggaatagagacagagggtcagacagcaagagtcccagaggatgagacagatggacacagagacaaaggatgcgggatgtaggtgggcagggcagggacagagagacccctgcagaggccacgagggcagggcagatggaacaagtgaccaaagacaggtggaggagtggacggcacgagtgtcagaggctgcagacagcgagggcgctaaagggtgggagaaggaaggagagccctgctccaccccagccttgggggtctcatcaccccactgcacagatgaggctcctggcatcggggtgcagagaacggctcatagcacaggcagagggaccacagcccactcctgcccagcggtgctcctgtgcccagccctggggtggacaccgtggctgccatccacacagacatgaggaccgagtgagatagttccctgtggaggccaggatgctctggcacctgaggtcaataaagccacatcccacaagtgggtggactgccttgtgctattgaccattaaacagctgcccaaggccattgagctattaattaaataataattattattattttaaatttttttgttgtgttttttgggtttttttgtttttgttttgtttttttgagatggagtctcgctctgttgtccaggctgtagtgcagtggcacgatcttggctcactgcaaactccgccttctgggctcaagtgattctcctgcctcagcctcccaagtagctgggattacaggcacccaccatcacacccggcaaatttttgtatttttagtagagatggggtttcaccattttggccaggctggtctcaaactcccgacctaaataaggtgatccacctgccttggcctcccaaagtgctgggattacagatgtgagccaccacgcccggcctatttattgtttttacagacagacagggtcttgctgtcccccaggctggagtgcagtggcagagtcacggctcactgcagcctccaactcttgggctcaagaaatcctcccgttttggcctcccaaaacactgggactacaggtgtgtgccaccacacccagctaattaaaaaaatttttttagagatggggtctcgttctgttgtccaggctggtctcaaattcctgttctcaagcgatcctcctgcctcagcctccaaaaatgttaggattgcaggtgcaagccactgcacctggcctctatctccctgtttcttgctctctccccatctgtgtgtgtctctgacagtctgtggctctctgtatctttctgtgtgtctctctgtgtgtgtcttggtccatctcatgcccagctaatttttaaattttttgtagagatggggtttcaccatgttggccaggctggtcttgaactccagacctcaggtgattctcctgcttcagcctcccaaagtgttgggattacaggcatgagccaccgtgcctggcccatgggtatgaatttctgcctgtgtgtgtcttcttctttttttttttttttttgagatgaagtcttgctctgtcacccaggctggagtgcagtggcgctatcttggctcactgcaacctccacctcctgggttcaagcaattctcctgcctcagcctcccgagtagctgggattacaggcacccgccaccacacccagataatttttgtatttttggtagatatggggtttcaccatgttggtcaggctggttttgaacccctgacttcatgacctgcctgccttggcctcccaaagtgctgggattacaggcatgagccaccgcgcccggcccatgggtgtgaatttctgcctgtgtgtgtctttttagcgtatgtgtgtctccatatctgccatctgcaggagcacctcagtttcattatcttgctccctgtctattggagtgtatctctcttcctctctgtgtgactttttgtgtttatgtgtgtgtttagtgtgtgtccatattttcctgttctcttgtgtctctctgctgtgtctctctctttttctttctgttttttgagacggagtctccctctgtcacccaggctggagtgcagtggtgcgatctcggctcactgcaacctctgcttctgaggttcaaacgattctcctgcctcagcctcccgagtagctggaattacagacacatgccaccatgcccagctaattttgtatttttaatagagacggggtttcaccatgttggccaggctggtcttaaactcttgaccttacgtgatccacccgcctcggcctcccaaagtttttggattacaggtgtgagccacctcgcccggtcctatctctctttcttctctttctccctctcactttgtttctcttctctctctctctcccgcctccttcccccgtctcccctcccttccccccaccgccctcttcatagctgagcctgtccggcagtgcggcggatgtacggatgattcagtggctggcaggaagcccgccctgcccgcccgccagtgtcagtggtgttggcatcagcttgggcaggtgtgcgggctcaggatggggcggccgtggtgaggaaccctggactctcaggtaagcctttcccaggggtgcctcagtcctcaggctgtcccccatcccccaggagctcctggccccactgggtggggtgggaagaggcctggatgcctggcgccccctcccgcagccccactctcaccctggcaccaggctctgtggcacttcaggggtcagtttgtttctgggcttctggccactctcttgccctcgccttcccctgtccagcctgtgtagccttgggacatcccagggtggtcccatcattgccagagactggtgaagtaagtggccgagagccaaaacagtggctgccctggcctgggagcctcggtttcctcatccgtgaaatgggactgtaaccccctacacaggtcaggggaaaacggtgggattacaggccagggcccaggtcttgccccaggtcaggtgaagaacccccactgcctccctgcccagccccctacctggccctcaactctgtccctgggaccagggctgctcaggcccctcctgcacccgcccgcctccctctctccctcccagctaggctcatttgaagcccagagttatttggaaaaagcaacaggaccagccgggcacggtggctcaacctgtaatcccagcatttggggaggccaaggcgggaggatcatttgaagtcaggagctggagaccagcctgagcaacatagtgagactcccatctctttaaaaaataaaaataaaaaaatataattaaaaactaaatgaaaaaaccaacagaccccagagcagagtccagtggataaagccatccagggcttcaagccaggctgccccctccccaaccccagtgtccccaaccacagctcagctcggagaaggctgggagaaccggcagggtggtctcgagcgtccttccaggcgggattcagacactgtagctcctccagcccagccccgagaacttccccgaagccagctcttggc

SEQ ID NO: 11497 - DNA, 6000 bp, Homo sapiens
tgcagtgagtcaagatcacaccactgcactcaagcctaggcgacagaacaatactccaccttaaaaaaaaagaaaatcaagtctatagtcactattctttagatttggggagcaagtaaaagtttgttctttggccagcagcaagattatctgggtatttaaaaagtatttatgagctgggtgtagaggctgacacctggaatcccagcgctttgagaggccgaggtgggaggatcacttgagcccaggagttcaagaccagccacatagcgagaccctctctcaacaacaaataaaaaataaattagccaggtgtggtggtgctcacctgtagttccagctactcggaggctgaggtgggaggattgcctgagcccaggaggcagaggttgtagtgagccatgatcatgccactgtactccatcctgggcgacagagcaaaacccagtctctaatttaaaacaaaaaaaggtatttatgtatttgacttagaataagtaatacattcataaggtacaaaatttgaatgatacagagtagtatatagtgaaatatattcctttgcccctggtctccctcctcccagttctccagagacaaccaaccttacctccctcccttttttttttttttgtttttgtttttgtttcaggaggtatttcatgcacatacaggcaaatatgtatacctagtatctatgttcttccctcatttcccaccacaattgtttgagaacatacaaacggtaacattctatacctactgttctgtaccttgcatatttatcaatttgtctcagagatttttctgtttaagcaatgagcttccttccttgtttgtttgtttgtttgagacaagagtctcactctgtcaccccggctggagtgcagtggtgcacccttggctcactgcaaactccgcctcccaggttcaagcgattctcctgcctcagcctcccgactagctgggattacaggcgcccaccacgcccagctaatgttttgtatttttaagagacgaggtttcaccatgttggccaggctggtctcaaactcctgacctcaagtaatctgcctgcctcggcctctcaaagtgttgggattacaggtgtgagccaccgtgccctgccggccccttgtttgtttgtttttgtttttttgagacggagtctcagtctgttacccaggctggagtgcagtggcgcaatctcagctcactgcaacctctgcctcccgggttcaagccattctcctgtctcagccacccctgggactacaggcatgtgccaccatgctcagctaatttttgtatttttagtagagacggggtttcgtcatgttggccaggctgatctcgaactcctgggctctagcgatcctcccacctcagcctcccaaagtgctgggatgacaggcgtgagccactgtacccagcccagattatttctcaatgttttcatttatggcttctggagtttatgtcataatttcataatttagaaatgcctcttggggattattaacaccaattctcccatggacttttgggggctttttttttccttctcccttaaaaaatcatttaaatattttatctatctggaatttatattagtgtaatatgtgagatgtggatgcaacctactttttttccccccagctggccagcgagagtgttttttcggggtgggggtggggagggaaggagaggaaggtaggacaatgaggaggacagtaactgaagaagagaagctttcagctcggtgtggtggctcacgcctgtaatcccagcactttgggagtctgaggaggatggatcacctgaggtcaggagttcgagaccagcttggccaacatggcaaaaccccgtctctactaaaaatacaaaaattagccaggtgtggtggtgcacacctgtgatcccagctactcaggaggctgaggcaggagaatcgcttgaacccaggaggtggaggttgcagtgagcctagatctcaccactacacttcagcctgggtgtcagagtgagaccctgtctcaaaaaaaaaaaaaaaaaaaaaaaaaaaaaaaagaggcttccttgccagtgggtgtagcagaaacgagaagtgacataaacagtcaggaagccggctaggtgcggtggctcacacctgtaatcccagcactttgggaggccaaggcagatggatcacctgaggtcaggagttcgagagcagcctggccaatatggtgaaaccccatctctactagaaatacaaaaattagccgggtgtggtggcacaagtctgtaatcccagctactcaggcagctgaggcaggagaatcgcttgaactcaggaggcagaggttgcagtgagctgagatggtgcccctgcactgcagcctgggtgacacagtgagactccatcccccccaaaaaagtcaggaagctgctgagatcatccaggtgaacggtgaacccacgtggccccaactggaacagggacagcagaaaagatgacaagaggaggttctggagatagaatccataggacccagttattggttcaatgggaaaaggccaaagaggtaaaatgcctgtttcctgatgtttccttagtgatgctatattattagcagacagagaagactcagtgttttaggagttctggtttcaaaaaaagcagggggcatggagtcaaagtccaaatttgaagcctcactgggacatcctggggagatgtccaacagggtgttgaaaagatggcacagagtatcagatatctgggtgaatttctccacagctctctctctgggtgagtgtggagttcagtcccttctttggacaggtattgtgccccaccctgagggctactgcattcatccaacctgttggagggactggttcctggacataggaaacctggcacctgggccatggtaataatctctttatataggattttgctattttcacaatattttaaagatgaagagtggatgggaatggtggctcacatctgtaattcctgcactttgggaggccgaggcaagggatcccttgaggccaggagttcaagaccaggttgggcaacatagcgagactctgtctctacaaaaaatttaaaaattaggctaggtgcagtgctcacacctgtaatctcagcactttgggaggccaaggtgggaggactgcttgaggtctggagtttgagaccagcctgggaaacatggcaaaacaccatctctacaaaaaaatttcaatcaactttctttaaaatgaaaaataaaaatacaaaaattagccagttgtggtggcgcatgcctgtaattccagctactagggaggctgaggcaggaggatcacctgagcccaggaggtcgaggctgcatcccagcctcagcgacaaagggagaccctgtttcaaaaaataagtaacatatatgttattatataatatatattatttatataatatataaatataacaaatataacatttatataatatataaatgttatatttatgtattattttataaattaacttttttttttttgtgagacggagtgtcactctgtcggccacactggagtgcagtggtgtgaactgggctcactgcaacctctgcctccggggttcaagtgggtctcctgcctcagtctccccagtaggtgggattacaggcacccgccaccatgcccagctaatttttgtatttttagtagagacggggttttgccatgttggtcaggctggtctcgaactcctgacctcaggtgatccgcccacctcagcctaccaaagttctgggattacaggcgtgagccaccgtgcctgggctatttttaaaagatggagaaggggctctgagagaagtgagttgcacagtgttgcaaaaggaattcacagcacagctagtaataatagtagtagtagtaataataacaatggcgatgagaacacttagtaatgccgtgctctaaatcctttaggaacaaaggttataccacttaatcttcatgaccctgtaaagtagaaaccatagcaggaggcagaggtgggcttcactccccaaccaaggctgccagacttttcaaaccccagaagctctctgtatccccccactcctcttccatccagggcttgcctcctgcttggtcacttcccacccccaacaggccggccttcaaaagcgagctctaggcagcgtgtgggacctcacgcctgtaatcgcagcgctttgagaggccgaggagggaggatcacttgagaccagttcgagaccaacctgggcatcatagcgagaccgcatctctgcaaataaaataaaataaaattagctaggtgtggtggcgcgcctgtagtcccagctactgggaggctgaagtgggagaatcgcctgagcacaggagttgaaggctgcagtgagctgtgactgcaccactgcaatccagcctgggcgacagaacgagaccctgtctctaaaaacaaacgcgcgccctccgccgtcaggctggatggagggaacccagggagacgacttgggcctgaagcctcgccaatttcaggtgaggaaacagggccgtggaggagacaatgtggcgatcacaagcaagcggcggcccgaaggaggaggctagaccggcgggcgcacagccacagttctgcagtgatccccgggaaggtgggcagccggcccggtgacctgcagggtccgagctgtagaagccgcagccgccgtctccaggcgactccgccacccccggaaccacgcactttcatttctctgccgggcgacccagccgagccgcgagggggcgtggccgggccgggccgtaccaagagcgcaaatttgcagggggaagcgcggggctccgggaatgcacgcgcggctcgagtgggcggggcggcggcccaatggccacgcccccacccccgcggccggcgaaggcggtggtagcgcctcagtggtgtgggcctgagccctgcccaggtgcccgcagagagcagccgggctgccagcggtgagtgctatctttcgcggcgacggcggggtgggtgaggtcgggccccaagactcggggtttgccgggcgcctcagttcaccgcggccgcctggctctctgcgtcggggtgggccctcgggcctgggcactgcgcgtctggcccgacgctcgggcggaaggcatggctcccaccccggccctcctccgcgtcgcccttcccctagagctgatctcccgcggcggcctgagggtcgacttttccacagcttgggccgagagagcccggcaggccctcggctgagggttagggctcggtatctcagggctcggggtccagtccccgcgccgccgccccccacgggctaagccactttaactctccgagcctcagtttccccatctgtacgatgaatgggcctcgggaggcagcgaattctgggggtacctaacgtgagaggcgctcgatgcatgctcatgggacccgaatctaaccctgcagcatcaggtgggctgagtcgatggatcacgggagccccccagcccggcctgcatccctgagggcagtgcccctcgcagtcaggtgtctcggcggcccccacaacacaggtacccggatctcctgggggagccgggacacccttagatcgggggagcaattgggtaagagttcaaggtctcttgggcgccagggggaggagagtagaggtttcagtgagcttgattgacttcgactttctgcgtattgtttttcaaaacgagttacccttgtgtaaactggtgaccactaataaggagtttggggctgtttcaatgaaagtggctgtctcctctcttaaacccttaaagctgcagccttgccttgccttgcctctgagcttggccaagctggagaatgatgccagcacaaaaggagacaggactggactgggtggccctggtttgattcttggcaagcaagatacctcctggagcctccgttttctgatcagtgggtctggtagtaagaca

SEQ ID NO: 11498 - DNA, 6000 bp, Homo sapiens
cacgcccgcctctggtggccaccccgctgccccatggctggctgggtggccaggcaggaagtgcccagcccgagaggctgggaggtttgttgagggtgtggggtgtgccccacctgaagccggggctccccctgcctgcctctctctcctcctcccctctgggaattgggcagccctgggcagttgtactcatgggggcttaggatgcagctacctcagtgcgcagggcccgtctgtcctctgggggctgcttcgggcccgcggtgctcggggcctggtgtggggcgagtagagacttccccagcctggacgggcgtgggttctgggtcagcttcttttacctcaattttgtttgcaataaatgctctatagccaaagccagcaggtcctgagtgtgtgcatgcatgcgtgtgtgcgcacttgtgtgtgtgtgtgcccccccccacttcctgcatcagagcaagagggggttccatgggctcatcggctcccatttgataactgaagaacaggccacagccaggcatggaggagcccacggtactgggctgtgcggcctccacatgccctacactgatctccctgccatgccagaggctgtcaccccagagcaccagctgtcacctttgtggccctggggttgtggttcacaaaatgccattcacttaggattggagctgctgtctctgttttactgatgtggaaacaggttcaaaggtgcaatgacttgaaccaggcatggtgacgcatgcctgttatcccagctgctcagaaggtcgagacaggaggctcactgtagtccagacatttgagaccagcctgagcaaaattgcaagacctcatctctaaaaaaaaaattaggccaggtgcagtggctcacgcctctaatcctagcacttttgggaggctgagacaggtggatcacctgaggtcaggaatttgagaccagcttggccaacatggcaaaacatcgtctctactgaaaatacgaaaattagccaggcgtggtggcatgcagctgtaatcccagctactcagaaggctgaggcaggagaatcattcgaacctgggaggtggaggttgcagtgagccaaggtcgtgccactgcactccagcctgagccacagagcgagattccgtctcaaaaaaataaataaataagccaggcatggtggcacctgtctgtagtcccagcggtcgggaggctgaggcgggaggatcgcttgagcccaggagctcaaggctgcagtgagctatgattgcaccactgcactccagcctgggcaacagagcaagatcccatctgtaaaatcataataaaaagagacagattgaatgcttggctaggtaggtggaatccaggccagggttgatctgacaccattctcaaagttctaattcttcctcctcttggaaggaggatcagatatccccagtcaagatcttgctgcttgtccgggaggagtagtttgggcctgggaccagagggggacggtagggccacctcattcatggctgtggaaagcagaggcactttggccttggtgagcccctttctctgttaaacctattttacaacatgttggtataaagatgaatatattaatgtatactagaggattttctctcacctaaaggttcatttttttcccttctgattttaaaagaaattaaaaatgtatgtcagctcttatagtgtgggcccagggcactgtgcctaatggtaagttggtccagggtaaaaagggtagtgaggtctctctagaagaccccagtgttggccgggtacagtggctcaggcctgtcatcccagcactttgggaggctgaggcgggaggatcacaaggtcaggagttcgagaccagcctggccaacgtggtgaaaccccctctactaaaaatacaaaaattagctgggcatggtggtgtgcacctacaattccagctaacttgggaggctgaggcaggagaattgcttgaacccggaaggcagaggttgcagtgagccgagatcacgccactgtactccagcctggcgacagagcaagactccgtctcaaaaaatatatataaaaacaaaaccatgagatgccacactacacccattacgatggctatactaaaacaaaaagcagtgttggagaggatgtcgagaaatgggaccctcatccactgctactgggaatgtaaaatgcagccactttggcaaacagaacctcagaaagcagcattagcatatgaccacagttccactcctaggtacattctcaagagaattgaaaatgtgcccacagaagcctgcgcacggatgctcatggcagcattatttacagtagccccacagtggaaaaaaacaaattctgcatccactgatgaatgaaagtgtgatacgttcacaggatggaatattactcaactgtgaaaaggaatgaagcaatcacagtcgaggaggaaccttgaaaaagtaacaaaagccagacacaaaaggtcacatgttgtgtgactgcatcctatgaaatgtccattacgggcaaaaccatggaaacaagaagtagcttagtcgtcactggggacgggagaatggagagttaccgtttaatgggtgtagtgtttcgttttggggaagtaagaaggttctggaattggtgatggttgcacaaccttgttgatatactaaaagctgttgggcgctgtggctcatgcctgtaatctgggcactttgggaggctgaggcaggaggatcccttgagccaggagttcaagaccaggctgggcaacacagtgagaccctgtctctacaagaaatatatttttattatattttttttgagacagagtctcactctgtcatccacgctgtagtgcggtggtgcgatctcagctcactgcaacctccgcctcccgggttcaagtcattctcctgcctcagcctcccgagtacttgggattacaagcacgttccaccacacccggctaatttttgtaattttagtcgagacagggtttcaccatgttcgccaggctggtctcgaactcatgacctcaagtgacctgcccacctcggcctcccaaagtgctgggattaccgccgtaagtcactacacccagcctcaaaaactatatttttaaaaattagcagctgggcgcagtggctcatgcctgtaatcccagcactttgggaggccaaggcaggtagatcgcgaggtcaggcgttcgagaccagcctggccaagttggtgaaacctcatctctactaaaaatacaaaaattagctgggcatggtggtaggtgcctgtagtcccagctactagggaggctgaggcagaagaattgcttgaacccaggaggtggaggttgcagtgagcagagatcacgccattgcactccagcctgggcgacagggtgagactccatgtctcaaaaaaaaaaaaaaatagccaggcacggtggctcacgcctgtaatcccaatactttaggaggccaaggcaggagatttgcttgatcctcccaggagttagagatcagcctgggcaacatagcaagatcctgtttctataaaaaatacatttttaaaaattggccagccgggcgcagtggctcacacctgcaatcccagcgctttgggaggctgaggtgggtggatcacctgaggtcaggagttcgagaccagcctcaccaacgtggagaaaccctatctctactaaaaatacaaaattagacaggtgtggtggcacatgcctgtaatcccagctactcaggaggctgaggcaggagaatcacttgaacccaggaggtggaggttgcggtgagccaagatcgagccattgtactccagcctgggcaacaagagtgaaaactccgtttcaaaaaaaacaaaaaaaaaattggcgggggtgccaggcacggtggcacatgcctgtaatcccagcactttgggaggccaaggcgggtggatcacttgagatcaggaatttgagaccagccaagccaacatggtgaaaccccgtccctactaaaaatacaaaaattagctggccgtggggcacatgcctgtaatcccagctacttgggaggctgaggcaggagaatcgcttgaacccaggaggcggaggttgcagtgagcccagatcacgccactgcactccagcctggacaacaaaggagactccatcttaaaaaaaaattaattaaataaattttaaaaattagccggagcatggtgttgtgtgcctgtggttccagctactgggaaggctgaggtgggaggattaactgaacctgggagtttgaggctccagttagctgtgaactgacctccctgggtgacatatatatatttaagccactgagctgtgaaggttgtgaaggtatgtgagttatgtcttgaaaaatacacacatagtgagcgccaaatcccgggagtagtgtttaagtggcgggcttgtcagctgtcaagggctctgcagccctttctctgaatccaagttcttcttcctgtggacagggaacccaggctgcgaactgggaggatgtggcctcgtggggggcagggccagcgtgctgtgatggggatggggctgggcaggttggggctgcctgctactccccactcctgactctgggtggggacagaaggcagagggaggctcctggcacctggggcacaggaatctcaggcatgtggtcctgagcctgtttccaaaagccagaccctcctccccagggcggagagactgggaggggccccaatccaggctccgggatggcctggctggcatctggggttccagtggcccctctcccttggccctggcagtggggctggatactggcctgcctcccaccagagtccccccagctcctccctgctgtgggctggcctgggaggaagggggtggggtgcacttacatttgcaggtctttccagcccctggggcagcctgattaaccagcttctccagggccaagctgttgggggtgaggtgcagcccgaagcagccagaccagcccctgagcctcccgggtgctggcagctgtcatggggctaccctgggggcagcctcacctagggctgcagatgctcctcctggcgttgaactgtctccggcccagcctgagcctgggtgagtgggggtcctggatggacgcgtccagccagacccaaggggctgggggccctgctggagtgattggaccctgggcgcccgcccccctccgattgggagaggcagccccagggacccccacgcccgtctccgtggctcaccttttgtcccccgtggccacagagctggtgccctacacaccacagataacagcttgggacctggaagggaaggtcacagccaccaccttctccctggagcagccgcgctgtgtcttcgatgggcttgccagcgccagcgataccgtctggctcgtggtggccttcagcaatggtacggggactgctgtggggcctgggtgagggtgacggctgaggagagtggtgggccctaggagcccctcaccagcaagcgccttcaatgattgagcccctgtgggggcctttgggagagtaggtgtggatgaattgggctttatctaaaggggtaatatgtgtattgaaaaatacacacgtagtgaacaccaaatcccgggagtagtgctagtggtgggtttgtcagctgtcaagggctctgcaaccctttctctgaatccaagtagttcttcctttggacagggaaccgaggctgcgacctgggaggatgtggcctcctgtggggcagggccggtgcactgcaatggggctggggctggggctgggcaggttgggactgcccgctgctccccactcctggctctgggtggggacaaaaggccagagggaagctccccttcaggggtaacaaagtcgactgggtctggactatctctgggggccctgagggaggaggtggcatggggggtcagggctggagactgggcgaacacagaacccccactcataaggacaaagct

SEQ ID NO: 11499 - DNA, 6000 bp, Homo sapiens
tggcaactgaaaaatgttcatctattatacatatataagcataagtgtgtgtatgcctaaatgtatgtatgtatacatttccatgattagtattccctaaagattaaagtgataaaataaatgttgcctggttttacattggtaactaatgttatgagatagttcataggtcaatagaatgaaattttatgttttatttaatctaaaataattctgttgattgccacctacatatgttcactgttcattttctattgtgtctagacattattttgctcttaatgtaatatcaggttaaaattattcaacttgtgcaaagattttgagaaaaatatgtaaaattagattttgatcaaggataaatgtatctttttttttctttgaagaaaagagtataggcccttcagtcagtcagtttgggttccagcccttgttctgccaagtactagctgtgtgaactcagctagtcatctaaagagcctagtaaggagagatgattattcagcaaggtaatacatgtgaaatacttagctccacacctggcaggtagtaagctcctactatgtgttgactatgttattgtatgatcatcttcattgttctttgctcttcaagtctttgttcacccattcaatctagaattacaatgcaagttatactaaaatgcttcttttcatttgctgaactgttaaaaaaaatcgcttagttttcttttaaatggtatctactactataagatattcttgtatctgcatatagccttacattttaaagtttaaatctactatctgatcttcagcttaaaggtaggtagactttataggttatcccatttaacaagaaaggacaacaggaatacaatgattattacgtcttgcctagttcacaaatcctattgctaataaaggaatcacacgggccatgtgattcctcttccagaactcttgttacccatctgtcatttgcttctcaaatatgttgcaatatttgttactcaacttactgtactcttcctcttttatttcacaagtgttacattccatgaatcagcttgtccaaaagtactgttaaaaggattttttttaactatacaaatgctaaaagaaagtttattttttttttagtatgctcaaagtggataaaggctttcaaagcatgatacaatcctcaaaaggaaatgactcaaagtttatggaataaaaatgtaaacatttctgtaagttacacatacaaacagaaaagtaaaaattgtcaaattaaaaaaaaattgtcaaatgtccaaagactattttcctactaattattaagaaagggacaaagcaatttatggaaaaaaaggtgaaaaggatattgttacaaatgttttaaaataaaaatggctaatatactttagaaaattataaaattactgggggaaggttaacacacacttaacatttgttacttctgaggaatacaattggggattgaggcctctcattgtacacttttctataattttcaatattgctttctctccatacttaatacattttctaaaataaaattgtgcgtgatagccagtgatggccatgcaattatttgttgttgtttttgttttttgagacagagtctcactctattgcccaggctggagtatagtggcacaatcttagctcactgcaaacctccgcctcccaggttcaagcgattttcctgtctcagcctcctgagtagttgggattacaggcatgcaccaccacacctggctaatttttgtatttttagtagagaggaggtttcaccatgttggtcaagctactctcgaactcctgacctcaagtgatccgcccacctcagcctcccaaagtgctgggattacaggtgtgagccaccaagcccagccacaattatttgttaaacaaaaactatgtcaggctctgtgctaaatccttcatattatcacttttaatcttgacagcaattctgtgagggagatatttctaccatgtttaagagaggtaaagtagttagcaataagtcatacacttaggaagtgatgaattccaaattcagactcggattccattcattttcctagcagatgttcttaatctgaatcaaaccattacatatccatggtatgaagaagcagcataatagtctctcatttccactcattctcactacttgtaaagcattatgatggttataatagtcttgtgtgtgtctgtttattcaacttattaccaactatgagcttattctgtactataggggttcagtggtgaattaaacagacaagcatccccctcctcaaaaacgcaacattctagcaagtgcaaaggcaggtgcaaagttcagtggtgaattaaacagacaagcatccccctctgcaaaaacccaacattctagcaggtgcaaagacagggcaaaaacaaaagtcaattggcagaatttcttcgatggtgataagtgacctgtggaaaataaagcagagaacggagaggggaggaggcttgtaggaagtgggggtgatgaaatggggagtgttgagtgcctagaaattttcaggctcctgtcaagtattgtacactactcatctcttagctcttattattactcttttatttagttttctctattctttgattatgaaaatgagagcaatgaatgttaattaacttgattatggcaatcattttacagtgtatacacatgtcaaaatgattcataccttgataaatctggaaaaagaagaacaagcagttaacttccaattacaagtcaatataactagggcccggtagcctgaggatttaaacttacatccttccaatttctaaccctatgtgatctcttgcaaaaaaaaaaaaaaaagaatttccaaagaattgtctaaactgactgaagtagattgaaaattatatcctgtcattctaataaattaatccagtgttatagtggatttacataaagcaaggtatatgctcacataaaacacatcccttcaaaatatggtgggtgcatagtctttaaaaaaatgaaaaccccaacactctttactttaaaatgggtacagcattttgctatgttattgtttaaggtctatatttttctaaaaatccacagttgcagatttgactcagctgtgtgctttcagatcttgtatgctaagctactcaggaactgttgtctatgggattgaacacttaacagctgtctctgggaatgtaaatttgattctttggactgctcatgggactctgtgacattttcctctccagtgacagcagatttgaatggcattaggctactgattaaataatacccaagtaagtttaatgtcaacttaggcatctattttgcatgtattttttctgaaataatctttctctaattgcgatcatattttcattatactttagtcttttaatatctttaaaatatgctcttttaaacaggtcttatctgaaccctttcgttggtaatctttttctgaattgtcatattagagtgtgagtgtgtgagaattaaggttgagaaataaattagcttaaatacaaaacagctatctacaaaatagatattcttaaccaaaataatatgtctttatactaccattttatatcgtgccaccaagataaaaggtcgcagttatttaagggaattaccttcttaagtttcatgaaatcactgtgagttattcttttctaactgaaagcataaattataaagagattgcacatggtcatttctactttatcctaattaagtggtctgagatttgaaaaaaaagtaatagacttacaatatttttatgacttattttttaaataaatatgtcagtaaaaacttccctggggaaaaaaaattcttgaggagaaaagagtgtttggggttttttttttcagttgtatggcactgcttgcaaatgaaaggattcgttgtgtgcctcacatgcccaaaaaggacagcacgagcattctaacttaaggactggtttaaatatgacctaatgaactaaatatatttctgtctggtattcttaggttactttacttctaaggttgtttgaatgcatttatccagctctcctatcaaatacatgccaggttaaccctgtgaaggttttcctgtatgattctgagaatttctttataagaacagggtcttgatagtgaaggttctttccccaaagtgcaaggccttctattttgattcaatatcaacataatgctttttttttttttgaaagtgacttaagtactaaagattatcctcaatagtaattctacttagacatattttggttgaagaaatttaaagagtttattttttgtaggagcactgtgctgtgatcatgaaatttttgcaaaactaacagaaaatgataaacagttaagaacttccagctagaacaataggctgtttcctttttttaagtcagtttgtcatccttgctgattgacagtctccaattgttttcagaattattagtctcacagtatttcagaattacgctgtataaaaaagtacattaaatttaaacttaataaaataagtttcgcaagctcagtcaagacagggaagtgagaatatgattattcttccaaatttactatttccaccagcggtctcagttcagcatctgagaatatgttaggggaaactcagcaagtcagttccttttgtttttctggcctctgacttacttggatgggaaatagccaaaaaaaaaaaaaatgctgaatatctcagatataggtaatgggtcttcaccagaacataaaaatagacccttattagccatatcagtaatgtgctgtgtgggggattttttttttctttcaattcctctggcaacaaaccacacactgggatctgacactgtagagtgctttctcttctctttttttgggggggggagggggtgtggttgcatatttaaactctcacgcatttatgtactgaggactgcagtgtaggactttcctgcagaataccatttgatcctattaagaattgtccaaatgttggagcatttgattgaaaaatccttcttagccattttaaaggtaagttgtatgatttttctttaaataaaaaagattaagggatttttcccatcacccagatgacgggaggtgacactactgtataaatactcctaagaagttatataggaggacaggaaaaaaggtagtaactgttttcttagtcactaggctttatctaaaaatcaggtttgcattattttcaagttatcaaccttcctatattttatgcttaaaccatacccaatggcatttcatgtcgtatgtataagttaatatttaaagtgatttataatccaatttggattattataaaactttcattttatacttaggctatttatacatgatgtttaaatgatgaagatcattatactgcagaccaatataatgaggttagatgttataaatgacttacagctcttatgtcaacatgttgtctaatatgcaattattaactattactttacagagtcattagcttgtttaattttcaatctgaattgcacaacttttggtatacctgacttgctctacatgatcaaatgcaatgtgtattttggatatgtgctttttaagttcttttctgtaatgaacaaagatattgtcattgttactgggaatagcaaagtatattacttttaaataatctgaaatttaattagtgtaaattagtagaataaaaataaagttaattttttttcgattcaggaagcttattacaaatagtactgaattattagatgatgatgccaagttgaagtaaaggagaaatcaatttggaggaattaagtaaaagcctcaaattaattatacattaactaaaattataaataactgtaaatggcataaattctctagagtacatcccagtttctgaaatcatcaagtagcatattgaaacctgttttgtaaagatttgcatgtactttttagtctttttctgtgtggtttgaagtcagta

SEQ ID NO: 11500 - DNA, 6000 bp, Homo sapiens
gaacattctacccaacaactgcagaatatacattctattcatcattacatagaacattctccaagatagaccttatgataggccacaaaataagtctcagtaaatttaagaaaattgaaattatatcaagtactctctcagaccacagtggaataaaattggaaatcaatccaaaaggaaccctcaaaaccatgcaataacatgaaaattcaataacctgctcctgaatgatcattgggtcaacaatgaaatcaagatggaaatttaaaaattctttgaactgaacaataacagtgacacaacctatcaaaacctctaagatacagcagaggcagtgctaagaggaaaggtcatagcgttaaatgcctatatcaaaaagtccgaaagagtacaaatagacaatctaaggtcacacctcatggagctggagaaacaagaaaaatctaaacccaaacccagcagaagaaaagaaataaccaagatcagagcagaactaaatgaaattaaaacaaacaaacaaaagtacaaaagattaatgaaacaaaaagctggttctttggaaagataaataaaattgatagaccgttagtgagattaaccaagaaaagaagagagaagatccaaataagctcaactggaaacgaaatgggagatattacaactgataacacagaaatacaaaggattattgaggctgctataaacacctttatgtgcataaactagaaaaccaagaggagatggatggataaatttgtggaaatatacagtccttcaagattaaaccaggaagacatagaatctctgaacagaccaataacaaacaatgagattgaaatggtaatagaaaaataaccagcaaaaaaaagtccaggaacagatggattcacaacttaattctatcagacattcaaagaagaaatggtaccaatcctattgacactattccaaaagatagagagaatcctccctaaatcattctatgaagccagtaacacctgaataccaaaaccagggaaggacataacaaaaaaagaaaactacggactgatatccctgatgaatacagatgcaaatatcttcaacaaaatactagctacctcaatccaataggatattaaaaagataatccaccatgatcaggtagtattcatgccagagatgcagggatggtttaacatacataaatcaataaatgtgatacaccacacaaacagaattaaaaacaaaaatcacatggtcatctcagtagatgcagaaaaagcatttgacaaaaccagcatcaaaatcctcagcaaaattggcatagaagggacataccttaaggtaataaaagccatctatgacaaactgacagtcaacattatactgaacagggaaaagttgaaagcattcccagtgagaactggaacaagacaaggatgctcactttcaccacttctactcaacatagtacgggaagtcctagccagagcaatcagacaagagagaaataaagggcacccaaatcagtaaagaggaagtcaaattgtcactgtttttgatgatatgatcgtatatctagaaatccctaaagactcatccaaaaagctcctagaactggtaaatgaattcagcagggtttcaggatacaaaattaatgtacacaaatcagtagctctactgtacaccaacaatgaccaagctgagaatcaaatcaagaactcagttccctttacaacacctgcaaaaaaattaaatacttaggaatatacctaaccaaggatgtgaaagacctctacaaggaaaactacaaaacactgctgaaagaaatcataagcgacacatgcaaaaaaaacaaacacatcccttgctcatggatgggtacgatcaatattgtgaaaatgaacaaaccgccaaaagcaacctacagattcaatgcaattcccatcaaaataccaccattatccttcacagagctagaaaaaacaatcttaaaattcatatggaaccaaaacccacatagccaaagcaagacgaagcaaaaagaacaaatctggaggcatcacattatctgactcccaactatactataaggccatagtcaccaaagtagcatggtactggtataaaaacaggcacatagtccaatggaacagaatagaaaacccagaaagaaagcaaaatacagccaactgatcttccgtaaagcaaacaaaaacacaaagtggggaaagcacatcctattcaacgaatggtgctggaataattggcaacccacatacagaagaatgaaactgaatcttcatttttcatcttacacaaaaatcaactcaagatggatcaagactgaaatctaagacctgaaaccataaagattctggaagataactcagaaaaacccttccagacattggcttaggcaaagactccatgagcaagaacccaaaagcaaatgcaacaaaagaaagataaatagatgggacctaattaaatgaaaaagcttcagcacagcaaaagaaataatcagcagagtaaacagacaacccacagagtgggagaaaattttcgtaaactatgcatctgacaaaggactaatatccagaatctacaaagaactcaaacaatcagcaagaaaaaaacaacaacaaacaatcccattaaaaaagcgggctaaggacatgaatagacaattctcaaaagaagatatacaaatggccaacaaacatatggaaaaatgctcaacatcactaattatcagggaaatgcaaatcaaaaccacaatgcgataccaccttactcctgcaaggatggccataataaaaaaaaatagatgttggcatggatgcaatgaaaagggaacacttttacactgtttgtgggaatgtaaactagtataaccactatggaaaacaatatggagattccttaaagaactaaaaggagatctactatttgatccagcaatcccactactaggtatctacccagaggaaaataagtcattatacaaaaaagaaacttgcacatacatgtttatagcagcacaatttacaatagcaaaaatatggcaccagtcaaaaggcccatcaatcaacgagtggataaagaaaatgtggcatatatataccatggaatactattcaggcataaaaaggaacaaaataatggcattcgcagcagcctggatggaaatggggactattattctaagtaaagtaactcaagaatgaaaaaccaaactttgcatgttctcactcatatgtgggagctaagctatgaggacacaaaggcataagaatgatacattggacttggggactcaggggaaagggtgggggatggtgagggataacagactacacattgggtacagtgtacactgctcgggtgatgggtacaccaaaatctcagaaatcaccactaaagaacttattcatgtaaacaaacacaacctgttccccaaaagcgattgaaatacaaaaataaataataaacactcggaaaaaaaaaatagcctcaagtaactactggctacagtatttgaaaggcacacctctaaatcttaatttttttcctttctaaaatgggagtaggcatgtgcagtggctcacatctgcaatcccagcactttgtgaggccaaggtggagcccaagagttcaagagcatcctgatcatcatggggagactcttgtctctacaaaaagtaataataataacaaaaaatagccaggtgtggtgtcacatgtctgtggtcccagctatttgggaggctgaggcaggaggatggcttgagcccaggagcttgagctgcagtgagccgtgttctcaccacttgcactccagttggggcgacagagcaagaccctatctcaaaaatacatacatacatacatacgtacatacataaatataaaatcagagtaatagttataatcaaattcttgaccaaaggatcagataatacatgtgaactttgaaaaactaaaaaatacaagtattactttatgtagataactattttattattgttttatactcaagaatttctatcattttgaatcagaggaaaatggaataagcagcctgagaaaactgagttccccatatctggtagagttttgaggctgtctggcaataaagaacaaaaatatcccgtagagttaagctaaatcatccctctattacctgcagagaccttccctgggaggtcctctttgactccctggactgaattaatggtcctctaggtataaccatgacacttttcacactgtattgtaaaaaaaagtggtctgtctgctcaactttacccaagaacaggtgcctctgatccccgtgtccttccggttgtcaaccgctgggtacatagtatatcctcaatctgtatttgttgaataattcactagcactgtattcgtgagggtatggttctccggataacttaagtaactactaatctgtggtaaacagaacagctctttaaggacgatgcagatgaatactggctgctgtaacggcccagttggtgcatctcggatgccaggaggcggtccagtgctgatctctttcttttgcccttccctcccgcccttccagtctgtgggatatagaggacctcacagtcacgaggtcgcgacggtccgtgccgtcgtggagacaagcgggacacggagagagaactacatttcccagctgactctcctgcgcgcgcccttgcctgcgcgcggggggcgagtgcaccgggcgctcgctccctgccgagctcttgtcgcccgcccgagcctttgccaggggatgaggtgggaggcgctagaaaccacttagctacagccaaccgcccaatgcagcactcgctcgctccccccgccagcggaagcgtccgcgaagcacaatgcagcactgagccgcggtggaggttgcagcgccacggccgccgcagcaccggccggggctgggtggaggtggccgcggggaccccgggggcgcggagcgagggaaacggactcggcggcgccggcatgaggagctgagcgtctcgggcgaggcgggctgacggcagcaccatgcaggcggcagtggctgtgtccgtgcccttcttgctgctctgtgtcctggggacctgccctccggcgcgctgcggccaggcaggtaagttagccgtcctctgtgcctttgggccataccatttcccgggaatctttggagccctcaggcgtattgaaaagggggcatccccatttcccgagtgcgcggggagattttttttttttttttttttaattcgggagggtggtgagaagtggagcaaaaatatatgtgtggaggcgcgcagatgcactggaagccttcggtcaaagcctgtttttctccttctgaagaggaatggggagaatgggaaaggggtgccctgcttctgggccccgctcctggttgctctcggatgagctggtccaaggctctcgggctggtgtctctgcgtccttcccagttgggttccgagagggagggggcggtggggattttcgtaggggagacgtaggactgcaggatggaggagtgagggtcagggtcattattttcgccttttctctccactccctcctttcccggttcctgcctggaggagacgcctcattgatggagctagagaagaggaaggaaaaccgcttcgtggagcgccagagcatcgtgccactgcgcctcatctaccgctcgggcggcgaagacgaaagtcggcacgacgcgctcgacacgcgggtgcggggcgacctcggtggcccgcaggtgagaggctcggtccgggaggtggtcctccgcgcctcccggcccacccgagaccccacgattgcgctcggttgccctggagatcccatgtcttcttgggtgaaatgagttgggtcccgatgcgagtcatgcatggcgctccctgtgcaaaaaagaaggggaaaagggtacaaaaaagaaccaaaataaccacaggccgagggctttgcccgaggggagtttgtgcggggtgc

SEQ ID NO: 11501 - DNA, 6000 bp, Homo sapiens
gtgaaaatacattatctgtatcccagaaataaaaaaaaatatcctttttctggcctagagcataatacttcagccctgggggccccactcacctggtattctatgtatatggtgccccctgcagcagccctgggctcattacaagtaacactgattcttaggtgttctatgcctttttaccaatctctttagaggaagcagatgaacatttagaattttaacagggaatgtttacctgaggacagaagctagatgaaaagatcagctggaacccagaacacatatttttcctgacaatccagccaaatgtgaatccagggactcggtgtaattcatcagaacaaagcaacactgcaggcaggttgtgtggtacccatttgcctttgtaataccgccatgctcaattccaaacacagtctgtcaactcatcggagccccactggtgagaaagccaaggctggcagcaggtttggtgccacctcttggtgccagagccacctgcacacagcatggagcaagggaatagccagggtgccctggatccagttccttccagaagccagcagccctagggctcctccatcccactcccagcaagaagaagctgccatgaatatgaaggtgggaagaggaagctcagaccaggggaaggcttgggctgtgtgttaattcttctctggtccccaggacccaacacagttgtctggttaatactgcattaaatgcagttaattgattctagccccatttccactaagaaattcctgagtgctctcagaaagttacttctcttggagcctgcagcacaacaaaccactcagaacttggtgctataaaacaacagcaagcatttgtcattactatctttcacttctttaggggttgatggggctcagctaggcagtttttggtcctcatgcagtgacaatcagacaatggctggggctagagttctcttgaaggcctttccattcatattctctggtgcctgacttgggaagacctaaatagctggcggctggaacagtcggggctcctcaggcacctctgtctattacaatgtgctccctccatgtggactctctgtcagggtagctggacttcttacatgaagtcacctgtacccggagacaggctggtggaagtcaataacccattgtgatccagcttcacaagtcaagcagtgtcacttccaccatattatatgcacggagacagtcaaaagtgctgcccatgttccagggcaggagataggtctctcttcttgatgggaagaatgttaaagaatttacagacttgctttgaaacagagccttaatttctccatatcctctaaatgaggataataataccttcttttttccctaaggtataaccccttcataaccttctattataagtgtttgatatcctgatatttctttctccatgccagaacatactttcagaaaaagctgaaatattctttatagtaggatgtaaataactgataaggcttaatatggtaccattgccaggaactttagtcttttcatagatcgcaacatatttaaagccaatggaatatatcacggcattttgaacatcactgaacagtactcaggcagagatctgtgagcttggaaatgaagcacctactcttacaacctacctgaaaagatgtttactgttgcctgtcttggtgaaagagcaataagggactttgagtttgggagaaagaattcagaagaatagttaaaacctccagtcccaagaacagacctcctctctacccccaaccacttttaaacgcagacacgagggacaaactgaccacatactttgaagattacagtagatcttgaactagtaaagagaatgtatcatatgaggttaacagaatcagaaattttggccagtgaagccttatcatgtctgtcttaaaacatcattttgacaaatatttcttcttgaacttaggtaatttttgcagtcgtttaaaataaaagtctgaccattcttctttcgtaagaggcagacttggaaatagtgttgatcattacttaaattgctgtcccttcaggagttagatttccaaaggaaaaaacttaatataattcttgtcattcacttaaaatttactgtctatttctcattgtgattatctttaatagtatgatattttttattttatctctcacaccatagtatttcatttacttttaaaatggtcgtctcatcaggttctaagatcaggttgcttatttgacaggcaaaaatactcgtggattctaaattatattttctccacagcatgttattatgaagtcaccagtttagtatttgacctcaaataacactgaggtccattatgttaatatgcgctctcactatagtttaagtttattacagaatattctgaaagatccaaatttattggtaactcatgggcgaactcccattttaaatcctctagttgtttagagtcacagcaaaactagcaacttgcctttcaacatttgcaatagcataatgtggctttccacaagccacacttgtttttaaaagtatgtgctaaagaggctgactcagcattctgagatgctctggcattgtattacccgcccccaccacaaaaattttttttctttatctcacacctcaaattacaggttatttgtatgcaaaaattgcagatagttcatctatgatactaactcctggcaactcaataaaagctttttagtaatatgtttttcttaatcgaatattgtgtttcttttataatatctacaaactaattgataaataatctcacacttttaatcattttactttggaacatactctatttattctccacactaaaatattgggcaaaaaaaccttttataagaagtgcagaaataaaattgctaaagtctaattataaaacaaaaatatttggggtttgattttaaatgttttaattagaaaaggaaaagcagttttaagtgcagcttgctatatagccatattcatatgaatatatattattatgttaacacaataataactctttgcccttttcatatggaaaatagattgtgaaaaacagaatgacctttgttctaccaaatgttaaacaataaaagcatatcgttttgtctgaccatttaagacccatgatcacttttaaaactcaacaatgcttagttaaaaagtcttaattctttgtagtctgtgctacacatacaaagattacacagatttcttttctaaaacttttaaattattttctagtttcactagaaacaacaggtgtaagattctatttccaccacaaggtgtcagtccacggtaatttaagcttcaaagggctttaaactaatccaaggaaagtcagtgactacagaaaatacttatattaaaacatgctttgttaaacggatgcttgaaggcggcatgctagttaagagtcatcaccactccctaatctcaagtactcagggacacaaacactgcggaaggccgcagggtcctctgcctaggaaaaccagagaactttgttcacttgtttatctgctgaccttccctccactattgtcctatgaccctgccaaatccccctctgcgagaaacacccaagaatgatcaataaaaaaaaataataataattaaaaaaaaaaaagtaaaaaaaaaaaaaaaaaaaaaaaaaaaacatgaacagtcttcggtgccctagcagtgaataaaaaacaatcatggaaaatgtggttgcgcgtttattttcctttgtgttttctactcagcttagtcctgagaatgttgtataccaaatccccagaattttgcaattcatgtctcagaccctatcttgaggctggttccaacggagagaagtaaatcccctgctcaagttgtctttttctaaaaccttggaatattaacagttaactttactttaggtttggaatacttcattgagctaggatatgggaagctgcacttaaaagctaaggcaaggaagggagggacggagtaaacatggggtttaagggtttttttttcggctggggagcagggtttgtgcgattaaaggtacacaatttgaacaattcagggagcaagtcactctcagaaattcagcttcggattcctcaaactgtcaatcacagccacttcaggaccggctgttaggttttaaataaggtggctgggcgcggtggctcacgcctgtaatctcagcactttgggaggccgaggcgggtggatcacgaggtcaggaattcaggaccagcctggccaagatggtgaaatccccgtctctgctgaaaatacaaaaattagccgggcacagtggcaggcgcctgtaatcccagctactcgggaggctgaggcaggagaatcgcttgaacccggggctggaggttgcagtgagccaagatcgcgccaccgcactccagcctgggcaacagactgagactccgtctcaaaaaaaataaaaataaaataaaaataaataagctaacgtgtgggagggtttgtaagctctaaacggtctatctcaaagtgtgatctgggaatgcttccatatctcatgggaacttgttacaaatgagaatctcagaccccatcccagacatactgaaccggaaactgtgggcggacagcccaacaatcggtgttttaataagcccccgggtaatcttatacacgctaaagtctgagaaccactgctctagagaaatgcacaaacgttccttagtggagattaaacaaaaggcgaggggttggagggcgcgaaacggacctcaggtgcagggcagacggcatttgagaggaaactgggagaggccggagtgcgacttggggagtcttagcctccaaggacgttccggaaccctgcggacgcggggcgccagcaggtggcgctggacgcgcaacggacaaggaggcggggcctgcagctggcttggaggctccgcgctctggaggctcaggcgccgcgtggggcccgcacctctgggcagcagcggcagccgagactcacggtcaagctaaggcgaagagtgggtgagtcccttgaatcgttctcactggccgtttgctcctcgagtccgcccgcgtgtccctgcaaggctgggcgcccgctcccagtcttgggaggggtgtagcgggtcgcaagccttctcgtgacctggacagcggccctcctgggcgagcgctgctcaattctccgcttatgcgcggctctggggcgcgctgccttccagcccagctgggttgtggccgggccgggggttggggagagccagggactcacaggaagccttttcgctaggggcttaaggttgtggtagattattaagtttgtgctcaggttggattttgatggcaagttttttaacgtggcaaagttgccagagtttgctgtgcattgacgaatgactggtgcacagtacttaaaatcgtgctacttctcgtcttcgggtttcctggtaacagaggttttcatttttagtccttagaacactggccctactctttcaggatctgggtggggttcaggttccctccaaaatagtcaatcaaggctttaaatatgtaattctggtcaaatccactggaaggtgtttgtagacataaattttttgtacacttccaaatttcttactttgttacttttgtaaaatacatttccctccacatcctgacgtgtaataaaaggttattcatttaacatgaatgttaagcacagagggaaagcaatgcttaaaaacagcccagtgaaaaaaaaaaacaaaaaactcgacttcacttagttaaatgtaaaacaagtgtgcacttgaaagtataaaaggttggaaatgcaatgcaacccacagtgtattccaggcattgggtttcttcatattctcaactgcgggacataaacatgagtaagttgggctgtgccaacatttaggaacaccagggcagccatcctggtacagcaaaacagcagtcgcattagaaatatgcttcactttttttaaaagg

SEQ ID NO: 11502 - DNA, 6000 bp, Homo sapiens
aatgaaacaagaaaactataggccgatatcactaatgaacatacatgtaaaaattctcaacaaattttgagatactagcaagccaaattcaacaatatgttaaagactgtgtgcagtggctcacgcctgtaatcccagcactttgggaggctgaggcaggaagaccgcttgaggtcaggagttcaagactagcctggccaacatggcgaaaacccatctctactaaaatacaaaaatcagatgtgcatggtggcgcatgcctgtaatcccagctactcaggaggctaaggcaggagaaccgcttgaaccagggaggtggaggttgcaatgagccaagatcatgccactgcactccagcctggatgacagagcaagactctttctcaaacaaaacattataaagatcattcaccataatcaagtgagattcattacagggatgcaaggatggttcaacatatgcaaatcaataaatgtgatatatcacattaacagaaccaagaacaaaaacaatatgattatttaaatagatgctaaacaagcacttgataaaatccacatcgctttttgataaaaaaaaaaccctcatcaaattgggtatagaaggaacatacctcaaaataataaaggccatctatgacaaacccatagctaacattatactgaacagggaaatactgaaggccttttctctaagatctagaacatgacaaggattcccactttcaccacttttattcaatatagtactggaagtcctagccagagcaattacgtaaaagaaagaaagagcatctaaattggaaaggaagaagtcgaattagccttgtttacagatgacatgatgttttacttagaaaaatccaccaaaaaactattagaactgataaacaaatttagtaaagatgcaagatacaaaattaacatacaaaaatcagtagcatgtatatatgccaaaagcaaacaattgaaaaataaatcaagaatgaaattttatttataatagctccaaagaatataaaacacctagcaattaatttaaccaaagatgtgaaagatccacacaaggaagactataaaacactgatgaaagaaattgaagaggacacacaaaaaatggaaagatattccatgttcatggattgaaaaattaatattgtgagcatgacactaaccttggctattgacagattcagtgcaatccctttcaaaatactaatgacatttttcacagaaattttaaaaaattctaaaatatatatgaaaccacgaaagaccctaaatagccaaagcaatcctgagcaaaaagaccgcagctggagatatcacactacctgacttcaaaatttactataaaggcatagtaatcaacacagcatggtactggcttaaaaaacagacacagaggccaatggaacagaataaagaatgcagatataaacccatgcatttacagccagttcatctttgacaaaggcaccaagaacatacaatggggaaaggacagtctcttcaataaatgatgccagaaaattggatatccatatgttgaagaatgaaactagacctctatctctcacaatacacaaaaatcaaatataaatggattaaagacttaaacctaaaacctgaaactatgaaactactagaagaaaacattggagaaaccctccaggacattgtctgggcaaggattttttgtgtaagaccttaaaagcacaagcaatgaaagcaaaaataaataggattatatcaagctaaaaagctctgcacaggaaaagaaacaatcaacaaagtgaagagacaacacacagaatgggaaaaaatatttgtgatctacctatctgacaagggattaataacgagaacatataaggagctcaaacaatagcaaacacacatacacacacacaaataacctgattaaaatatgggcaaaagatctgaatagacatttctcaaaagaagacatgcaaatggccaacaggtatatgaaaaaatgctcaacatcactactcattagagaaatgcaaatcaaaactacaatatccctccccagttaaaatgacttttatctaaaaggcaataatagatgctggcaaggatgaggcaaaagggaaactcttgtacactgttgatggggatgcaaattagtacagccattgtggagaatagtatagaggtttccaaaaaacctaaaaatagtactaccatataatccagcagtttcactactgggtgtatatccaaaagaaaggaaatcaatatattggaaaaacaatacacttatgtatattgtagcactattcacaatggtcaaaatatgaaatcaacctaaatgcccatcagtggatgaatggataaagaaaatgtgctatatttacacgatggaacattattcaactattacaaaagaatgaaatcctgtcttttgcagcaacatggatggaactagaagtcattatgttacgtgaaataagccaagcacagaaagacaaataacacatgttttcactcatgtgggacataaaaaagtgaatctcatgaaaatagagagtaggctggtggtcatcagagaccgggaagggtagggtggaagaggggtttgaaaagaagttgattgatgggtacaaatatatggtttgatagaagaactgagaactaatgttatattagtatggtgactatagtttacagtaatgtgttgtatatctcaaaatagctagaagagaattcaaatggttttagcataaagcaaagacaaatatttaaggtgatgaatatcccaagtacactgatttgatctttacaaattatatgaatgtattatatgatcatatctacttctaaacactatgaacatctatcacacattagtaaaaaaggggaaaaacccctgctgacatcctgattttagcacagtgagacctgtgtcagatttttgacctccagaattgtaagataataaatttattgtgttttaagcctttgaatttgtggtaatttgtcacagcagcaatagaaatctaacacagtgaccaaatgggaatctctgtagaattttggtggtgaatggtacactgcagtgaatttaagatttgactttctccttgaagaatctctaatgagaaaaagaggaaagacaggattgttaattgcagatctaaattcttatctaaagtatttttgagaattatattccaattatctaactattgaactccaacagggtatttaagtattctgttccatctttgctatgccagaggcaggcattttagaccccagcttgaacagtaagtctaggaatagggttgtctttccttcctttttgtgctgtgattttttaaaattattgtaatcaattgcaagtacctcccagctaaagtcctctaatcaggcagtattcatcagtgattgggaaataagttataagatgattttgtacatagttatttgattcaattcagctttatagatgagagaactgaagttcagaggaaataagtgattatcgtttgtcacattgctattatccatctgctattgccagagctggcctggagcccagaaatcttttcaccacccaatgctatctttcttcctcattattacatttcccagtctggctttgggatcggattgcttctggccttagataaccttatccatcctctaaagcagtatcacacataagaaggaggtagcagtggactgatagtagcctctctaccctccctttttaaaaagtctctgacaaatagtctcattgttactagagcaacgcaaaatggaaaatgctaatagcaaacatatagtccttattatgcgtcagatactgttgtaactgtctctgtagtaattcatttaatcctcatcacaattttctgatgtagatatactgttacagatgagaccttgaggcacaaaggggttaccttacttgccaaggttatacttacttgggatgggtgccatccttttgtataaactatgatactttttcttctttttattttgaaaaatttctaagatacagagaatttgaaagaatagtacaagagacacccacaaacatattcttcatgaatccaacaattatacactttgccacactttatatccatttgtgtgtgtgtatgtgtgtgtgtatgtgtgatcatttcgaagtagtaggcatcacaacacttcagcatcctttattttttaaaaaatcagatcattgctatttaggactttggaatcttttagtttaattcagatattcattcactaatgcaggacttcacattggagagaagccaacagagaaagggacaggacagtagaaattgtgtgggagagtaaaattagttcaaatatctaatagctagctatactgtactttagctatattaggtccctcagttttcaagacaacagtatgatgtgggtgatcttatccccatttttccagataacctccagatgtagagataactttcccagggccacccaatcaatacacagcaaagccccatacaaatctgggctgtttggttctagactttgagctctttttctactttttgcctagataaacactttgaggggaaaaaaaatccagatttaagaatttttgctaaccttcctacgggcaagtcaccttcaagtcacctgggtacttaggtatccaactcaaaactacttttagttttgtttcgttttgccttttttttttctttaaccgataacccaattctagacggaacataaggtgcaagagaaatccggggaggtggaggcagagaaagggaagggcaggaggtggtcgcaggatgttgcctgcggctggcggcccagtggattctgggaattgtagtcccagccatccagggcattgccgttcagggccacgggaaaacctgactgcgctcccagaagcctccggtgtacctcgctgggaacgcacttcctgggacgctgagagggagacgctccaagaggctcctcagtgtgggcgagtaaaatgccctgcgtgtgagaagcaggtaggtgtggtcaagatgttccgatttctgggtcttttgcataagtaactgaggattttatgtaaaatggctaaatccaggagaatcaggagcgttggaaaacgctgaccacatctgtggatgtgaaaattgagtaggtatttggtaaggctttaaaaaattattttgtacacaggagtatggaaatgtcgaggtgtgttgccggagccgccaaggactgggagctttgctggcgcgggtttgtgggggagcccaagctgctatttttgaataaccagctgatgctggttgcgtaatgatgacctgcttgcggttcaaacccactcagtgttgcagggatgggctagctctgagagcgttaacagtcactgttgcggtctctctccattggctctaactagtagggcgttttcttccttctgccaggtctgggtctaccacacacagggctcttcgaaaagagggaggaggagaggaggcggaggggggaggaggggggcggagggggatgcggattgctctggaagcttggtttgctttcctgtaagttctgtgcacccggccttgtaaggggcccatagccacgttagggaaaggtcagacttggtgacctcacttaaaatgattgctcaaggattctattgtgcgttattaattgtaaaacgatttcctctgactttggagtgtgcaattatgattgataccaacccaagaaacacatttggggcgggggaggggttgggggggacttgactgaaatctccgagcagccagttgcagagagcattctacataatgatcgtaatagggctagtgatgaacgcctcaatccaggaaactctcaggcgcacataataatgagtttccattctcatcctacctgtttgagataaatggtatttgaagaggaagtggctaatgtttaaagtagatatatagaagcatctttaagtatcaggttgagccattg

SEQ ID NO: 11503 - DNA, 6000 bp, Homo sapiens
agtagttatgtttttggggagtcagaagttatatatgaatttttaactggcatccctaacccttgcattctttaagggtcagctgtatgtgcatttttttccctttttacacagaattttgcctactttgtcagatgtttttctatcaactaagatgctggcttttgtgttgcagaattcattgatttctatttttttattattattattattttggagacagagtctggctctgtcgcccaggatggagggcagtggcgcgctcttggctcactgcaacctccgcctcccaggttcaagcgattctcctgcctcagcctccccagtagctgggactacaggtgcccgccaccacacccggctaattttttgtatttttagtaaagacggggtttcactgtgttagccaggatggtctagaactcctgacatcatgatccacccacctcggcctcccaaagtgctgggattacaggcgtgagccaccacacccggctattattattattttaaaatcaggaatgggtgttgaatttgtcaaatgtttttcagcttatgaacaatggtcatttttttcctccttatatcttatagtatatcattaatactttaaattataaaatataacattttatctggactttcgattgattttctgttctcagtaatcaacaattataaacatttaaaaacattccttatggtttgctttttctctccagatacaaacacattaagtttctctttgatttttttttttttttttgagacggtatctcgctctgtcacccaagctggagtgcagtggcgcaatctcggctcactgcaagttccacctccctgtttcatgccattctcctgcctcagcctcccgtctctggtattttttatgtaacatgtttcagaaattcagaaaaatgctaaagactattatgctttctaaactgactttcagagaatggactttccatgaatgtatttgcttttctaattccttgaacagtatgtttaagcttgaaattttggttttaagactatctgctatcttaccattgcatttcaataattagacataccagataccatttaaaaacgttaaagaattcttttctttttatagttttaatcgtcacacaatgatgtacctaactttgagactccaaggtaaggtgggaaatgaaagacaatttctggtgttgttttgggggaccatgggtagtcgcaatggccagatcaggtttgtacatctctctaggcctctaagcatgtgagagctgtttgggttgaagatgtatcttgtcccagacttttcattgttctcagtaatttagaacttgaaatttgagtaactataatttgaaaactgagccacttgtgcaactgaattcaagactgtaaaaaccttgttttcttatctaatgatgtaaagcagcttccaaatcttttgtcatcagttctccccctccccactcctttctcacttccgtttgagagaaaaatgctttagcattatttgcaagcaagtcttattttcaacattttagtaaagactagagtataatacaaagtgaaaattcagtacactccatacaggtatttcttctcctttaatttatttttcctcatttaccaattctctccatctcttttgacctcaaaattctctatctgcttgccaaaaattgtccctagctgcctccttccatttctagctgtgtgtgaggtagtccacagaagcaatacactgaatagtgcagttgctgtgttgatcatccctatggctataggtggttattatattttgtgtgccctgaaaggcttaggtgatgtgttccatatacaattttaaggcatttaccccacgtttttctaaacaaaaaatttttaaagcaattatttaagagtggatatatgttctctttcactttacaaaaaattttggagggaatctgagagaagtcatggttagagattagtaaagttggaaagtactgcaaattacctaacccagctcatttacaagtgagaaaatctgggcacagagcggttaaatcacttgcagagtaacatataagaaaaagaaacacatgaaggaaggataaaggaaaggtctgcatgaagtgtagtgatctagattggtggccagaaatataagtgtgattttattttcagttcatggctatttttaccacaagaggaacactgatcagcctaaattggtcagggaaacagagaaaagttttgtcctcaaaacatagctcactgtccagcttgttgtaaaaaaaataaaataaaggttaactgtcattattctcactgttattgctttattccacttctcaaggcctaaccacaccactatgtcttggcttctctttcacccatcgtctgccattttgagcattgattctccaatgctttgtggaccctttctactctctttaggctcaattaattcctttattttttaattaattcattggcagaatgttttctcacatttttataagagtgttggctcttgaaagaggtatttattacacatgttctttaactccaaaggaaaccagaaaaaaacaaacggggacaagaaatcaattttcaattttacagggatattaacagatgaagtatggttagaaaaaaatttcctgaagcaaaataaccacgctgccattcaatccttgccattaatgcagtttgtcataataccaaattaaatccatttttaaaaagttctgtgttttttaaaacacatattttccctaaatttaagcaaaaggagaagctctattcaaagcaataaattctacttactatttgtatggcactgtggtgggccctgaaaaggatactaaaatgagtaagtacctgccttcagtagctgagtgtgtcttgtttttctttcagaaagtttttgcacagaaagaagtctggggtctgtgagacaatcacacaaatttcaacatttctgcctcttcttcaccagcaggaatatgaggcatctgacaccgttagtgagtttcacacattaattcaacagatatttattgagtgcttactacagacctagtgcaggtcactaacaaatcacaaaatccctgcccctatagaatttgtactctagttgggggataataaatggagaataagcacatgagtaaattatgtaagtaatatagagagaaacaaagcagaggaggagcataagaaattcttggtttggtgaggttgcaacttcaagcagggtttcaaatagggttgccagggagggtctcattagaaggggacctgaagtatgcgctgagtgaaataaaagtgttagccaggaagatacatttggcaaagcactccaagtagacgggacagcaagtgccaaggcctcagttgggagtgtacctggctttttaaaatatgaactaagagctaggaggccagtgtggctgcaactggctaactagggagaaagcaataggagaaaatttaaacctttaagggctagagactgggctttactctgatgaaaatccctggaggcttttgttgagcagaggagtgaaatgatccgatttacagtttagattgttaaaagaaaaactttaaacaagttaaatctaataaagtttatttgcacgagcgcacgtgcacacacacacacgatttatgaggcattcatcaggcagcagcacttaacagggagaggttcagagagctctacccagcactgtgggcaggcagtatttatagacagaaaaaggaagtgccccacagaaacagcttgattgcttacagttgggctagtcttatttgggcaggacattatgacgtatttgccttatatgcacatagtctgatcagttggcagcctgtgattggctgaagctcagctacttgtcacaagaatatactctcagttgcagttaatttacatactaagttaggttgcagttccctacatagcaactcagagtagggaggaaattttaggccaaatttaatttaaattatgttggagcatgaccaaagttggtcatgaccagaagctgaacacagatatggaagctaacacaatatccagtggagagagattgtggtagagtacatggggcgaaatggttgatttctgcatttttgttggtgacgccatcaggatttgctgaagaaccaaacgtgtgacaggaaaggacaacacaaggagctgccagctttggaaaccagttctactctcagtattaccttcgcaaaagatagagctttgtaaatttctagattcctcgttcttattatcctagactatttaaccagaatctccagggtcgtggtcctggaaacaatacgtttaaaactcttcccaaggatccttcagcagccaacttgactttggctaaggagtccgccagctctgggctcacttgggttgtttgcaaggaagagcccatgcccagagtataaattgggagaacagcgctgtgcaaagagcgtgggttggtgagctagtggatggcgagattaatctcactctgatccctaaagcagggtgcagtaatactctaaatgcctcaaatgggttgggaaccatggaaggaatcccggaggagcccgatcttaacgaagcttttctcaggcctttggtaggaggacagaaacgaagttgaatgaaaaagacagtggagtgggactgagaaatgacaacggcccaccacagacctctctctttcaaggcctgtgtcgtcaggacgcaggccagaagaagccacgacgaggcgcaggcgcgactccacgagggccacgcccctcctagagaaggaccgacccgttttccgcccgcagcggagcttgggtttccgggaggacctgattgtgcaagggaccaaaccggatagaggtcgcgcgccctctttcgtctgccttccggttcactaatacgcaagttcgcagaagtgcgggaacgcgccgtccctctgcgcaggcgcagtcggcggtcggcgtggggcgctatgccggggcggcacgtttctcgagtccgggcattgtacaagcgcgtcttgcagctgcaccgtgttctgcccccggacctcaaatccctgggcgaccagtacgtgaaagacgaatttaggagacataagaccgttggttctgacgaggcacagcgtttcttgcaagaatgggaggcaagtgacgctcccttctctttgcccaagacctttggggttcctcggtgtccaggtttctagttccagtcccccatgcggggttaaacagagcagcaacctgttctgtttgaaatagcgtaatgctgttcaggtaacactttccaaagtttctcccacgggtttctcactagagcagatcctgttacttcagcgtccccaattcagttcaacttttgagctcctgcagatgccaggtgctcaaagggtgagggtaggaggtcacaaaaatgagcaagtcgtcgttaagtgctcaaaaacctcaggagctttttgtccttttaagtgcctttgcacctagtaagcgcccattaataaattaatggttctcttattagttttcaaatttaaaggcttatttccgtaatttattatttaatctcagcgcttttggttgggtttaaataattttctcacttggctgatacagaaatcaggtaacatgaaaaagattacaaaaggttggagattacaaactgtgaaggagaaaaatgctggtggcagttaagtcaggcgaaagttgtttcctccggtctcaagtcattgttacttcgccctgcaccattgcgctaaatattaaacagacacatgcattagcaataagtcgtttgactttttttttttttttttgagtaaaggaaaaaagatattcagagtatttcgtggggctcggggccctgcaggattgcccctagttttcatttgcaaatataaataaatgaatggaattagagattggaatgacagctcagatatttgaaagcatgagttggagctgatatgaaaatag

SEQ ID NO: 11504 - DNA, 6000 bp, Homo sapiens
cacagagcaacaaaaatcacatatattcatttgtatgggaatggcagtactaaaaataattttttaaatgtctgcatgaggcctggtgcggtgggtcacacctgtaatcccggcactttgggaaggccgaggtcaagagttcgagaccagcctggccaacatggtgaaaccccatctctacgaaaaatacaaaaattagctgggtgtggtggcgcacgcctgtaatcccagctactggggaggctgaggcagcaggagaatcacttgaacctgggaggtggagattgcagtgagcgaagatcatgctgctgcattccagcctgggtgacagagtaagactctgtctcaaaaaaataaaaataaaaataaatgtctgcataatacaaaagtggataaaaggccgggcgcaatggctcactccagtaatcccagcactctgggaggccaaggtaggaggatcgcttgaggctaggaattcaagaccagcctgggcaacagagggagaccccatctcaaaaaaaattaaaaaaattagccaggtgtggtgatggcacacctgtagccccagctacttggggaggctgaggtgggaggtcactgagcccgggaggttgaggctgcagtgagctatgaatgcaccactgcactccagccaggcaagcagagcaagaccctgtctctaaaaaaaaacaagaaagaaatccaaaagtggactgtatccacttttgtatttgtattctgtattctgtattttgtattttgtattctgctctgtagcagaatttcggaaatccgaaacatatgcatatttatgtattccaagtcttcttcaataggaatgcatttctcttaaaaccaacaagaggccgggcatggtggctcacacctataatcccagcactttgggaggccgaggcaggcggatcacctgtggttgggggctcgagaccagcttaaccaacatggagaaaccccatctctactaaagatatgaaaaaattagctgggtgtggtggcacatgcctgtaatcccagctactcgggaggctgaggcaggagaatcgcttgaacccaggaggtgagcctggtgagccgagatcgtgcaactgcactccagccggggcaatgacagcaaaactccatctcaaaaaacaaacaaacaaaaaaacaaaccaaaaccaaaccaaacaaaaaatccagcaagaggcggcatacttctcttgtatacttggcatggaggcagtgtggggtgatcctaggattaagtgtggtacatctgttgtttgaagacccacctctactggttgggaggctttggaaacgtatggaggccctctgtgcttcagtttcctttttttttttttgaggcagggtctcgctctgtcgccaggctggagtgcaatggcacaatcttggctcactgcaacctgtctcctgggtttaagtgattctcgtgcctcagcctcccgagtagctgggactacaggcacgtgccaccacattcggttaatttttaaattttctgtagagatgggcggggggctggggggggtctcgctatgatgctcatgctggtctcgaactcctggcctgtagtgatcctcccaccttggcctccaaaagtgctgggatgacaggtgtgagctactgtgcccctcccttcaaagacatttttctaatactgaaatccgatgctcacactcccctgttcaaactctacgcagttccccaataggctcttacaggatgctatcccaactccaatgcccggcaccgcctcccctggccagccccacctctgccttctagagactcttccagggctctggccacaccaagtgacaagtcctggcatataatgggccactgtatactctttgggattgcagttcactctgcctggaatgctctgccactggtccctggggctgactcgccactggccttccaagccaggctgtggccctggaactctccaggcacccaggctcatcaccaccctgtgtgtggcaactccaaccctcttgccatacaaagctccctccaccacagttactatctggctccctgtctgctacttgtgtccctgtcatcgtcctctttggccccccagggcttgcacacagagcccgggatagcagttccatcttccgcacactgcacgtttggaggggcaggaactgctttgtgtctgagggcagcactggtcaaagccatgccgggacatcccaaagtcacaccccagcattcacagacttggagttccaaacccaggggcattgctggggcaaaaacaattgttggaagagaaggggaccaggagctgtggattttgtagggtttatcaggaaatgcaggcaagcagtgaagggacaattagccatgaaatggaagggaaatgtgccagcttttgttgatctgataggaaaggagatcaccgggcctgcagctgctactcctcagcagtttgcaaggctgggaggagaatccaggtggcccctgttgaccaagtgttaggagggttgacgtgagccacatctcttcatggttgatgaggcacgaggctgcaccccagtattctctggccaggggctgtcaccctgtggtgcccggacagctgcccccaggaacaatggcctcctcactgcctaccagagcctctactggctccaaagcccttggccactcctggccagtctccactcttttttttttttttttttttgagatggaatctcactctgtcatccaggctggagtgcaatggcacgatcttggctcactgtaacctccgcctcccaggttcatgtgatcctcgtgcctcagcctccagagtagctgggattacaggtaccccccaccatggccagccaatttttgtatttttagtagagacggggtttcaccatgttggccagctggtctcgaactcctgacctcaagtgatccacccacctcaccctcccaaagtgctgggattacaggcatgagccaccacgcccggcccagtcttcactcttgatctggctgttcatcagtgccaggggccacccctcagttccctagtgtacctggaccacccctcagttcctttttcgaggactgtgggtacgatgactaggacagcaggtacaagatcgatgggaatgggcttcgaagagctggtcttgtgataaagaaatatgatggtcaggtgggcttggtggctcatgcctataatcccagcaccttgtgaggctgagtgaggaggatcacttgagcccaggagtttgagaccagcctgggaaacatagcaacaccccatctctacaaaatataaaaaaaaattagctgggcactgtggcgtgcacctgtagtccccagctacttaggaagctgagatgggaggatcacttgagccccggaggtcgacgttgcagtgagccagggttgcatcactgcactccagcctgggccacagagtgagactctgttaaaaaaaaaaaaaaaaaagatatatatatatatatatatatatatatgtatgtgtgtgtatatatacatgtgaatgatgatcccttattaaaaaataaaaataaggccgggtgcaggggctgacatctgtaattccagcactttgggaggctgatgcaaaaggattggttgaggccagcagtttgagactggcctgggcacatagcaagatcccatacaaaaatttttaaaaattagctgggcatggtggcgtgtgcctgtggtccccagctactgaggaggctgaggtgggaggatggcttgggcccaggaggtcgagactgcattgagcaatgactgtgtcactctactgcagcctgggtgacagagcaagagagcccccccagcaccccctacaaattttttttttaaaaattaaaaaggcgcggttcgagaagagctgtagtcgtcccagagctacagtgcaggtgatatcaaaatgcaggtgagaaaactggagacagaatacagtaacggatacaggtgcccctgaaaaggtgcagaggcgctaaggacgcaagcaatcctgaacgttccaatcgttcgttttaaagttgtcctggccaacccgtgaagccttgtatgaggaaatgtttcaacgagggcgcctgacgcagtccccgaggccagaaaacacccaggtttagatacgggctctgacccgcacctgccacagccaaatccctcccccttctgagcccgatcccgtgttgtcctccaggggtaagcaaaacacctggcagggctgcctgaagattagggaaactgaggagacgcggcaggtgcccagtatttatagttttgtccccaaacgggggagttatttgtaagcactggctactacccccgtcaatcacctaattgtccaaaaaaaggcaaacggagggaatgcgccgcagctgagcaccgcgcaggccgcagctgaggtgcacacccgggtgtgccctttgtattgctggaagcgctggcgatcataggggcagagggctggcgttggggcggcctgggacccacccggccccgccccctctcaggccccgccctccccctcctccaccggtagggggacctcggccggcctgggagatcggggcgtagggggaggtgggggtgcatccgcgagccctaaaggtcatgaccctatggggcgtctctgggtcgtcgtgggggatgggcgggggggggggtctccccgccacgggaggtctagagagcagcggcggcggggcggggcggagtgcagaggcgccgccggcggggcggcttcgggagggcgcggcccctttaagacgccccgccggccccgcccccgagccccgcctcccgccgcccacgtgaccccggtcttgtgactgggcccgggagggcgggggaagcccgcggctcgcgcccgccccgccccgccccgcgtctgcctcagaggggcccgagccacccggtccgccgcgtccccgccgccgccgccgcgtcccccgccggggccgaccgagccgagccgggccggagcggcgggcgcggccgggccgccatggaccacaagccgctgctgcaggagcggccgcccgcctacaacctggaggccggccagggcgactacgcgtgcggcccgcacggctacggcgccatccccgccgcgcccccgccgccgccctacccctacctcgtcacaggtgggcccgtaaccaactttccccgccggcggcttccgaggtggcaagcccggtcgggggacgtgggtccggaggcgggtggggcccgcccgggggtccttcctggagctggaggtccccgggctggcttcgggacccggcgccgccgagggccagcctcccccccggggctctagtcctcgggcccgtcgtaacccggcggggccggatccctgccccagatgaactttgtgtcacgaggcgctcgctgttggcagattagcgccgaatcaggcccgcggtggccgtcccgagggtggaaaagaccgggggcttttttagcggggtggaggttgaggggacaggatgagtagtccccgtggcggtccgatttctcctccctgcaccctaatgacctgctttcccgcccacagggatacccacccaccatcccagggtctacaacatccacagccggaccgtcacccgctatcctgccaactctatcgtggtcgtaggaggctgtcctgtctgcaggtgagtgggtctgcagcctggggactggccctggaagctctgaggacccccgccctaacccccaggacctcacagctctgcttgtgggagtgggtccggcttgacttggatcttgaccagagccctttatgggagggacagacaggctgcccgaatgcggtgtgggagagtgcgggtccgctcacccttggctctgaacacattttgtgggggcaaaagggtggattccttttcctagatcttggggcattgcaccccaagtgattgggatgtagaaatggtaacaacgggactcgtggtc

SEQ ID NO: 11505 - DNA, 6000 bp, Homo sapiens
acagctgcagccacccaccagctgcagactcaggcatccctgcactcttgggggcccaggaaggcccccctaccctcacaggctccaaagtgcctgctcctgctccctggcttctccctgctgtcagcaccctctccaatctcatagcaaagtgaggctgagccctggtgccaagaatggaagcaggaggcagacagattcccaggtagaagtaggtgggtccccagtgaggccccaccttcaggtcagggagggcctgaaggctggtggctgggctgccaatcccattgaccagactgggaagttgtgattctttttccagcccttccatggctgcccaaggaccgatcagtgcacacttcctcccctctagggcccataaaagccccaggctctgctagagctgagcagacatcaggtggaccagctgcagaaatgagctaccctctctgctgatagcaagagacatttagacaaccagcagcagagaggggctacccactctagggcctcctctctgctgagagcctcagagacccgcagagacatgcagactaccagctgcagagaggagcaacccactccaaaaccccctctctgctgagagctgcagagatgacaggatgacctacctgaagagaggagcctcccaacccagggtgtcttctctgccaggagctgaacactgatcgggacaccctgactgtggaaagtagctaccctttgtgggtctcctgtgagctgttctattgctcaataatgctcctcttcatcttgctttccctccacctgtctgcatacctcattcttcctggtcgaaggacaagaactcaggacccactgaatggcagaggtaaaacagctataacataaacagggctgaaacatgccccttgctcaccacgttgcaggcaaagagaaggagagaagagccacagtccttcagggagcccagacctggaagctccccaaaacagggttgtgactctttggtatcctgcagtgcctggtgtctccaagtttgcagtaaccactgcattccccagtgctggctggggaaactgcttgcagtgcacctggtccagccacagcctcacagagagccagtgcctgtgccggcacctggagctgcctgtcactgcagcggctgtagtgtctgactgtgcagtggcctgaccccacattcattcacacacccctcatggctccattcctaactcacccttggcaggcatgggatccaggctggtagtgtggactgtgtgcagcttgccaacccaagtgggtggaagaagcccagcaagtccgagcaaaacttgggcaaaggtgccactggccagaggttttaggccataaaagcaacacctcaaggatcctataacattattgtgatgtcttctccataattttcttatctttttatggaaatttcttgattagattactgaattcaggatggagctcttaaatagagtgatgaaagctttttttccctcttttttgaaacagtctatctctgtctcccaggctggagtgcagtggtgtgatgtcagctcactgcaacctctgcctctcgggctcaggtgatcctctggatcacctcagccaccccagtagctggtattacaggcatgcgctaccatgcccagctaatgtttgtatttttaatagacatggggtttcatcatgttggccaggctgatattgaactcccggcctcaagtgagtcacctgcctcagcctcccaaagtgctgggattacaggcgtgagcctccttacctagccaaagaaagcattttaatgtttggctgtactatgaataattctgaaaaagaagtcagtctattttacctgaggatctatcctttataaacattttaggctttgattttttaaaactgaaggtacccttttgagtgacaccaaaaccagtaagttcaggcctgttgatatgtgacactgggtaggttctccggggattggactttcccaggactaaccaagtcacaagggttagggaagcaaaagacccatagggatggggcttcttaagagaaactcccccgagagctggacatgtgtagaacaacaggtgtgttcttcagaagcaccagctgctcagtccgcagagccagctccaacaagtgggcttataggggtttcaggcccatgttctacactcctgtagccccttttatgacagaacagcacagaaatacaggaacaaaggaaaagactatttctagaggaaaaggggatcaaacgatgtgagtattcataagagaaagtactagagagtaccctagagttgctgcacccagcactagtaacacaaatccttttctcctatttattaagattttgcagaggagacaaagagcaattcttaacatctgcccaagtggatctcccagaaagaaaggccaggagcttgtctggaaagaaattcttacttttctcagccagacatggaggcatgtgcctgtagtcccagctacttgggagactgagatagaaggatcacttgagcccaggaggcggagattgcagtgagccaagatcacaccactacattccagcctgggtaataaaatgagactctgtcaaaaaaagaaaaagaaaaaaaaagaaattcttacttttctgctgacttacaagtgcttgggctcccttcactgaggcttctgaaagaacagagtggctttggtatcctgctcatagggacagaactgctgaggccaagaaaaatgtttgtcctttctcctctgaaggtttgttaacaacaaaaaaaatcacccacaaaggagattaatgggagaaatagcatacatattcattcatatgtttatggaggagaaatacagagtgattcccccttcttgagaaacagtaagtctcaaagaaagagactttctttcacccccttttatccaggggtaagaacaactagctgaacaaaactgacagctgtcaatcaagtgggaagtccaaaactcatgagagacccacccagttttcaatcatcatgaaggagccaggggctcaatggcccctgctggtaccaagttgccaggtccctgcaatgttccagacaaagacagtgatggtaaaaagggaaaagtggaggtagaatgcaagtgcagcagcaggaagatatgggactctccattttagggtcttcaagtttttcagattttctgagacatgggttaactcttcaggttagtctcctagtaaaacacagccaaagtcccaattgtgtttgaaactttcaaaaatgcagattgaaagaaagcctcttactgtctttgagaagtccagactcctcttatcctcattgcatgcttcggagttcaatttaggtgtatctctcacatccatttctgtcgagcctttacctttaaattttaaacttgaaaaactgccagagtacctgatagtgattgatcagagacagagccaccgaattacccgatggcaggccttagagaccatggccttaggacctaggttatgcatagccctcaccttaggaaggggtcccttcaagggcaaataaaatgcgatagtccttgcaacactgaagcatggagtatcctgtgaggcatgaacttgcttgatgcagcatgaatgcaccccaagaaacatgggcatgcccctccaagtgcaagcataccccacaagtgggtagccatagagccagaagggcaggttccctgaaaaaaataaagacctcaagacctcatcctaaatgtgagatcttggatgtaagaggatttactgatttttccacaaaacagccaggccaggaagataactgagcttagaggactcttgctggtgccaatgcattgattagtccagatgacaagggagaggatcttgagagccaattttgatcccttcctcatcaccaggaaatatgagtaaagattgtgggatctgtggaggacagagggagagcttcattttctataaaacacagtctgcagattgaggagatgcagcctcggaggtggagagctataaagtcaaaaaccacagagcaggatagaggagtcagaggagtgaagaaaagagtcttgattagacagcctttaagccccaagtcacatgtctcttaattggctgttcctaggtggtcagttagttcttaccacatgatctgttggtgagcagttggaaaattcccaggtacagattttttcagaaaatgttatttgacttggctacagaaaaataggttttgcaacacttactaagaacacagagaacatgaccatcacctaaacctgccatggcctcttgggtttgtttttgcttttgaggcacagggagtccttcttgtctgtttacctggaggcatgatttggcaacctagataacaaacagagataggctttctaaaaagaattatttttatttgggaataaagcattgcaatgggaatatgcgtgccaaggtaaactatgtgcttattcaggtaggtaaagtaagacaaagtttaaaaaaataatgagaaggattacatatttgttttggaatgattatccttggctataaagatcaataacaagactgacatcagtttgaggttggacaggcagttgctgggcagatgttcttgcagaagtatttttctttaggttcctgagaatctataacctttgggcttaccaatagcagtgactgatttgtttactgattgttcacagaataggaaatcaaaggaggccaaaataaggacagccataattatttgccaattgtcaatttgaaaagggtacccaaatccctccatatgaggagtagcataagtggcttttctactggctgccgctgtagacccacctccttctccagcacataaatatcgctgttaacattaactaaatcacctctgggcagagaaacaaagctctatatgcacagcccagcaaagagcagcacacagctgaaagaaaaactcagaagacagagctgaaaaagaaaactggtgatggatctcattccaaactttgccatggaaacatgggttcttgtggctaccagcctggtactcctctatatgtgagtaactatgcaggcatgtttgctcttaactctaagacctgaagtgctaattgggcccatctttttcttatttgttttgaagataaaagagataacggaggggaagttacctaagtgccaaatactgtgaacacataaaatattattaatatgttaggactcctaatacaacatttgaaaatgtaaaatttagtctgggtgcggtggctcacacctgtaatctcagcacttgggaggtggaggcaggccaatcacaaggtcaggagttcaagaccagccagaccaacatggtgaaaccccttctctactaaaaatacaaaaattagtcaggcatggtggcacacacctgtaatcccagctacttgggaggctgaggcaggagaatcgcttgaacccaggaggcagaggtttcagtgagcggagattgcaccactgcattccagcctgggtgacagagcaagactccgtctcaaaaaaaaaaataaaactttgtcatactgagtagtttgaactaaagaagactgaaagacttcacaaatgtcttcagaatctctgaccctcttctgtctacccatcccccattctttccctcctgaagtgcagggttgctctgaagttctcttatctgactaagggaagatcttccaaaaagaatgcaattgtcttgagcctctccaaataatctcatcaatcagaaaactaattcacaggaaaagagaaaaagtttgataatacttattctttggagcactgctacctgagagactttatctccacaataaaataacctttgttcatcatgtgttttctcccttcaccttcccataacttgtgtcagaaactccctatcagaagccactccctactttttagcttacaatgctatttaagctttactcattcagtccttattttagtctcatata

SEQ ID NO: 11506 - DNA, 6000 bp, Homo sapiens; identical to SEQ ID NO: 2498

SEQ ID NO: 11507 - DNA, 6000 bp, Homo sapiens
aaaaaaaacagaactggttctggaatcagacttcctagattctattttattagctttataatctccaaaaaaggtaatttactgtcccttaatttcctcaactgtaaaatggaggtaataagttctatctcataaagttatttggcagattaataattttttgtctttttattttgtcattttcttttttttctttcctttttttttttttttaattttttgagattgacttttgctcttgtcacccaggctggaatgcagtggcacaatcgatcttggctcactgcaacctccacctcccaggtttaagcaattctcctccctcagccttctgaggagctgagattacagccatgcaccatcacatctggctaatttttctatttttagtagagacagggttttaccacgttggttaggctggtcttgaactcctgacctcaaagcatcagcccccctcagcctcccaaagtgctgggattacagatgtgagccactactccaggatttattttattttattttattttattttattgttttgagacggagtcttgctctgtccccaggctgccgtgcagtggcacaatctcggttcactgcaacctccacctcccaggtttaaacaattctcattcctgagcctccccagtagctgggattacaggcttctgccaccaggtctggctaatttttgtatttttagtagagacagagtttcaccattttggacaggctggtctcgaattcctgacctcaggtatccacccgccttggcctcccaaagtgctgggattacaggcatgagccaccacacccggcctactttattttttaatagagacgaggtctcaccatgttggccaggttggtcttgaactcttggcttcaagcaatccccccacctcagcctctcaaagggctaggattacaggcgtgaaacaccacgcccagctattctgcaaattaaatgagatatttctgtgcaactcttagcataacacctgcctggcgcaccataagaacacaataaaagctgttgttattattattactacctagctaagtactaggcacataataggtgctaactttaacttaaaaataataatttattactacatcaacacttgatagtcttatttcaataacaaatgtttcttgactacaacaacattcactgatcatttcttgtggcttaaaactctcccaaacttaccaatattagtggcaccagcatccagactgttttctactaactccttcaccgcagtgcttagactcggtaccaccggcccagagcaaatctgatggactgacttccgatcaataggtttgatggccttagcaggttctgtactaaagaaatcagttacaagaaacaaagcaagtattcagctatatattttcatcctgattttaactgtgggaaatgactcaacactgcaaatagtttacgggtctaatctattcatttattatattaacaaatacatttattatatccagaaatggaaacattgttttacaatccttaaacaagtacccaaaatacttctggatagacacttcaaattcaacagatccttactacctagtatccacatggagaaaacatacattgtatctctcaaattaccaaaatctttggcaataatggtgtcttctttcttgaaaactgaaagcatggccggtgcggtggctcatgcctgtaatcccagcaatttgggacacagaggcaggcggatcacttgagatcaggagtttgagaccagcctggccaacatcgtgaaaccctgtctctaccaaaaatataaaaaattagccaggcatggtggtgggcgcctgtaatgccagctacttgggaggctggggcaggagaatcgcttaaacctgggaggcggaggttgcagtgagctgagattgcagcattgcaccccaggctgggcaatgagcaaaaaaaaaagtaaaagcaacataatttcccacataattagaaaaaccaacagtatgctgggaaatacacaatgttttcagtcaaaatcatctcagaaattggataccagttatataactattccttatacacagttgcctttgataccctactccagattgaagctgccagctgctgtcttagcaaagaccctcaaagttcttgctgtacttgctttaagagtttttttttgttgttttttgtttttttttttttgagacggagtcttgctctgtcgccctgtcgcccaggctggagtgtagtggcacgatcttggctcactgcaagctctgcctcccgggttcacgccattctcctgcctcagcctcctgagtggctgggactacaggcgcccaccaccatgcccagctaattttttgtatttttagtagagacagggtttcaccgttttagccaggatggtctcgatctcctgacttcgtgatccgcctgcctcagcctcccaaagtgctgggattacaggcgttagccaccacgcccggcccgctttaagagttttataacggtttcatttccccttattccctgctccaacccatcctccactctatcaccagagctatttttgaaatcacgaatctggtcaaataatttttctgcttgaaaaattactagtgccccacttcctactatatgaaacttaaaatctagtcatcactgggccccaaactaccttcttttcagaatctctctaatcctttcccttcatcaagtcccctacattattattactattattattatttgagacagagtctcaccctctcacctgggctagagtgcaatggcatgatctcggctcactgcaacctccacctcccaagttcaagtgattctcctgtctcagcctcccaagttgctgggattataggcacccaccattacactcagctaatttttgtgtttttaatagagatggggtttcaccatgttggccaggctggtttctaactcctgacctcaggtgatctgcccgccttggccttccaaagcactaggattacaggtgtgagccaccgcaactggccgtcccctatattgcagcacagtgaacaactgtttcctgaacatcacaagctcttttaaacactacagtgtataagcaggtctctgtctaaactgctctcctcttgctcctctgcccaaccaatgtctgctcatccaaagaatgtatcccgtgtgttcactaacttagcaagttccagtaaacagtttaattgatcactcgttaagagaaggcaggaaacctccatgaaaagagaaatcagtgggtatttcctacagcatttaacacattgtaggccttaaataaacccttgtgaaataaacaaacctctttactcttcattctatgttgctaagaatctcaccaaagtctgtctaccatgtgaaactgcagatgacctcacagaaaatggaaagaagtatctctaaaaataagtttatttggcaacacactacaggctacaggtccagttctgattttttttcttttttttttttgagatggagtcttgctgtgtcacccaggctagactgcagtggtgcaatctcagctcactgcaacctctgtctcctgggttccagcgattctcctgcctcagcctcccaagtagctaggattacaggcgcctgccaccacgcccagctaatttttgtatttttagtagaaatgggatttcaccatgttggccaggctggtcgtgaactcctgacctcatgatccacttgccttggcctcccaaagtgatgggattataggtgtgagccaccgcacctggtccacttcagatatttagatacagacggcaaatttatttaaatgtctcaatacatttaaatgtagttacctaaatatatctaatatatttaaatgcagagagcaaatttgcgtttacaaatctgacatggaattcaactgtgctagccaagattcggtgtagcttactagccagaaatcacataccctaacaggtaaaaatgcattgcattttttaaaactgcgcagctatgcaaattaggatgtgtctggacgctctactgtccccaaaataacctcaatttttttttaaaggccaggcacagtgcattacgcctgtaattccagcgctttggggggccaaggcgggcggactgcttgagctccggagttccagaccagcttgggcaacatagctaaatccccgtctctacaaaaaaataaagtaaaaattaaaaataaaataatataaaaataaaaataaaaggggagagagaacaggtaggaaggaaatgcattcagtctatagggatttcacgttccggcttcaagtccacggccctgtgatgggatgtgggcagggcctgagacaggccgaacccaactcttcacagggccgaattctttgcccgcagcccagcaccccgaaggagcttgcctcggcttcaaggcgcacctaatgggcaccggatcgctggggcgctgaggatgccgctccggggcctccacgaggcggcctcgccacgcgcctcggccatgttccccccatttccagggaggttggacgccgtggttcttaaagagggcgcgcgagaggggcgaccgcgagcccagctcacctcgagctctcagctcgctccaaggatgcaacaccggatccgcctcggggactgggaaagttccctccacggctcccacaggcgccccgcctcctgggctcccaacggctgctttcgacgttgtgctccaccctttccgggcggggcggaaaaaatacttcccgtctctccttttcgcctagtggctctgtcaaaggtcgagtccgtgacgtcaaagagcctggaccaatcagagcacaccggactgcgttttttccgaacgccagcagcagggtcagaagggaggtagtcgccctccgtcgtggcctggcgtggattccgagcgttggtgtctggcggtttccgaccgttggtgtctggcacgcgccaccccgatgtaccaggtaaagccctatcacggggtcggcgcccctctccgtgtggagcccacctgcatgtactggctccccaacatgcacggcaggagcggcggcccagcactcggcactggccacttgcaggtaggagcgcggggcccccccgcccactgcgcacgcgcggcggcccgttgctggcccaggtgcccctaggccggatagagtgcgtcccaaccgattcgcggccccaccccggcatctgtgccggccggccagggggtcacccagatttttatgttttaaaagatttattcaggccgggcgccgtggctcacgcctgtaatcccggcactttgggaggccgaggcgggcggatcacctgagatcaagagttcgagaccagtctggccaacatggtgaaacctcgtctctactaaaaatgcaaaaattagccgggcatgtgtcgggcgcctgtaatcccagctactcgggaggctgaggcaggagaatggtttgaaccctggaggcggagcttgcagtgagctgagatcgagccattgcactcgagcctgggcagcaagagtgaaactccgtctcaaaaaaaaaattattatatatatatatatttttatatatgttaaatatacctttattatgcgtattatacatattgtatattatgtgtaatatataacatgatatattataaaatatatattatatatatatatatctttcctggtcgagcgcggtggttcacgcctggaatctcagcgctttgggagaccgaagcgggaggattgcttgagcccggagagtttgagaccaccctgagcaacatagcaagacccttgtctctatgtttttttttttttttgagttggagtcttgctctgtcgcccaggctggaatgcagtggcctgatctcggctcactgcaagctccacctcccgggttcacgccattctcctgcctcagcctccccagtagatgggactacaggcgcccgccaccatgcctggctaactt

SEQ ID NO: 11508 - DNA, 6000 bp, Homo sapiens
ttctagaatggtacctagaactcagggaagccctttacttacatgtgtccccttataaaggatattatagggcctggcgccatggctcatgcctgtaatctctgtgcttcaggaggttgaggggggaggttcacttgagcacaggagtttgagaccaacctgggcaacatagcgagaccccgtctcaaaataaagatataggatattacaaaggatagttatgaacagccagatataagagatacacagagggaggcctgggggaaggggtgcaaagcttccgtgtcttctctaggcactgcaccctctaggaagctccatgagttcagttatccagaagccctctgcatcccttttgggtttttatgggcttcattataaaggcatgattgggccaggcacagtggctcatgactgtaatcccagcacattttgaggctgaggtgggagaatcaattgagccctcaggtggcaactgaggctgcagtgagttgtgattgcaccactgtactccagcctgggtgacagagagagagcctgtctcaaaaaaaaaagacaaaacaaaaaacctggccaatacggtgaaaccccatctctactgaaaatgatcgtcacctgatccccaccccttgaagatgcctccaccctctccatacgcatttggtcagcactaactgccctgggtgacaggcacactgcactgggtgacaaggacccaaagctacaccagccagtgccccagccctcaagcacctccctgtgcagaaggaagacaacacagaaaagggaagcatggttgtcacagaggcccagaggactgctggctgatgtcactgaatggggaagtggttggccgcacaggccccaagctcagacctgatgccacagtggacgttcctgggccatgtgacctcaggctaggctcagaaccaccctcagggcctccgtttctttctgtataaattgaggaccatacagagatgctgcctacctcctgggattgtccagagagttaaaagctcttttaaaatgcgcctgctgggccaggcacagtgtctcacacctgtaatcccagcactttgggaggctgaggcaggcagatcacaaggtcaggaggtcgagaccagcctgaacaacatagcaaagctccatctctactaaaaatacaaaaagtagccgggcgggcatggtggcacgtgcctgtaatcccagctactcaggaggctgaggcaggagaatcacttgaactcaggaagtggaagttgcagtgagccgagattgtaccattgcactccagcctgggtgacagagcgagactccgtctcaaaaaataaaaataaatcaaatgcacctgctggcagggcgcggtggttcatgcctgtaatctcagcaactttgggaggcctaggcaggtggatcacctgaggtaaggagttcaagaccagcctggccaacatggtgaaaccccatctctgctaaaactacaaaaattaggtgagcatagtggtgggcacctgtagtcccagttactcgggaggctgaggcaggagaatcgcttgaacctgggaggcagaggttgcagtgagccgagatggtgccactgcactgcagcctgggcgacagagtgagactccgtctcaaaataataataataataaaacaaaatgcacctgccatttctttccatcaggtatggccatggaaatgagggtcataagggaagcagtgtatcctcacagatccccagaaacgagagacacagccatgcagggccacttgggaaagcaccagggtccctcagggagtagaggaagccaagggaacacaggggtgagaccctttgttatgctttccctggaaaaggcaaggaagggtatgcaggtttaggattggctagttagaataacgttagcaggctctggggattagaggctgtcatttgttatttggtgtctggcccaggatgatgaaggcagagaaatactgccttctgaagggtgagaggcagctagaagagctggttcagtgttggggccctggattagctggtttgcatatgaaaggcacactcagccaggagccgtggctcaagcctgtaatcccagcactttgggaggccgaggtgggcagatcacaaggtcaggagatggagaccatcttggccaacgtggtgaaaccccgtctctattaaaaatacaaaaattagttgggcatggtggcacgcacttgtaatcccagcaacttgggaggctgaggcaggagaatcgcttgaacccaggggtggaggttgcagtgagccgagaccgtgccactgcactccagcctggcagcagagtgagactgtttcagaaaaaaaaagggacactctcagaggggtcatttgctagctctaacaactggctggctctggcaggggcagtccctctctctgctcttggaggtccaagatgccagaatatcagcaatccagtggggcttggtgaggtggctcacacctgtcatcccagcactgagggaggccgaggcaggaggattgcttaagcccaggaacttgagaccagcctagacaacatagtgagaccccatctctcaaaaaaaaaaaaaaattagccgtgtgtggtggtgtgtgcctgtggtcttcactacttgggaggctgaggtcagcaaattgcttcagcccaggagtgatggtgatcgcgtccctacactccagtctgtggacactctagtaccttgaggacagtacagcctgattacagaagctttacagcaagtcttgaagtcaggtattataaatcttccaccttcattcttcatttgtaaaggccttttggctattctaggtcctttgaattactgtgagaatattacagttggcttgtgaactccacaaagcctatgggatgtcgattgggatcagaggaaagcaggaacggtgggtgccaaggagaggtgaggggctgggggcagggacggatgtggccagtgaggacagtaggatacttgttgggggaatgtggggacatccaagcagtggttctcataatgcggtgcagggtacttaccccctccctgcccctgctccccacacacgacttcccacgcctctcccatgagcacctgcactaaggggctgcatttaggctctgcccacattggaatcatgccctcctccaggccctcctcctcctctcagaagccctgtctgtgagagagccacagccccaggctcagtcccaggttctgtcactgctgttgggggagggaggatgaacaaatccaggagacctcacaccatcccagagcagaaatcctgacacagaaggaatctcccatgggggttcagctggatccagggcctgaaagtgacataaacatgcatgttgcatctaaggagactgcacgtggcagcattgggcagcatgtgccctccagagctacccagaggctgttggctataagttctatgtggcccccacattggacagcctggtaagcaggtgacctttcagccaggtcctcaggtggggcgggccaccctctcgaggccctgcccagacagccagggggtcccttgtcctctctgcagcccatctttccagctgtgaccagttcagcccaaagcccccgtccctcagtttccctgtgggttgaatggagataatgtgtcacctcagaatgttgtgaagcagagaatgaggtgtttagggcctggctcagacggaggggtttcctgagcatggggaacctgtttcctcaggcctgtaaagggagggagggcgggccggcctggctggccctgggaagcacagaggagcctactaggaccagggaagagactaagagaagggaggcccgtccctgcctgcttctgtctcaagaaggctgatgtcacttcctctgatgaaatcctgtcttcccccacggcccctcaactgatgccacctcaccctggagagggtgggcagagcctcctacggagggagccctgtgcaccaccaaagctccctgctccagtgaccacccccgggcaaaggccggcagatccccgttagagatgggcccaggactgtgtgtggggtgggtgttgctctgagccttcactttcttctgtgtccaaggaagcttctggatcagccaagggctcaggtgtgtggagggaatgacctgaggggctgtatgaagggacagcctcctgtcctgcactcagaagttgaggcccagagattccacccttcagccaggcccagacatctgggttgagggggctccagtcctgtacccactactgcaagtcacgtggcctggggcagggcttctcagagccctgtcccctcctgtgtagggcgggacgtcagaggggagcctgcagacccagtctcatgtcttgggggtcaaggggtggcttccagaaggaccagtctctgtgtaggggaccattagccccctcaccccttgagcaaggtcgtggtgcctgcaccgagagagggcctggggcaggaagaggccagctgggtcgtggtggtgcctggggactgcatgggagcccctgccagggagggagagggacagaggacaagctgggggctcttctgcttgggctgggggctgagcacctgtgacctccaccggcttccttctcctcctctctgaggactgaatctggggcgcagaaggacagagattcaggcctgcctttcctctccctgaaagagcctgcgctggccctgggcagagagaaggatgagaagtgaggctgagtgaggtggggtctgcagggatccaggtgggaggggcccagccagccaaggtcaggcccagccccccaaggtcaggcccagcccctcggcaggaggacggggaccgcggcctttgggcagggctgacttggcactgaccacaagggaggcccttttgcaataggggaaaataagccagatggataaaggaagtgctggtcaccctggaggtgcactggtttggggaaggctcctggcccccacagccctcttcggagcctgagcccggctctcctcactcacctcaacccccaggcggcccctccacagggcccctctcctgcctggacggctctgctggtctccccgtcccctggagaagaacaaggccatgggtcggcccctgctgctgcccctactgcccttgctgctgccgccagcatttctgcagcctagtgagtacccaggaccacccagatgtgggctctgcccaaaccacaggaggggccaacccgagacaaaggtgggacatcttggggagggcccaggctcccaccaccaggaaacaagggcgggtcccacaggggcgggtgaccccatcctctccccctcctccctcccccatgcctgaagagtgggagacccaggccagaggtcagtccagccacctgtcacacgactgcctgtgggtgaaggtgcgggagggtctggggtcaccctctttgtgtcttgaggtggtttcaaggtctctcccctactcactccctccctcctctaggtggctccacaggatctggtccaagctacctttatggggtcactcaaccaaaacacctctcagcctccatgggtggctctgtggaaatccccttctccttctattacccctgggagttagccacagctcccgacgtgagaatatcctggagacggggccacttccacaggcagtccttctacagcacaaggccgccttccattcacaaggattatgtgaaccggctctttctgaactggacagagggtcagaagagcggcttcctcaggatctccaacctgcagaagcaggaccagtctgtgtatttctgccgagttgagctggacacacggagctcagggaggcagcagtggcagtccatcgaggggaccaaactctccatcacccagggtgagtccagctgccctggcacccgctttgcccaccgcagtgaggcttttatgatcactggtgacatcgtccccagcacctcagaccccactt

SEQ ID NO: 11509 - DNA, 6000 bp, Homo sapiens
gccatctggaacctcccatctcctcatctctcactcccattctcccacagtggtgactgcgacagtgaagtccatggttcgggagccaggggagggccttgccgtgactgtcagtcttattggtgcttataaaactggaggactggacctgccttctccacccactggtgcctccctgaagttttacgtgccttgcaagcagtgcccccccatgaagaaaggtaacagagatgtggggaaatggggatgggtcaagctaagccacacagaaatgatcaaggtgtggaatcttgagacctgctgacaggtctcaagaataagagatctcaacccctccctccttcttccaggagtcagttatctgctgatgggccaggtagaagagaacagaggccccgtccttcctccagagagctttgtggttctccaccggcccaaccaggaccagatcctcaccaacctaagcaagaggaagtgcccctctcaacctgtgcgggctgctgcgtcccaggactgagacgcaggccagccccggcccctagccctcaggccttctttcttatccaaataaatgtttcttaatgaggaatgggtcagatctccatgcttatggtattggggtccatcttgaggatttcttttcattaattaattaactcaacacatatttactatacagaataatcgtttaagaatgtggccaggggtggctgctcacagctgtaatcccagcactatgggaggctgagtcaggaggattgctgaggccaagagtttaagaccagcctgggcaacatggcaaaaccccctctccacaaaaaaaaatacaaaaattagccaggcgtggtggtgcacacctgtagtcccagctactcaggttgaggtgtgaggatcgcttgatcccggggaggtaagactgcggtgagctgtgactatgccactgtactccacctgggggaacacagtgagaccctgtctcaaaaaaaaaaaaaagaatgtaagtcacaggccaggtgcagtggctgatgcctgtaatcccagcactttgagaggctaaggtgggaggatcacttgaggtcagaagtttgagatcagtctgggcaacatggccagattctgtctttacaaaaaataattagctgggcatggtggtactcatctgtggtcccagctactcaggaggctgatgtgggaggcttgcttgagcccaggactctgaggctgcagtgagctatgatcacaccactgtactccagcctgggcaaaagagtaagactctgtctctaaaaaagtaaaaagaaaagatgtcatgtcttggcggggcgcggtggctcatgcctgtaatcccagcactttgagacgccaaggcaggcagattacttgaggtcaggagtttgagaccagcctggccaacatggtgaaaccccgtctctactaaaaatacaaaaaaattagctgggcgtggtggcgggcacctgttactcaggaggctgaggcaaaagaattgcttgaactcaagaggtggagattgcagtgagctgagattgtgccactgcacttcagcctgggcaacagagtgagactccgtctgaaaaaaataacataaaataaaaaagaaaagaaaatatgtcacatctttttttttttttttttttttttttttttttttttgagacggagtttcactcttgttgcccaggctggggtgcaatggcgcaatctcggctcactgcaaactccgcctcctgggttcaaatgattctcctgcctcagcctcccgattagctggaattacaggtgcgcaccaccacacccagctaattttgtatttttagtagagatggggtttctccatgttggtcatgctgctctcgaactcccaatctcaggtgatgcacaccccttggcctcccaaagtgctgggattgcaggcgtgagccaccatgcccggccgattatgtcacatcttgtccctcctttactcaaaactttcctgtagtttcctaagtcttaccaagggttcaaggccctatatcatctgcattctctctcctgcctcgtagcttcatgtctattatctcctatgtatcatctgttccagtcacattggcaacttcagtttgttgcccatttctttttttttttttttttttttgagatggagtctcgctctgtcacccaggctggagcacagtggcatgatctggctggactgcagtgcagtggcgatatctcggctccctgcaacctccgcctcccagattcaagcgattctcctgcctcagcctcccgagtaggtgggactacaggcatgtgccaccacgcccggctaattttgtatttttagtagagacggggtttcaccatgttggtcaggctggtctcgaattcctgaccttgtgatctgcccgcctcggcctcccaaagtgctggaattacaggggtgaaccaccgcacccggccttgttgcccatttctagtacacttctgttttaggcctttgctatttcctctatccagaattctctcccatagacatatctcatggttcacttcctaaatccagtcagatctctgctcaaagttcatcctagtcactcattcatttgttcattccaaatggtaggcactgtcataagtcctaaagatacaacagaaaactaaacaaagtccctgctcttgtgaaaaggaaaaaacattctactggaggagagagaaacaataaaataggaggtcatgtatcactataagtgctattaaaaaaacaaatacagggcagggagcggtggctcacgcctgtaatcccagcactttgggaggctgaggcgggcggatcacaaggtcaggagatccagaccatcctggctaacatggtgaaacatcatctctactaaaaatacaaaaaattagccgggtttggtggtgggtgcctgtagtcccagctactcgggaggctgaggcaggagaatggtgtgaacccgggaggtggagcttgcagtgagctgagatcgcgccactgcagtccgagattgcgccactgcagtctggcctgggtgaaagagcgagactccatctcaaaaaataaaccaaaccaaacaaaacaaaaaaaacaaatacaattagccgggtgtgaagtcgcgcgcctgtagtcccagctactcagaaggctgaggtgggaggattggttgagcgcaaccaagcaggtggagactgcagtgagctatgattgtaccactgccctccagcctgtgtgacagcacaagactgtctcaaaaaaaaaaaaaaaaaaaaagaaaaagaaaaagaaaatgtaaaagagaacacggggattctacacaagatgttcagaggagactttcagataagatcaactttgtctttgctccattgctaactgggtgccctcagagacccagattcttcaccttatccaggctgtaaaaggagttgaagattcgatgcaattaaagtggcagggtttagcaaatccttttttaaaatatataattactcaaacaacatgggtttgaaatcagcaaatcttaattccctgtgcaaatgtgagtgatttcccacgtccctcacaggaaggtgagaaacaggaggcaagacttagtctggagtcccagatgggaggaacctccaacccatagaaaacagactttgagcctggggaaggaacagtggctctcatgcactttgggaggcttaagtgggaggatcgcttgggcccaggagttcgagaacagcctgcagaacatagcgagatcgtctctacaaaaaattacaaaaagccaggcatggtgatgcacgcctgtaatcccagctactcgggaggctgaggcaggagaatcgcttgaacccaggagttggaggctgcagtgagcaatgatagcgccactgcactccagcctgggcgacagagtgagactctgtctctaaaaaagcaaaaaagagggcgggcacggtggctcacgcctgtaattacaggactttgggaggctgaggcaagtggatcgcctgaggtcaggagttcgagaccagcctgaccaacatggtgaaaccccgtctctactaaaaatacaaagaattacccgggcgtgatggcgcacgcctataatcccagctactcgggaggctgagacaggagaatcgcttgaaccctggaggcggtggttgcagtgagccgagatcgtgccattgcactccagcctgggtgacagagcgagacttcgtctcaaaaaaaaaaaaaaaaaagcaaagaaaacaggcttggttcctgcagaggcttctagagcctggaatgaagaggaggaaaagggcttcccggtgggagattgacttggaccatctcaagaatagggaggaaagaacaaagcccagttcgaaaccccgcccccggttctctgagttacttcagggctcgagttcgagccagtacaactgttacgtcaccggaatccagccaatcgcagacgacagaaggagggcgttgtttggtctttcagcacaccaatcggcgtatagttacggcagaaacaaagacgtcctagccaatgacagaggccgtacggcggaagtatagaaaaggactctctggaacatggcaacattaatctgaccacaagctgactggcaggtgctttaaccacaaggtgggcatcctaacgcgagcgaccgttttgaggcagaagcccgatggggcccgtgtccgagcttagggaggggccggagacgcaaacacaggtctcccaggaagcaggcggcgtcacaggtcgctctgcaggcgcccgctgcagcgggcggagtctggctggagagaggaggcgggcgtccgggaacgcccggaaggggcgaggccagcggcggggcggggcttatggagatcgtgagctgggcgtgaggagaaggccgggttgggagctgcgaggggccgggtttagcggggtgggcgtggccgtcgaggtggggctcggcgggtccgaaggaacctggggcagagctggaagaggaaaggtcttgggggccctgggcctgggtctgcgggagccccatctagcggggttccaaggcggcggcggcatcagtcgaggccctgctccgggagctcatcttgtcccctttcgcccctcacgccccccagctctgactccaggccctgtcccctgagctctgccctcggatgtccgaccgcccagagcctgcatgcgccgtggggcgccccaggaccaggagctggtgggtccggggccccctgggcgggggtcccggggcgcccctcctcccttgggacccgttgtcccggtcctggtctttcccccggatctagtattcagggcggaccagcggagcggaccccgacagctgctgaccctctataaccccacaggaactgcgcttcgcttccgaggtaaagggatcggcgcctcgtgggggctggtggccggacactggggggttgtgttggctggaggagtcagatgggtagggttgcacgtccagctttggtggactgggaaagtcatgtccagcctccggggcagaaggcagaggggacttaaatgacccacatggcagggcttgtctgtgtgtgtctctatcccccagtcctgtgcacagcacctgccaaatacacggtgtttgacgcagagggatatgtgaagccccagtcttgcattgacatgtgagtgagctgggagggtggggaggcttgtggaagccaggggtcgctgccacctgttgtctgaggtctgagaccttgccccctttaacctatttgccctatcctctgcctgtgcccctaagggagagacttctggggggaggcccagatttccttggattactgcctcattcaccccaatgggcttctctcctaccttgggaccagtgtgattcgccatgtggcacccattcccagccactatgatgtccaggaccgcttccgcattgagctgtctgaggaaggagctgagggccgagtggtgggacgcaaggaca

SEQ ID NO: 11510 - DNA, 6000 bp, Homo sapiens
cctccctctgggcccaagcatcaggctgaacaaagacctgtccctagttcacaggtcacctaggattctttttttttttctttgagatggggtttcgctcttgttgcccaggctggagtgcaatggcgcgatctcagctcactgcaaactttgcctcccgggttcaaatgattctcctgcctcagcctcctgagtagctgggattacaggcatgtgccaccacacctggttaattttgtatttttagtacagacagggtttctccgtgttggtcaggctggtctcgaaccccgacctcaggtgatccacctgcctcaacctcccaaagtgctgggattacaggcgtgagccactgtgcctggccagtcacctagggttctgctggaactactgaactgtagttcagtaggtgatcttaccacagtagggtttgttgctggagttgcattagctaaacagggtcttttagacactggaatctaagctgaaggctaataatattatttgaagatggtgaaagttaattctactaaaattccatcataaaactgtggcattgtgaaggattgttggcaacaaataaatagacgatagtatagtttctcaatttatgggagtcatggccaaatgtctctaaactcccttctttatttaagaaaattgattattaaaaatggccagtggttcacgcctgtaatcccaacactttggggggccaaggtgggcggatcacctgaggtcaggagttcgagaccagcctgaccaacatggtgaaatcccgtctctactaaaaataaaaaattagctgggtgtggtggtgcatgcctgtaatcccagctagttggaaggttgaggcaggagaattgcttgaacctgggaggcggaggttgcagtgagccaagatcgtaccattgcactccagcctgggcaacaagggcaaaacaagataaaaaaaaaattacgtgaccgggcgcggtgatgtacacttgtaataccagcactgtgggaggccaaggtgagaggatcacttgaggctggtagtttgagaccagcctagtcaacatagtgagatccctgtttctataaaaaatttgctgggctactaaaaaatagactgtagttccaactacttgggaggctgaggttgtagtgagctatgattgagccactgaactctaacctgggtgatagagcaagacactgtctcaaaaaaaaaagtgactgccacacataaatttctttcttttattattattattattattattttttgagacagagtctcactctgtcacccaggctggagtgcagtggtgcgatctcggctcactgcaacctacccctcctgggttcaagagattctcctgcctcagcctcctgagtagctgggactacaggtgcgcaccaccatgcccagctaattttgtatttttagtacatacggggtttcaccatgttggccaggctgatcttgaactcctggcctcaggtgatctgcccaccttggcctcccaaagtgttgggattataggtgtgagccactgcacccagccaacatcatagatttctggctttaaaaaaatcttggctgtactgattgagcctcctccccaatcttacagaggaaggaactaagacacagagagggtgagaaaagttcccaaagacacacagcaaatttaggactgggctccagttctctcaagggcttttccacagcccaaggtctctcacacctgttcccacagctgccagtcttgtcaaggttgccagtctctggggcgttgctggttcctggctccctaaaatacagggcccaagggtcctcccccactttcctgtcctgccgtgagccccccacccccacttccagacggattgggagctgtgacccccagctctgtggtcccaaagggaggtcagctaaagcagctaccaggggacttattgcccaacagggagtggctatgatcaatgtcttctgctcctcttccctgggttaaccatttcctggccctggcccctctgttaattcctctgctaacctggtatggaggaagggtggacaagggcttgggatggacaccattgatatccccaggtctgacataaacaggcaggggggtgctctcagtcctcagatgtgatccctgcctgagctctgttggcattccatggcgaggctcttcagcctcatttgggcagaagcggtcctggggattgcaaaagggctttctttttcttttatttatttctttttagaaacagagtctccttgtgttgcccaggctggagtgcaatggtacaatcatagctcactgcagccttgaactcctgggctcaggcgaccctcccgcctcagccttctttgtaactggaactacaggtgtgcaccaccatgcttagataatttttgtattttttgtgtagagggtgggttctcgctatgttgcccaagctggtctcgaactcctgggctcaagcaatcctcctaccttggcctcccaaagttctgggattacaggcacaagccaccgcgcccggccatttcttttcttttcttttcttttcttttcttttcttttcttttcttttctttttgagacagatttttgctcttgttgcccaggctggagtgcaatggcgcgatcttggctcactgcaacctctgcctcccaggttcaagcaattctcctgcctcagcctcccgagtagctgggagtacaggcatgcaccaccatgcccaactaattttttgtatttagtagagatggagtttcaccatgttagttaggctagtcttgaactcctgacctcaagtgatctgtcaacctcggcttcccaaagtgctgggattacaggcatgagccaccgtgcccggcctccggccatttcttaatatgatccaattacatacctactgataaatatttatcataacttttcctattgtaaacaatgttgcaattaatatctttgggtatccgcaaatttgtgcaaagtgcatgtatttctgtagcaagtttcctagaaatgttaggtcaaagatatgcacatttgaaagttcaacagtcattgtcaaatgccttctaagaagttttctggccaggcactgtggctcacacctgtaatcccaacactatgggaggccaaggtgggtggatcacctgaggtcagaagttcgagaccagcctgaccaacatgatggaaccccatctccactaaaaatacaaaattagccgggtgtgatggcacatgcctgttaatcccagctacttgggaggctgaggcaagagaattgcttgaactcgggaggtggaggtttgcagtgagctgagattgtgccattgctctctaggctgggttgactcctcccccaaaacaaacaaacaaaccaaaaaacaaatgccttctaagaagttttcaccggctgggcacagtggctcatgtttgtaatctcagcactttgggaggctgaggcaagcggatcactggagcccaggagtttgagaccagcctgggcaacatagtgagaccctatctctacaatacaagcaagcaaaaaaaacaaacagaaattagctaggcatggtggcttgtgcctgtaatcccagacaccccgggaggctgaggtgggagaactgcttgagcctgggaggttgagactgcagtaagctgtgacggcaccactgcactccagcctgggcaacagagtgagacgctgtctcaaaaaaaaaaaaaaagttttcaccaacattctttttttgttttgttttgagacagggtctcgctctgttgctctggctggagtacagtggcttgatcatagctcactgcagccttgaacgcgtaagtcctcccgcctcaacctcacaaccagctgggacctacaggcacatactgccatgcttggttaatttttaaattttttgtagagacagggtctcactgttttgcccaggctggtctctagcctcaagcggtcctaccatctcggcctccaaaaagcacttgggattaccagcatgagccactgcacctggccaccaacctacagtcttatcatcactgagttcgtatctacctgcatcctgtccaatactccgtactaccaatctttcaaatttttgtcggctgggcacagtggctcatgcctgtaattccagcactttggaaggccaaggcaggcagactgcttgagcccaggagtttaagaccagcccgggagacatggcaaaaccccatttctgcaaaatatacaaaaattagctgggcttggtggcatgcactggtagtcccagctactccagaggctaagatgggaagatcacctgaccccgggggtttgaggctgtaatgagccaagtcatgctgctgcgctccagcctgggtgacagaacgaggccctgtctcaaaaaaaagaaaaaaaaatttttttttggtcaatataagagtcatagttttgattagcatttcccttattactagtgaagcagaacagcttttcaaatgtttgctgcctgtttgtatctcttcctctgtgacttatctttctccgtgatttgccagtaggcatttgcagtcctttttttcttttttttttgacttggagtctcgcgatctcggctcactacaacctccgcctaccaagttcaagtgattcttgcgcctcagcctcctgagtagctgggattatgagcatgtgccaccacccctagctaattttttgtatttttagtagagatggggttttgccatgttggccaggctggtctcgaactcctgacctcaagtgatccacccgccttggcctcccaaatgctgggattacaggtgtgagccaccacgtccagccgtttgcagtccttccttcacctaactctccagttgccactgttgccagttatagaattttaggtttgaaatggttttctgttggaattctgcagacaatgttccactggctcttagactccatggttgctattgaaaagctggatgccatgttgatttctgatccttggtatatgacttgttattttctatctgaaagtgtttcagatcttctcttcacccctgatagtctgaagtccagtgcttccatgggtctctatgctttcatcaccctggacacctttttaatctagagacttgtatatttcagttctggatattttcttgtgcgtttttctttttaaaataataatttcttttcctttgttctctctttttgaactcctttcgtttgaggttagacttcctggattgatcctccaaacctgtttcctttttgtttctttctctttttttttctcttctctctagtttatttccctcgatttcaatctacgatgcttctactggatggtaactttcaactctcataattttaatttcccagagcttttctgtgtttctctgttcattcttcatggcatccttggaaggatgccaagctaaggaggccaggggggaataaaaggagtccaggctcccaactgtgcccttcccctctcccctgggagcaaccacttagggtcctcatggttcctccagtctggactctgctgcttctggtgggggctgcccttttcaggtaagctgggcccagggggtaatgataaaccagggtcagctgagggtggctgtaaggaatatggaaggacagagctggagggggcgagcaggctaactacaaaagatctggagagaggccaggcacggtggctcacgcctgtaatcccagcactttgggaggctgaggtgggcagatcacgaggtcaggagatcgagaccatcctggccaacatggtgaaacctcgtctctactaaaaatacaaaaaattagccaggcgtggtggtgtgcacctgtagtcccagctacccaggaggctgaggcaggagaatcgcttgaacctgggaggcggagtttgcagtgagctgagatcatgccattgcactccagcctggatgacagagcgagactccgtctcaaaaaaa

SEQ ID NO: 11511 - DNA, 6000 bp, Homo sapiens
caagaccagcctggccaacatggcgaaaccccatcactactaaaaatacaaaaatgagccaggcatggtggcacgtgcctgtaatcccagctacttgagaggcggaggcaggagaatcgcttgaacccgggaggtggaagttgcagtgagcagagctctcaccactgcactgcagcctgggcgacagagtgactccatctcaaaaaaaaaaaaaaaaaaaaaaaaatagaaaaagatggtagtagattgttggctatacagcctgaagttcagagtagaggtctgggctagaggtacacccttggaggcactatcatatagatggtattaaaacagattgggccgggtgcggtggctcatgtctgtaatcccagcattttgggaggctgaggtgggaagattacttgagcccaacagttcaagaccagcctgggcaacatagtgagaacctgtctctacaaaatataaaaaattagccaggcatgggtgcatgtgcctatagctactcaggaggctgaggcaggaggattgcttgagcctgggagatagaggttgctgtgagctatgatggtgccactgtactccagcctaggcgacagagtgagaccaagtctcaaaaataaataaataaataaataaataaataataaataaatacagaaaaaatagaactatgagactggatgagatcgtgaagggactgggtataaatgttgaaaagaggttgggcgcagtggttcacgcctgtaattccagcactttgggaggccaaggcgggcggatcacgaggtcaggagatcgagaccattctggctaacacggtgaaaccccgtctccactaaaaatacaaaaaattagccgtgcgtggtggcgggagcctgtagtcccagctacttgggaggctgaggcaggagaatcgcttcaacctgggaggcagagcttgcagtgagccgagatcgtgccactgcactccagcctgggtgacagagctagactccatctcaaaaaaaaggaaagaaagaaagaaaagaaagaaagaaagaaagaaagaaagagctaggatagacaactaatataaggagagtttttttgtttggttagttttttgtttttttttttttgagatggactcttgctctgtcgcctaggtgggagtgcctgaacctcccgagtagctggaattacaggcgtgtaccaccaggcccagctaatttttgtatttttagtagagatggggtttcaccatgatggccaggctggtcttgaactcctgacctcaagtgatcctcctgcttcggcctcccaaagtgctgggattacaggtgtgagccaccgtgcccagccttcacttcccttcttacctagcttaaatgtcttttttaagtggggtcttgctctgtcaaccaggttggagtgcagtggtgcgatcacagctcactgcaccctcaacctcccagattcactctaaactgggctaggcaggcctggcaaggcagtgggatgtggagggagtggaacacaacattgagacccagtcaagaagaggacccagggcgggtgcggtggctcacacctgtaatcccagcactttgggaggctgaggtgggtggatcaactgagggcagcagtttgagaccagcctggagaacatggtgaaaccctgtctctgctaaaaatacaaaaactagccaggcatggtggcagacacctgtcatcccagctactccaaggctgaggcaggagaatcagttgaacctgggatgcggagggtgcagtgagctgagatcgcgccactgccctacagccttgggcaacagacggagactctgtctaaaaaaaaaaaaagaggacccagagaagactaaaatttagtcaaggagaaagtctctgtcaggcctgagcccaacagttctctacctcactggatcccgagttcatccatcctaccctctttctactgtgccccttctctctctccccaacatcttcccttcccttttttttttttgagtcagagtctcgctctgtcacccaggctggagtacaatggtgtgatcttggctcactgcaacctctgcatcccaggttcaagtgattctcccacgtcagcctcccgagtggctgggactacggttgcctgccaccacgcccggctaatttttgtatttttagtagagacagggtttccccattttggccaggctggtcttgaactcctgaccttaagtgatctgcctgccttggcctcccaaagtgctgggattacaggcgtgagccacaatgcccagcctccttcttttccctccctcccttctttccttccctccctccctcccttctttccttccttcattccttccttccttttctttctttctttttttttttttttattgagataaggtcttgctctatcacccagatgggtgtgcagccataggatcatagctcaccacagcctccatcctcccacctcagcctcctgagtagctgggactacaggtatgggccaccatgcccagctgattttaaaaaaaaattagagacagtgtcttctgtgttgcccaggctggtcttgaactcctggcctcaaatgacccttctgcctcagcctcccaaagtactgggattacaggtgcaagctactacaccttgccacagtcttttttgttgtttgagacagggtctcactctgtcacccaggctggagtgcactggcactatcatagctcactcaacctccttggctcatgggatcttccagtttcagcctcctgagtagctgagacaacaggcgtgcaccaccatgcctggttaattttcttttcttcttcttcttcttttttttttttttgagatggagttttgctcttgttgcccaggctggagtgtaatggcgagatctcagctcaccacaacctccgcctcccgtgttcaagctattctcctgcctcagcctcccaagtagctgggattacaggtgcgtgccaccacgcccaactaatttttgtatttttagtagagatggggtatcaccatgttggccaggatggtcacaatctcctgacctcgtgatccacccacctcggcctcccaaagtgctgggattacaggcgtgagccaccgtgcctggcccaatttttaaaaaaaattttgtagagatgaggtcccactttattgcccaggctggtctggagctcttgggctcaagtgatcctcctgcctcagccttccaaagtcctgagattacaggcgtgacccactgcacccagctccttgccaccttcttggtgccaatcaaaatagtcctgaataaagtctgacttactgttttaacaagagtcagatttttttctttaataagcgcagtagaagaggtgaactgaagaggaggggctgcagtcattgatgaagacaaggtccaaggcaaaaccacagactaacaaggtaaggtggaggttgagatttatggaagcagagttcagtgacggacaggccagggtatgccaagggagtgcttataactaactgaccctgaaaaagttttttttttttttttgagacagagtctcgttctgttgccctggctggagtgcagtggtgcgatctcagctcactgcaacctctgcctcccaggttcaagcgatcctcctgcctcagcctcctaagtagctgggactgcaggcgcatgcttgagttcaggagttccagagaggcctgggcaacatggcgaaacccggtctctacaaaatatttaaaaattagccaggcgtggtgtgtgcctgtgtagttccaggcactgcggaggctgaggcaggaggatgcttgagccggaaatgcagaggttgtagtgacacgagatcgcgccactgcactccagcctgtgtaatagttcctggatcaaaaaaaaaaaaaaaaaaaaaaggaaatgtatctgaaactttccaagctccaatttcctaatctgaaaaattgaaatagcggtacctacctcacagagtggctaatttaatgcagtgctatttgcaagggataatttatcaaacctttaggcgttgttctaaagtgcccattaaatgctcactgaactcacagccttaggagggaggttcgagtttatgcccattttacatatgaggacgcgttggcaggtggtactgctgttcatgggatctgtaaagagtgaagaaggagtctcagctctcagtagagttcataggctctaggatttctgctggaagtgagaacactgcagggaggcaagaaagcgggcatcagacggtgcaaagcgaccctgggcccagatcggcggccaatggctccctccggtggcggaagcgaagagcgcagctggatcgggcgcgaagggaggatccccgcagcgggtgaggggcgaggctgggacccggtggaggttctagggttttgagaggttggaggactagaactccagaagtccctgaacgaagtgggccggatttcccgtgacgcacctggcccaggtgttgcagccccgcccacctccctgccgctttccgccatcctcacacgccccctttagtggggtggctgctcaccgcacctcggagctcggactggggtccggcccctgcggcgacgattgtttgtacctaagtgaaggaggctccgagacccgcggcccacgtcctgccggagacgcttgtctgcagggctgcattgcatccccgggcgcacgtggagctggagcagcgcaggctggggaagagcagagagggtcgggcttctccgggcgcgccatggggcggggccgaggacggggaccaatagcgcgcgcgtgctggtgggggtggggacaggctccaggcctggcatcccggtagccgcagctgtcttttccggcccccgtgcactctccgcccgagcggagccccccggctcgcggggatcgcccccgagcgctgcgtcctgcgggtgggtgagtgagcgcctcgcggcccccgagctgtggggtgcacctggccggggagaaggatatcttggctcccttgcaccccaacgggcgcaaaggggcaggagcccggattgggggaggaggaggacccggggaccttgtgtcgctcggtgggagccggtctgtgtttctgtttcgctagggtgtgtttgggttggtagagtttgtggggaggggtgcctcgtgtggatgggaggaatcggggaggctaaggcgaggaggagggggtttgagatgggttgagggagaggattgacggagggtggggttttgaaagagttggaagtttcttgttacctgtgggtgcggtgattgcattggggggcttggtaggggcagctcaggacaccgaaggagaggatggggaaggctctcctgcccgtaacttacttcccttttgggagatttggttcctcttgcattgctagttaaggaaggagaggctggagaagcctgtgccgtcagagaacctttgcccctttccagaaccggtgccatccctagtctcaggaacataagggaaggggtggcccccaggagccgggaggggccttgaaacccctgctgacaggtttggggtaccacttttttgtggggcagtggctggtaccatttgcagcccacggacttttttgagttgccggtaagcagggtgtgggtgcgttcctgtttccttgcggttgtctctttttttttttttattgacacagggtctcgctctgtcacccaggctggagtgcagtggcatgatctcggctcgctgcagccctacgcctccaggactcaagcgattctcgtgtctcagcctcccaagtagctgtgattacaggcatgcaccttcacgcttggctaatttttttttttttcttgtgagacggagtctcactctgtcacccaggctggagtgcagtggtgtgatgtcggctcactgcaacctctgcctcctgggttcaagggattctcctgcctcagcctcccaagtagctgggactacaggcatgagccac

SEQ ID NO: 11512 - DNA, 6000 bp, Homo sapiens
gacggtgttttactatgttggccaggctggccttgaactctggatctcaagtgatccgcctgcctgggcctcccaaaatgccgggattacgtgagccacctttccgccatagatgtattttcaaagtgtaagccaccaccatctgagaggccaagctgtacactttttttgtttaagacaaatcggagagaacagaacataatcattagaggtgtcgaaagatacctagagtgaatgtcattaacatatgctgtccagaagtggaaagaagggggaaatggtgggccagacatgaagtctttgaagatttccaaaaggagaccgagaaatgctgtcaccagagtcagggtgggagggtggtcaacaggagtctactgtttagaaatcattacagtttgttcttacaagttgggcaggtttttggtacaattatataactgcacatacattcagggtattgaaatgaatgatgtactactatacatgtaattacatgtagcaaaatgtatacttttatttggtgggtatttacatatagtacactgaatagtgtacttaaaaataattaacataaaatattcttttaaaaacagagcaattaaaagttgtttggttttcttgagctcaaaaaataaaagaatctggaatcttcctttcatttattcaagtagtctatgccaaatcattctaaaaggcagtcgccaaagacaaaagaaagagtcattctcctctgttattcataatcttttgatttaaggaaaagggattttcaaatgtaaagtgtctcaaaacttctgtctggtcttagtcctaaatttaaaacatttacaaattcaggcagcttgaattactacctcgatataattttgaacttctatgtttgtaaaattgagattctccacataactttttattaagagtatgattcctttataccatgcatcaaaatagtcatatctttatgtttatttatgaataaattacgatagaagcatttagcattatgaattgtttctgattatccaaaatatttcttgttgaaaactatttgaaactcattctagtttggatgcaaaaaaaaaaaaaattcagaaaatgcattaaggttttagaacgaacctcttgatttttcctttgaagtatatctgatttctgagtttttttcattttccttctagcttggtaaaaattatagattattccccaacttttcttggggataaagtttcttaactttaggtgaaatttaattgtatgagtccataataaaagatcttgtgtgggataaagaaaatggatttttaaaataatgccttacagtgtaagacatttttcaatttggaagaaattcttgatagttaattccttcaaggaattaggtgaagtataacagaacaacttttaaatttgaatctttagaaaacaacgcgacacattttcacttcttggagctgccaaaagagggccaatttagtagtaattacccatattttggagaattggacaattttttttttactttagtggatttaataaactatatgtggatgtcagggaaaggagaatccactagtgttaggaagataggaaagaatgaactcccaaaagcactttacaattttctgcaagttaaattagttagtattatcacatccctcatgtggctacttactgctttttaggcaaaataaaatgggccagaaaagaaatttaggaattctgggctcaaatattaattatttagttaccttatttggggctaagctgtatttcatttaaaggcgtcaggaacaaacatcatcttggtcagttcctccatctgatgactgggggcttgattttgaaagcttgggtggcaaattggtcatatacttggaaactgtgagatttcatcccctaaagggagagcctgagtgtcgaaaagtgaccaaatgcctgtggattgttttttttttttttttccttgtttttcattctaagtaatattaattatgtgtccaggtgccctaggtatttcttggtactgggccatttatcttgagaacttacctgcctctcacaccgtgctctgggaggtcatagccattactgtattatctttgtaggtgccagtggaaatctaggtcctaaaacctataaaatattttgtaaatattttatgcagcgcacatctttgtagatccactctgccagtgggtactcctgggtttttacaatggtggggctaaaaatcaatctgaaacaatacaaaagaaacaaaatagtctttggaaataaatacaatttgcttttattctgtgtctatacttgctcaagaaaaataaagtgcactttaaaaagttttttttaggtctctgctgtttcactcaacgcagataacttttgatcagtggtttattttgaatgaatttctttttacaaagtaacgttttatggtgctggtgaaagttattctaaactcctcccttcccaccaccccctgcagagagcaacaaggtttatgtaacccaaaactttggtgggagaactcaactgtatttaaatagaggttaacctctgggccatccaatatagtgtgtctgtactaagtcaggttagcatgtaaataatataaatataaccagaaatgtaacaacggtatttaatagtcatcagatttatttctaaaatattgccatggattcagaatactgaattccaaccagatgtatttcgggagtattacacaggtcatatatatttcacttttttggttcaaacccaggggatctacacgataattagattgagaacatctgcatcaaatccaaaccatttccctgatccttccttgagccttccccatgggagggatttctttttttttttaagcccctgcacattttgtctagccacctttagcgcaattcctaggtctcgcctgcctgccaccgcagaaatagacatgccaggggaaggcggaagcacccccccccccacccccgccgcctccccgagtgtgcaggcatccttagaagtcgcatttccccgggacaggaatgtccctcggtggcaatgccgcttcccgccagaagcctgactccgggacagggcgtggcaggcgcgggggcctgggcgcgccggtgggcacgtgcgcggggacccgaggacccgaggacccgagtgtcggggcgccgctgccctctaccgggcggcgcggtcggagctacagcgcggcggccggccgactgagcgcgcgggccggggcgccccacacggaggcagcccttggccacccgagatccacagtgccctgctgtgcgcggcgtcaccgcatctagggtggaggctcgcaacgtgccccccgacgccagcgcgctcccacccaccggcgagtcaaggttgcgttggggagacagtgaaccccgttcccgacatcaggggcctccccttggggaaactgaggcccctggccagctgcgcaagacctggggacacgcgtgttctctaaatcttgggactttcatttccagcctcttcctccaaaaatgccgaattcactgcgccaaccctcgaactcacttgaaaagcaattgttttccacttgcgcgttttattttgtatcctatgcagattctatttacatatgcattttgagattaaggaatttggggacttgttttaactaattactcgttcagtgaagtacgggagagtcaaagaacagtattcctactggaaactccaagtcacacgtgtgtataatcaatgaaagatgacgatcataaaacgtgtgctttcgccagctttccgcgaggagagaaatcaaaagagaatttattttttggtttgcattttagcatttctgtaaacttgggaccacgctttccgttttcagtgagtgcacccacactttccaactttctgcgcccaaagttgcaacaaaccaaggtgtctgaaccacaggaagtttcttgggctgttccgctgaagcggcgcggggggacacagaactgggctcccagacttttcctgtcgtggcctaaactggaacggcttgggcgaatgggggctgccgggacccccagcgctaccgccgttggggtgcgttcgggtgcgacgctggcaccgccgctgtccgggtgtggggcatccacgcgcgcggccccctgagagggtcagggctgtttccccctcaactccactcctccaaacatgccacgctgttcctggtcgtgtcggtgtcccggtcctcgctgggcgcagagggatcagagtgttgccgtccaccgtcggggcgcctcccacgcacgctgctgcggggggcctgggccacgcaggggtcgggtgtggggggtcccgggcaggtggtagcggcgtctccgcgctctgtacactaaccactacaggggcgctccgacgttccccccaaccggagtcttgaaggcgctgcgctcggccaccgcgggcgatcgcgatcccagcgggagaccccccccacccccgcagccctccccaggtgcgcggtgccgggggaccccgggcgctgccctccagcgccccctcggggccgggtctgtggccggcgcgaccgcggactttggggggggttgtcccgaggggcgggggtcgccggtcggcccgcggaggggagggggagggcggcggtgggggggttgggggagcaggggccggggccgcgcgcgcgaggccgggccgcggccgccgcgccctggggctgcgactccggctccggctcgggctcgccatggctgcggcggtgccgtgaggaggagtccgcgtcctcggtggcggcggcggcggccggctccaggccgggttttggcgccgcccgcctgctgcctcctggcggctcctgaactccagccccctctctatcagccgctcactccgtctcaatatgtctcaagatggcggccaatgtgggatcgatgtttcaatattggaagcgctttgatttacagcagctgcaggtcaggctcctccgcgctcggcctcgcgcccgggggtgggggctgcgggcggtcgcggcctccgccgggggccccgggctggcccagccgccggggggcccgcggcggcggggaggaggggggtgccgggcaccgcggggccgagtcggggccgagtccctcccgctccccggcccccattgatcactcgcttgatcggaaattgatcctctttgttcaattcatcgatcagcccaagatggcgccgggagccgccgccgccaccactgcccccggtgtctgcccccaccccgggcgcccccccgggccccgcgccgccgccgccgccagcgccgccgccgccgttgccgccgcgggaccggggagggggcggccccggcggcccgcggggtgcgcgcgcgagcggggagcggggagcgggcggcggggggcgggcggcggcgggcgccgggagggggccgcggcccggcggtggcgcccgcccgcccgctcgccccgcgcccccggcccgccgtattcccggggaaagtttgtggggagttgctgcggggggtgaagcgcctgcctctccaggaggagccgccgccactgccgccggcgcggcggagctggggctggtggcgctgtggtgccgccggctcgggggagggtcagagcggccaccggcggcggcggcggcggcgcggcccggctccggccaggcgggcgggtggccgggcaggcgcccgcgctcgctacccccggccggccccggccgccgcccccggctgtcaccggcccgggccgcgccgccgctccggcaccccgcgtgtggctcccggcgcggacccccgggtttgtttacgtcccggggagcgccccggggccacccgcgcacctcgcggccgccgcgctcttttgtgtgcctgtgtcggtgacgcggacctgttcctccgtggcggacccccgcgggggctctttggggaaacttggcgaggggcggcgggggtgccccgcgcgcagtgtcgctgggtcccggtgtcccgga

SEQ ID NO: 11513 - DNA, 6000 bp, Homo sapiens; identical to SEQ ID NO: 1273

SEQ ID NO: 11514 - DNA, 6000 bp, Homo sapiens
aaggatcctgaaattattctttgcttagaaaactatgccattattggctcgacatagtggcacaggcctgtaatgccagctacttcagggactgaggtgagacccccatctctaaaaaaaagaaagaaaacatccaggccaagtgcagttggctcctgcctgtaatgtcattttataatcagcattttggaaggctgaggtggtaggattatttgagcccaggagtttgagaccagcctgggtaacaaagcgagaccccatctcttgaaaaaaaaaaatcatcattaaaacaaacattaaaagaaacccacctgggtgtggtggctcacacatgtaatcccagcaccctgggaggatgaagcaggtggatctcttgagcacaggagtttgagaccagcctgagcaagatggcaaaaccctgtctctacaaaaaatacaaaaattagccgggtgtggtggcacatgcctatagtctcaactacttgggaggctgaggtggagaatggcttgagctttggaggtgaaggttgcagtgagctgagatagtgtcactgcacttcaacctgggtgacagagccagaccctgtttaaaacaaacaaacaaacacacacacacacacacacacacagaaaacccctcaaaacccaaaactatgccatcatttcgttctagcaatttactaaaccacatatcaagtttgcattcatattaaagaagaggcagatgggctctgcctgagaaatttattgagttatagttttattgacactgtaagttgtttaaaattgaatggattgccacataatatttacaaataatttcattttttgatgttttaatggttggattctcttcttttaaaactagttttttttctacccaaatatttctcaaaattccattgttaaacaatcaattgatcaataatttaacaagtctggtacctattatattgtcataatttgtcaaggtattgtgtagggaaataaagagactagcattataattttactttaataaaaatgtatacctatgtctgcatagaaagaataaataaaaaaagaagcaaaacagtgattatctggataatgagataaaatgtgattactatattatacattaatgtagtttccaaattatttactacaggcacatcttatttttgtaacaccataaaagacatatactatttatgtccctagggagcatatcttataactggagaagaaaataaagtagcatacagtaaacaaatagaaaacaattgagtgcaagataaaaataacaacaaaaaaccaagaaaacaattgagtgcaaaactgtatgattactgagaataagcccaataagttgctcagagaagaagagatcagaaatatagaaagaaagttcagttcagttctctttttgtataagtatgacaaaaatttagcatttgctatcttgagaaaattaacacgcataatgaaataaaagctcaggattaggcctggctcaagtgatcctcccgcctcagcttctcaaagtgttgggattacactgtgagccacagcgcccagccaacatgtttgcattcttttgcaattcttctgatttgagaacattttaaattgtaaaaaaaaaaaaaaaaagaaaaaatttataccacaatattcgctctcagacaaaaataatgtagcaagattgactgctcttaagttaaataaacgaaggattcaattaaatcattcttgtagcacacgtagtcactcaaaagcatagatactctgtcaggtgtggtggtgtgcacctatagtcccagctattctggagactgggagttcaagtccagcctgggcaaaatagcaagatcccatctctaaaaaagaaaaaaaaggcatagatacactataaatttatgtaaatatctatattttattaattatagaattctattataaaactcattttatgaatcacaaaatacgctatcaattaaactataatatatagtagatcatcaattataacatgaaccctgataaaatgtgaaaaatctgtattttataatcagtgaaataagatacacattttgtgaccatttgattagtgtctactgcacccataaatatgaggccagggtataagcttttgttcatcattgtacccacagccagcacaaataatttcctaataaatccttgaatgaatgaatgaatgaacaggtgaatgcgtaatcaaacaagggagtttgtcttacactgcaaatgcctaaatgataaataagaaaatgccttttaaaaaagtattaactgctaaataagtactgtaaagtatcaataatattgtctgatatttatttttaagtgatgcatctatttctttggaaagaagtcctgaatattttaaaagtctgataaataagaaccacccacctctgtgtgaaacaggagaaggttgccttataaagcccaagtgagtaatctaaggtgtttaatatcacaattaaatagggtggagagagcaagctgttatttcctcctactcttctgtttttaaaaagccaaattcaaacggtctgccttttacctatgagaaaagcagttctatacccttatagaatcctgtaacagagataccattttgttctgccccagctatttctgctatggaaaagcattgaacagaaaaaagcaattatcttcatccagatacatgcaggacttattatattgtgattattgaaccaaactcttatatagagagatgcatttcaaataagaattctattagccaagctaagttactcttttgcctcctgttgttactcaagtcttttctcttctgtccttctgccagccttaccccactccttaatcctctgaaccagcaaaccattgccaagttctgatgcaaagtggtttataggcctgactggaccagactaaaagtgttcaaaatagcaagcaacaaggagcagaaatccatattagaatgggatatggactatatttatattggtacagaatgccttcaataaagagttgtgagttgtgtaggtgagttgccatggagctacaaatatgagttgatattctgaaatcctagacagccatctccaaggttaagaaaaatccttatgcactcacttgcaaagatatccacagcatgctcttaatggagaaaaacaaagccttagatcaaatatgtaaagtaatttttagttttttgaaaaggtatgtttgggctatagataaatctgttcaaaaaacatgagagaagataataatggttgaaaggagacacagtgcttgccctcaagaagtttttgtctagtgagggagagagaacttgtatgtaaataaaattgtgttactaaggtagatagtgagaagtaacttaagagaggatcagataaggtattaagagaatacagaaaagggtctggattaattctgaacagcatcaaagaatgttcttgcaagagatagtgttttcaccagatcttgaaggtatggatgagggtatacagagtgagtatattcagattctactttaaaacaaatactttcctctgttgtagtggagttgagctatacatccaacaataatgaaaaaatacacgcatatatacatatatggagagagatacatattttagtacatgtagcaattgattaataaatgtacagtttaagtcgcatgcaaaaccttggagtgatagcaaacttcattgtaggatgtttagcagcatctctggtctctactcactagatcccaatagcatctccctaggtgtgacaaccaaaaatgtctccaggcattgacctctggaggcaaaaaaagccctttattaagaaccagtggtatacataagtaaaacatacacaagagattcctcccctcttctctgtatgtgaataaaaattgcaaagttcatgacctggattttccttttaggtttcttctttagtggttcttaacttcattgggtgaagtaagcctttgaagatctgttgaaagctgttgactcattcacttctcaggaaaacgcacatgctgactaccatttcagagaatttgcatcagggttctctggggaggagttctgagttctgtttccaggagctcgtagaattgtcatggtctgcatatgcaaggcaggtggattacggaaggttgatgtacagaggtctgtattttggagcctcttctgtatttacttcagaacactaacaatcaggcgagaatgttctggtttatcaaacccttccttctgcctttcatcttaaccatgcattagttttaacaaagttcatcccaacagaagacaaaacactgatgaggtaggatagctccagctcctcctccctctcttctagtcttgatttccatgtagtccagtttattccttccctgattgtccaggagaatgagaaaaagaaaaaacagagtctagtgggtaagaaagggccacctggacggcttgatttggattgtgaaataaaacacacacacatgcacacgtagaataagtggctaaaatctgagtaaatcgtgaactctctgtatcctccacccattgaatactcctaaaagactttctagaaattcaaggacttattaatatagaaacctggccattgttcctcttctcctccccatgtggtatgagagcacctgtggcaggctcccagagaccacggacctcttcctctaggcgggctctgctcttctttaaggagtcccacagggcctggcccgcccctgacctcgcaacccttgagattagtaacgggatgagtgaggatccgggtggcccctgcgtggcagccagtaagagtctcagccttcccggttcgggaaaggggaagaatgcaggaggggtaggatttctttcctgataggatcggttgggaaagaccgcagcctgtgtgtgtctttcccttcgaccaaggtgtctgttgctccgtaaataaaacgtcccactgccttctgagagcgctataaaggcagcggaagggtagtccgcggggcattccgggcggggcgcgagcagagacaggtgagttcgccctgaagatgcccacaccgcccggcccgggctccactcccggggaggcctcgagggttgcggatgggactcttaagtggtcacggatcaggtgggcagggggcagtacagctttctttctgagacgccgagagcgaacaggctgctcggaaaacaggacgaggggagagacttgctcaataagctgaaagttctgcccccgagagggctgcgacagctgctggaatgtgcctgcagcgtccgcctcttggggacccgcggagcgcgccctgacggttccacgcctggcccgggggtctgcacctctcctccagtgcgcacctggagctgcgtcccgggtcaggtgcggggagggagggaatctcagtgtccccttccagccttgcaagcgcctttggcccctgccccagcccctcggtttgggggagatttcagaacgcggacagcgccctggctgcgggccataggggactgggtggaactcgggaagcccccagagcaggggcttactcgcttcaagtttggggaaccccgggcagcgggtgcaggccacgagacccgaaggttctcaggtgcccccctgcaggctggccgtgcgcgccgtggggcgcttgtcgcgagcgccgagggctgcaggacgcggaccagactcgcggtgcaggggggcctggctgcagctaacaggtgatcccgttctttctgttcctcgctcttcccctccgatcgtcctcgcttaccgcgtgtcctccctcctcgctgtcctctggctcgcaggtcatggcagcgccaggcggcaggtcggagccgccgcagctccccgagtacagctgcagctacatggtgtcgcggccggtctacagcgagctcgctttccagcaacagcacgagcggcgcctgcaggagcgcaagacgctgcgggagagcctggccaagtgctgcaggtagc

SEQ ID NO: 11515 - DNA, 6000 bp, Homo sapiens
tactctggaagctgaggtaggaggaacatttgagcccaggatttcgaggttattgcagtgaactatgatcatgccattgcacgccagcctgggcaacagagcaaaaactgtctcaaaaataaagaaaaaaaaattaaaattaaaacaaaacctataggtaaataagaacctctgtttttctccaattctactttccaaaactcctttgaaaaagaaaatgagaactctgacccaacttgctttagttcaacattctaacaaacagtcagtagtactactactcaccttacatcatgtttctaactgaattgagaactaatctgttattagaattagaccacaaaggacaaagtcattgaagaccttcctagcacaatgtcagcccctcaccatcagtgactcattcatatgtatttagctttctgagcatatcgactcattttttccactaggcactgcatttcttcagagctctacttctcaaatcatgacagcaataaaaattccgtcatcaaacctgaacaaccactactgtataaaagcaaccactgtcttgtgcataaaactaattcctttttaaaaatagtattttatttttggcatcccttgttgctgactatattgcattggttggctcagccatccatcaagcattcatttattttacaagtgaatattgagtaccttgtgcagtagaaagagctttggctctgtaagcagacagaactgagttcaaattttagcctcattatttaatagttttgggacattgggcaagtaagctagcttctttcagccaatgtttctacactgccaattgaaggtaaaaatatctatctttgccgggcgcggtggctcacgcctgtaatctcagcactttgggaggctgtggcgggctgatcacgaggtcaggagatcgagaccatcatggataacatggtgaaaccccatgtctactaaaaatacaaaaaatttgcagggcatggtggcacgcgcctatagtcccagctaccagggaggctgaggcaggagaatcacttgaacccggaaggtgttggttgcagtgagccgagatcgtgccactgcactccagcttgggcaacagagcaagactccatcttaaaaaaagaaaaaaaaaaaaaaacaacgaaacactagaatagctataattcaactggaataggtataatttatatatcaatcccaatttgaatagaatatttttgaagttaatatatataaaatatacaaatatatgttagtgctcgacagatgttattttatccattttatatgcattgtggagcttaaaaacttaacaagacatatactccctctaggagaatcttatatgctaaaaggggaaacaggtaaaattacagaaacaattataataccaaaaaaatggtaagtaataagagcgataaagagtgctattgtgggtcaaatgagagattatatcttgttaaaggaggaaaacaatgaccatgataacaatgaccactaccataataatgccagtaataatgtcaaacatttgttcaagactactatatttcagcacttttctaaacccggtatacatattaactgttttaatgttcataacaattctaggagaaaaatgacatgcagagataatacttttaaaccaagatgcacgatgatacttaacagagatgatacttaacatgatgctcagagtctctaggaagtggcaaggtaaggattcaaacccagacattgtggctctaaaacccacattctaccgactgtccaggctacttttctaagaaaagcacacaggcgaataaagcccaggatttgatgaaatagcaataaacaagttaaaaatcccaaccactaagtcagtgaatatctactgtacccaatattttcttatttgatgatgaaggcaaaactctttcagtataatttaagggttgtaattattcatttacattttaaaaccatttcaatacatttccattaaaactcagtattcatctaggaaaccctgtagacatttcctacaatgtaggtaacatgtacaaccatgtaatactgtggtttacaatgtgaaatttctctgaagctttagtgccttctaaaggaagaaacttaaaaaaaaatgaagggagagaaggagggagagtaagaagaaggaagaaaagaaggagaagaaggaaaagaagaattagcagagacctgtcaatcatccagtagatgatagggtaatatggtggaaaaaacctggaatacctgaggggctctatcctggctttaatgtgccaactgtgtgctaagattccatggttctcatttgatgatcactcacaattgtattaattcaaaaaccctaaaatccttactgtattacaatgtaacgtcttcatatggtacttcattatatagatgtgataccaaaataattttttcatgtatctttggagagagccacatttcatatttacagttaaggactgaacgccctgataagtgaaaaaacacccaaaacacacactgattccataaagctgctgatgctcttggaacaagatagaaattccagtcaaagaacagaatcgccatccttttcatccaaagccagagtcattttctctttcacattaaaatctcatttctagtgctccatgatattaaatttataaaaatgagtataaaatattttaaatttatcatgtacctacattaaaaggacaattgcaggaagagcactctgatctcccactttcaaaagagtgatcatttagttaaaacaacttcctatgaaataatgtaagataacatataaatggctacctttaacaattctaactgaatcaaaactgaaaagattttttcttgatttctgaaacagactgaaatttaagatattaggtatgactgcagtttcatttaaaaaccaagagaggagtttaatcatgtatctgactatcacaacttaccttcattatgggagtgcattataattggtttgattactggacttgtcaattatacagtcaataccaatcaatgaaaattaatcacttaagataccatggcataaataaaaattctctttttacaaataattatcacaattttaagattattcttccatatgtggaaataaatcctgcagatactgaaataatttggaatattaaagaaactaagatttgctagattaaaattaaggggtaagaaggatgattattactattattaaaagtacattaaattatatgtaaatatactctaacacaacatcccaacactcaaccatgatccctaacatacagaactgactcagtgctttctgagtaaatactagagtatccagtaaataataaaaccttacaataatattctgaaataagtattaggttaaatgagatgctacttttatcttgaacttattttgattcatttgaataaattcttatagaaaaaaacatttgggaactgtttctagaaaactacagagtgaaaatattcagtatttaaagacaagcctactgtttaaaatttttcctggtattattattattataataactgcaaactattgttctatgtcatgtcaataagcacttaaggagcaattagatgtgaaggttttgttttttttttcctaagtaaatctaataagtgccatttctctttactccactagagggtagtctctcaaaactggggttggagtcatgactagcctgcttttgacctgttgatatattaatcctcatgttccattctcctcaacaagatgtttctctagtatactaattaaggttgtaaaacatgcatttttaaaactgctttttgatttttcatgtatgttctttcagaaatatgcactgctatgtgtttctgtgttttccaaatttctggtaattaataaaaatgttttacatgtatggcttatatagtatattttcctgggaaatatcctttcagagttaataggcctaagaataaagatagtcttttaaataatttaacttattacaatcgaaatatttccccagagtggtaaaaaatacatcctaaatacacacacacactcacagatacacaaacacacctacacatgtacccattcatatgtagctcctagatttattacatcatataaagagaagtcagtgagtataattagaaatacatatttttaaaaagtaccccctcaaatgccaatgttgtgaattacagagaggcaaatatatgctttattttaaaaatctggtcaatccagacaagaaatgtcattgctaaaaaaaaaaaaaaaaaagtgttattgaacaccaagcacatatgctaaattaagtaggatctatagagaaccaaatgccactcaaaacagttgcaagcttctcttcttaaataatgcagtcattgctgaacttcagagacggagttggaggtttgagtctctaccaggtgtttttaatatttaggaaatccttatcagtagtgtgtcctctctatttgcagactgaaaacatatttctctgaatgactgataacctaaaattgagaaaacttgtcaaaaattcccaacattccctcagaaaggaaaaaaaagaaggaaaatgatacctaggaaaacatgcaagcctgtttcatttatttgtatcctaagcagcagtgtcatagaacagacagtttgtttcagccaaccagactggagcagctgcgagtgctacatcttggctgtctgaagcgattggctcctctctggggagtggagggtgttcagttattaatgaccgctgagcaggcagcaccatgtcagtgtgacaactgatcgggtgaacgatgcaccactaaccaccatggaaacaaggaaaaataaagccagctcacaggatctctcttcactggattgagagcctcagcctgccgactgagaaaaagagttccaggaaaaagaaggaatcccggctgcagcctcctgccttcctttatattttaaaatagagagataagattgcgtgcatgtgtgcatatctatagtatatattttgtacactttgttacacagacacacaaatgcacctatttataccgggcaagaacacaaccatgtgattatctcaaccaaggaactgaggaatccagcacgcaaggacatcggaggtgggctagcactgaaactgcttttcaaggtaagtttaaaatacacatatattttaaaatacgttctatttcttgtctcttcgatgatcatgtttttacacctaaatcctcctttgatgtcttcttcttgtctgaattctaagagcatttttcttttattgcacttttgagaagaaattcacatgcaaaacccagctggctctgtgtgtgcctagctgtgtttgtgagattctccaacatgcattttactagcttgaatgcccattagaggatgtgagtgggagagaaaaagcagtgttggggggaggagaaaaaggagggagacagaagagaagggaacagtgggggagaagagaggaggagagggagagagaaggagatggggaagagagaagacagagaggagacagagaggagaggagagtcacgggtgatggggtgcaattttcctttttcttcacattatttgtagtgaaaagcagatcacacattattctctgttttgaaatcaacccaccaaatggggcatttttattttgtctcatccagtggatgcaaattaaggcaaatgctgttgtatgttaagagctaaaccactaagcagagtagcagaatgagcatatcacaaacagttattgaatttctgccaggctacatcttacggactggggtaaatgacttccctttaataacatcccctcgctggtctgaagggacagtgcaaatgtctgattgctaatgcagctggaactgccacacactaggtgaaaggatcccatgaaccagaagagttctaatctttggtaattaacaggatcacagcaggatggctttaaagtacatttcctattt

SEQ ID NO: 11516 - DNA, 6000 bp, Homo sapiens
attttgtggaggaaatgtcctctgtattggggggggtggggggacagttggaggtggggggcagatagtggttgagtgtgagttggagggtagaaggaggaaattaaaagatgcattgataaagcagtagggtacaggagttatgcaagcaatagtttatgtaaagccacagagagagtggcttatgccagaaacagcaggtccttccaaatttctcaagctttgtccttgctaacagtaagcaagcctaggaggggatgcttgaagaacctggtaagcaactgcccggctctcccactaacaagtccatggatttctcagttaaggttacttaaaattgcaaaagctattcacttgctgaagattgtcaaaaatcactgaattttatagctttaagagagaatcttacagatcaagaagtcccaagcctgtatttttccagatataatcatttaaacaatcctaacctttgtgaggaaagtataggaggccaggcaaggtagacagagcttgaggccttggcagttgcttccttttgatctctaggggaagggggtgggggttaatatgtattcattaattaataccaacattgtattgaaaaaattgcaattagtcaatgataatgggttcttctgaacattttacatgacaaacaaatattcttaagtttaatttcaaaaagacgtggagtttctttctatttttttttttaagatgggccttgctctgtgccctcaaactccagtctacaatctcaaactcctgggctcaagaaatcctcttgtagtagctaggactacaggcatctctcactacacctggctagttttttttttattttttgtagagactgggtctcactatgtctccctcctcagccacccagagagctgggattataggtgtaagccactgtgccaggcctagccctggagtttctaatacattggtgatacaactctgagatttctaagcatggatttgtaaatgaagagctggagcttaatttttctaattcacacagcactgtttcaacattgtcttattcagtggttctcagcctgggaaagaaggagaaaggtgattttgccccccagaggacatttggcaacatttggaaacattttggttgtcatgactgggagtgttataggtatctagtggatagatgccaaggatgttgctaaacatcctacaatgcactggacagtctctcaaggaaaaatgatctggcccaaaatgccaacagggttgagattgagaaactctggtctaatctgaacactctgaatattattaaaacatatggtgagatcaagaatttattactgcattttcgttaataccaatttgctcaaaggcagtttgaaaaacagaccctgactaaaattgcatgtgcgttatacagggaaaaaaatatgacacatttgtgatttgaaaaggaaaaaaagctgaagggaaaaaattagatatttttattcataagagcattgccatacaattttcaatgctccagaaaaataaccttcttccattgacactgtgctgaaagaagtgagtaacaaaatggttataaactatccttctcacaaattctaatctattatcagactgttatttctaaaatatattaatacaccatctaaaaaacagccctcttatcagaagctatgatacataataagtcagaagataaatgcaccagtaggaatttattataatttttttaatttctctggattacagggcacgtaaactctgtaggaggtgcttattggagagtaattctgtgatccagaagacactagaatgtgttcagccatttagcacccacccaccccctttcttttccctttcctggtaaattttcctttatgttcataaggacagatgccattgctgtgggaatcactctggtttaagcctcttgagaaaaacagtagctaactatattagtccgttctcacactgctataaagaaatacctgagactgggtaatctataaagaaaagaggtttagttggctcacagttccactagctgtacaggaagcattatgatggcatctgctcagcttctggggaggcctcaggaaacttacaatcatggcggaaggtaaacagggagtatcacctcacgtggccacagaaggagccaaagaaaggtgagggggaggtgccacacacttttgaaggacgagatctaatgagaactcactcactatacagtaccaactgcggggtcggggggcaggggtggcagtgggggtggttgctaaaccattcctaagaactctgcccccatgatctaatctctacctcccaccaagccccacctccaacactggggattacagttccacatgagattcgggcagggacacaaatccaagccatatcactaaccttatctaaatactggccaataggataagcaaaatcatttttatagcttccttcaaaaaatcttatgtattaaaatgttgaaatgtataagaatttcatcaaaataagaacctcaccagatctgacccaagggagagaagattgttcaataaaaaattacaaatggatgaataaatgaatcctctcctttcaagttctgtgctccatacaacaaatctagatgggtctcatttagatgggatttagagacacctttcttaaatacctatcattttacgaatgaagctgttgtctaaagagtcctcttggccacttcctgaaaacaaatcaattatttgtgataactctcaaatgtcctaataatcccatggaaaatgtaaatgtaatgaggaccaagaattataaggtaagaagtgctaatgtcagatttttacccactacataagcccactcttgtactagggcagtgactttcttctttgggtgagaccttgaaatctgggattataattttgaattataattataaaatggtatttggctgtaaattatctcctttttttttctgttcctcacagttgatattatggattcccataaggattcatgtcttctattcactttaatgaacagttgttgggcaacaattctagaagagttccaattctcatcaggagaatggacaaggtggagaagcagagaaaatgcaatgagtagaatgtctaagtcatcactttggaattgactgaacataaataaaaatgagaaagatacgtaaaaaagaagggaatgggtaagcagggtgatgtctgggagaggaggggctccatagccatgagagtcaactctgtaacaccctatagggttacaacactgcccttcatatactgaggtagcagcagggaaactttttaattattagaaatattgaactttgcctcccacccccaaacatttttctcattcagttcctgttcttttttatttctgtaatttttactgtttcaaaaatgatcttttttctttcggaagaagcaattcttcaaatccagttcacataaggggatttgatatgttcaacaagctccaaatacactgtatccagcaatacctactacatgcctactttgagctctgagcaacctgcacctcaagcctagttctcattgttttgcttttggcaaattttcactaagtgcccttcctccccaaacacacgtatatgtctaccagaccctaaagccctttatgaacatgcaaactcctcccttctgaaaacctttgcgtgagtggtcagcaggctaattcatccattgcaatgtggctttgtgttagggttctgtttccgtgctgcctgcaagataatcacagatgtgactgcatcttagaagttcctgaatctttcaagacagtctggttcacaagaaaattaaaaggtggaggtcgggcgcggtggctcacgcctgcaatcccagcactttgggaggccgaggcgggcggatcacctgaggttgggagttcgaaaccagcctgaccaacatggggaaaccccgtctctgctaaaaatacaaaattagccaggcgtggtggtgcatgcctgtaatcccagctactcgggaggctgaggcaggagaatcgcttgaacccgggaggcagaggttgcgatgagccgagatcgtgccattgcactccagcctgggcaacaagagcgaaactctgccacacacacacaaacacacacacacacacacacacggtgtagtttaggaagtaaaaaaaaaaaaaaaaaaaaaatcagatctcccctcacacctcagatctgaaggcacaaactctagggccagggcgttcgcctacccaactccacatgcacttgcaggtcacctagcactcaggtacctagcactcaggtacattgtggctccttacctctcacgacagcagcaacaacgttgattggaagtttatcactgtgtgttacgggccatgggccatgtgtgttagaattttatgtgaaattaacatttaattctcacggacacccctgaaacagatgccacagcccccattttgccaacgaggcagctgaggttcccagaggctcaataccagcaccatgagccgcagcacgcaaggcaaacacagccggaggtgagcacatacctgcttcgcaccccatgcgcctaaccacaaggttccctccctccaggaaggccgttgtcttccctgggacgacttgccagctctgaggcatgacagtacgggcccccagaagggtgaccaggaggccctcctcgtcccagctgccggcgtcgccgcccactgcagggcccgggctgtgactcgtggggacggttccctgcgccccggcgggggaggtgggcggggaggggcggcggggcgccggggcggggctcgggacggccgggctgggagctggagcccacagcgggaagcggccgccgcccgggcctcgcagggctaggcgaggcgagggggggcggggccgggcgctacgggaaggggaggccgcgcggaccgggagccgcaccgcgccagccgggctgcagcggccgcgcaccaaggctgcgatggggctggagacggagaaggcggacgtacagctcttcatggacgacgactcctacagccaccacagcggcctcgagtacgccgaccccgagaagttcgcggactcggaccaggaccgggatccccaccggctcaactcgcatctcaaggtgaagcccggggcgggcgggcccaagtccccgctgaggccgggaggtgcgggcgcccctcagccccgccctaacccgtcccaccattgctaccgggtcggccccgcagggtctgagacccgcacccttccccggtcccacccgtcaccaggccgcccgcgtagccaggaattcttagccaggttcctgtgcgcccaccgtgaccctaagagaagaggcggacgccctggcacgtccttccctcctgcttcccccgcccaaagcgctcccggttcccggggcgtcaggttggctgacagttcggggtccctgcgtcctgtctcctcagctgggcttcgaggatgtgatcgcagagccggtgactacgcactcctttgacaaagtgtggatctgcagccatgccctctttgaaatcagcaaatacgtaatgtacaagttcctgacggtgttcctggccattcccctggccttcattgcgggaattctctttgccaccctcagctgtctgcacatctggtgagacggggcacaccgggtggaccggctttctgaaacatgggcatattctccgccacctgccccctactctcctcttatcccaggccggcgtcaggaggaggaacgcgcatcagttcccaagcagtaggaagaactggaaggccttgaaaggcaatgcgcttcctttagaataacagtttgggcttggagtttcaacaggagaaagaatgtcggtctttcctggggtgtgattttccttgcatacataaggctgggctgagtgtggaggcgggtacctggaagccacacttcttaccacaggctgctctcggggccctgttgtgactcgtac

SEQ ID NO: 11517 - DNA, 6000 bp, Homo sapiens
agcaagaaagtgtctctggcccaaagaggcacattcaatgagcttgaaggacagtgcagcacttgttctcctgaatggatcaataaccaaggacggacagagtgacatactcatcagcagatgccaagatgcacagctaaggaagaaaccctcctccacagacacacccaagattcctggtcacatcataagcccctagaatttaggacaaaatggaagaaactagaaactgactgaaattaagtttctgccacctgaaggaatggggctttgtaaaagaaattaagaccagttacagaaaaagagaaagttacaattcacatgggactttgacagtttccataatgttttctgtttaaaaagctctggagtaaataaggcaaaatgatacttaatcaagctgggtggcaggtgtccatcatacaatttgccatatttcagataattgaactattttacaataaaaatactttgaaataaaatatgtttatttgaatcttaaatttgtggactaaaatgtgttccctcaaccttagcaactattgtgctttaggcagtattctcagagcttcaaatacatcacctcactaaagtttacaaactcctattgggtagatatcagtagtatttttcattttgtaaataaagtgaagttaatttaaataaatagtaggaaaagaaaactcttagccatcttgatcagaaagatttttaaaacacaaaatcgctgtttgcttgctttttttttgaagaaaataagtgggaaaaaattatttaaaatactcaaagtggaaaagcccaatccacagaagcttcaagttagaacaaggtgaggaaggggtcaggtgatgtggcaagtcttcatccagaaagccatttccttccacatatgaaatgggcaactgtaggaaggaggcctcaatgggattcagcagatgcaatgaatagcagaaggcctatggggtggtgatgctgataaacagggtaaatactgagctgaactcagagatcattaaaagatgacatgtttatgcacttacacacagatggttaaaatgttggcatgtttatacacttgcatgtaaatagtcaccgctctgaaatgtacgttgcccttcccctgaggacccttaacttcctaatgattcagcaactaaccagcagtactctaatgcacagctccagtgccacggctgaagtttgaaatgattggttggtggctctgccatactgattataatatcatacctggtgataactcctattataacccaagctggaattccttctctgaacgcattgccagaggcacatttgggaagtctcggactgctgagtgttgggaaatgttggaaagatgcctgcttcttaacactattgatatcattgagagtggtcaaacctttagattccaaatcttatagtggtagttaaaaaaaagtagccaagaatgtgaaaagaacccatggtggtagggatgggaagaggaagttgtaccagagcaaagcgacatagagaaggagatgagagaacatgaaaagcaacgaatttcacaattttgccataagctgaccctgactagcctacttaagaacctcatgtctcagaagttgctaacgggttctctagtgatttatcaactgtaaaatgtttcattatccaacaatctccttaggaaaaggtatttttaatgtatttaagctctagtatcctcatcgctcagatggttggtttggttcgcctgagtggcttttagatctgtatttctagtgccctctaatccatgggatgacctttaatgctgcttccaaaaaagaaaaatattagagggcaaatgaattgccaaatactcattttttaagtaaatgatttggagaaagttattaactcgcctccaagcccaaagttacctgtgtgagaatcaaacaaaaacaattttgcttatatcatctattcatttccaattttgtacctatgctaacaatgttcttcttctccttttatttctcataaatcgagagcagtttccctaagtcagctattataaccagactaagatgtgtttctctttggtgccagcttcttgttgaggcaggttaatgaagagattgtggtttttcctctcattaggaatgcattttggcattgacaacgcttcactgatcattatgattccatgtgttgctgttgattagacttttctacatggactttcccagcgagattgctttccctcggttgagtactagttaagcgttcacttaaaggcctccctggaaagtccttttcttgctggaatgcaggacaagctccctctgtgttcctgttgacttttttcacagttaacattactcatcacagctgaagactgaataacaatagatgggaagtggtttccacatttttccatagaacgtaaccccagttgacttgtatgaaggaaaaattaaatgaatttatggcagtcattagaggtgggctaggtactatagaacatattgaacctgacagtccttttctagtgtattgtgtttgttaatatttgttaatataatttgttcaaagaatttagaaatgcaatctgacagaaatgaaattaagaaaacgcaactttttggccagttgtagtggctcacgcctgtaatcccaacacattaggagactagggcaagaggattgcttgaggccaggagtttgagaccagacagggtaacagagtgagacccccgtctctacaaacactttttaaaaatattagcagggtgtggtggtgcacacctatagtttcagcattctatcaggaaactgaagtggatcacttgggcccaagaggtccaggctgcagtgacctatgaatgcaccactgcattccagcttgggtgacagaggacaccctgtcagaaagaaaagaaaaaaagaaaaggaaggaaggaaggaaagaaggaaggaaggaaggaaggaaggaaggaaggaaggaaggaaggaaggaaggaaggaaggaaggaaagaaagaaagaaagaaagaaagaaagaaagaaagaaagaaagaaagaaaagaaaggaaggaaggaaggaaggaaggaaggaaggaagaccctaattatttgtttactcataaataagcttattttaaagcattccaaattttttaacttttattttaggttcaagagtacatgtgcaggtttgttaaattttgtgtcacagggattcgttgtacagattatttcatcacccagctacaaagcctactccccaatagttatttttctgctcctctccctccccgacgctccacccctcaagtgggccccagtgcctgttttttccctatttgtttccatgagttctcatcatttagctcccactaatgtggtatttgggaaaatccaacttttgaaagatctttagtctgctaatcatgaatggccaacataattacaggcatgccaacatttgtaacattgtgacactttccctgccattcttagttaaaactgatcttttgttccaaaaatttttgctaccaacaatagcctgtcctttatagttcttttatacttttgtgtcttctctctaactaaataatcaactctttcagcattccatccatttccctttctcctccctcttactcccaacccacattcccctctccattttaattttaacctgtgccccttcaagtgtactccagctttttttttaaaataatttcaagtgatactttgacttttgactgcatatggaagcataagtaacatgtcctttcatttttggataatgagtttcctgattaattacagctcaagagtaaaatgactgattactatttaattcattttgtgcttctttacaataaagtaaagacagaagccccagattcaggaacagacaaaatactttaatcgctatcacattttttttaagtctagtcaattagaaaagtcaaatctttcctcacagccaagcacattaaaaaaaaatcttctctggtaataaacttgaagctttaaataattctacaattataaacattttgtgtattttgcaaatatggcataacctgttggcataaaattccattgttccagaaaatatcggtaataaaattatagaaaagttaaagatcttcatttcttatttcgaagcgtttgggagacatttcagaaacggatgggaaatgttaaattctgcatgcctgcttaagtttccatccacaccgactagatgtaaacgagtgtcaccaaaagtacaccacaggcacccacacagattccttccataagggatccacaaagtttagatgtgaaatgtacctaaaggttcctagccgtctttcatccctccctctgtgaaacagggagacacatgtgttttaaggcagagatggaacttgggcgatgggcggggggtgggggaggtgggaagggacggcttaggacagggcaggattgtggattgtttctgccgccttggttgcccatactgggcatctctgcaggcgcgtcggctccctccacccctgctgagatgatgcactgcgaaaacattcgctctccccgggacgcctctcggtggttcagagcagggaaaatgttgcctcaggtttaaaataatctgcccaagcaccccagcgcgggagaaacgttctcactcgctctctgctcgctgcgggcgctccccgccctctgctgccagaaccttggggatgtgcctagacccggcgcagcacacgtccgggccaaccgcgagcagaacaaacctttggcgggcggccaggaggctccctcccagccaccgcccccctccagcgcctttttttccccccatacaatacaagatcttccttcctcagttcccttaaagcacagcccagggaaacctcctcacagttttcatccagccacgggccagcatgtctgggggcaaatacgtagactcggaggtaggcatccgtgggggggcgccggctcgggcgtgcggggagtgtccgcttctgctatctgcctctccaaatatcccgactgctgccctggccccagccctctctccacttcggagcactcctctggcgttggcaccgctgaggaatgggcctgggcggggaggtgaagagaagccaggaatgttttatgttttcctaatggagagggggcctagggagcccctgagctaggaggacacggaaaaggggattggggtcctgagattgggtctgttgggcccaggacgcgttttctggatgggtctaggatgctcccttgtcgcgggacccccgcggtccggccctgcctgctgggggttcgaagaggtggagtgcagggtggaggtgttatttacccgagtcctggggacagtccccgggactctccgccaggcgcccagaccggcaggtcccgcaggcggcgcgcggtgtgtttgcactttccaaagttcttgaaccatctcaagaactccttctgcatcttggcgtctggcaggggtgttccgagagaggtagacctcccctccccaaactgccaccatcacttccaacgccctccacgcgctggagctctgcccgggtgtggaaacctcgtcttccaacacgtagctgcccttcagccacccgcccgcagcctgggagtgccctgagggtgggtcgggggagctgcgcaggtgagactgagttctaggacatttagggggtctggtgcctggctccgccaaaaatggggactttcgggattgtgatcatcacggcggattgagcagggagagccgtggagggacaagagagggccgaggcagggtggggggcgcgggcaggtgcgagggggatgcggccaagaagcagcgataaagggaacattccacgggtcgggcggctgctgttggatcttagataaagctggaagggattaccggggcaggggtaatagggaccggggacgggaacgcgaaacaggtgaagcgctcagggcgagagcgactcggcttagggagtccgggagaagc

SEQ ID NO: 11518 - DNA, 6000 bp, Homo sapiens; identical to SEQ ID NO: 3465

SEQ ID NO: 11519 - DNA, 6000 bp, Homo sapiens
agagacaggagcatttgggcagactatggggttttctaggtatgaaatcatatagttttcaaagagaagtagtttaatttcctctctttctatttagatcccttttatttctttctcttgcttgattgccatgatcactgtggaaagcagtctggagattctcaaagaatttcaaatagaactaccattcaacccagcaatctcattactggatacatatccaaaggaatagaaattgttctgccctagagacactcgcacatgtacgttcatcacagcactattcataatatcaaagacatgacaccaacctagatgcccatcaacagtggactagataaagtaaatgtagcacatacatagtatggaatattgtgcagccaataaaaaaaacaaatcatgtcctttgcagccacatggatggagctggagaccactatcctaagtgaattaacatagaaacagaaaaacaaatatcacatgttctccctgctaagtgggagctaaacattgagcacatatgaacacgaagaaggaaacagtggacaccggggcttacttgagggtggagggtagaaggaggggactattgagtattatgctgattacctgcatgacaaaattatctgcacaccaaacccctaaagcacgcaatttacccatgtaacaaaactgcacatggaccccttgaacctaaaataaaagttggaaaggaaaaaaacaaaaagattataagggagttgaaaaattcctactgcctagggatgcgcagccattgtaatgtccttgcctaatgcgttactcaggtgtctgtgaggatgctgctgtgctgccagtcttgcacaagtacagcacatacaattatgtacaatatataatacttgatcatgataataaacgatgttactggtttatatatttagtatactatacttttaatcattattttttagtgtactccttctacttataaaagaaagctaactgtaaaacagcctgaagcaggctctttcaagaggtattccagaagaaggcattggtatgccttggtattccatgcatgttactgtccctgaagacagaatgaagaacgttcagtaggaaaagatgtggatatggaaaacagtaatactgataatcctgcccctgtgtaggtctgtgccagtgtaattgtgtcctagcttttaacaaaacattcaaaaagtttttaaaaagtgcaaaaatacccagcactttgggaggccgaggagggtggatcacaaggtctagatcaagaccatccttgctagcacgatgaaaccccgtctctactaaaaatacaaaaaattagccaggcgtggtggcaggtgcttgtagtcccagctactcgggaggctgtggcaggagaagggcgtgaaaccgggaggcagagcttgcagtgagctgagatcgcaccactgcagtccagcctgggcgacactctgtctcaaaacaaaacaaaacaaaaaaagtacaaaaatagaagaaaacttacagaataaggatataaagaaaatatttttttgtacagctgtataatgtgttgtgtttcaagctaagtgttattacaaaagagtcaaaaagttaaaaattgaagtttttaaagtaaaaaaagatagtaagctaaggttaatttattattgaaggaaaaataagattttaaaaataaatttagcatagcctaaatatacagtgtttataaagtctacagaagtgtacagtaatgtgctatgccttcacattcattcaccacttactcactgatcacccagagaaacttccagttctgtaagctccattcataggaagtgccaaataaaggtgtaccgttcttaaaaatattttatactgtatttttactgcaacttttctgtgtatatatatgtttagaggttcaaatacttgccactgtgttacaaattgcttacagtgttcagtacagtaacatgatggcaggtttgtagtctaggagcaataggctgtaccatatagcataggtgtgtagtaggctataccacctaagtttgtgtaagtacgctctatgatattcagacagtgatgaaatctcctaaagacacatttctcagaatgtatccctgtcattaagcaatacataactatggaaagtatctaagggaattccaaatacgggctggataaaatgaattgcattagcattatgcattacaataaaaaagaaccaatattgagtacacttcatgtgctaagtatttcactggtgttcagaagtatgatcctgtttcatcttcacgacaggcctgaaaagttaaatttcattatctataatttctaatcatagaagtaatttgccaaatgaaacaaagccagtaagtaatttcttaagcaagattttgaatttagatgtgtttaagttctcagcccacattctttccactatatcaagaagcttgttgaagatgcaggagggcagatcccagtaccttcttaaaaactgtacatattatgttcttgcttctttggggcttttgtgagttaagctcctacttttacatttgtaagcattcagtttcccacacagttttaaaggctctatttaggttcctcgccccatctttacaggaaagcatgccattattggcattgattaaatattcatggcgctccaccctctggattccatgcccagcacctgtcatagtgccaccttactgtttggactaacgaggggttggttttcttatattaattggtagtaagcccctcatttccattttccaggtaacatgcttgtgtgtttgttttcaggtatgcaggctatatagattggttaacaagcatctttcacttaaacaaatagataaagagcaggtgtcttcagttccttgtcctcaaacttaaatggtgcattagctctgacttcattactactgacacaggattccttaaatctctattctgtaaacaaataaacaaacaaaaaatacccttttatctctacagaaaatcctgtacatgataaggatattttaaattctctggttattttctatactcattttttagtttatatattttctttgacgtatcccatttcaaattttcaaggttgacacatcatgcctgtaatctctagggcttaaaagtcaatttccgtaaagtacaacacacagtccacttattttacaaaccaagggcagtcaaaccaagccatgaaaagtaatttttaggtagaaattaggctactattcttcatcaatacagatgaagcctcattattgccaaagatcttaattactatgatgatgatgattcagtaatctagatttaattttcaaaggaatttcaaaaggaaactctccacatctcatcccacaactatccaaatgcagactcaagcctaagtagtatatgtcacataaacacaaaaaaggtgggtggcagcgaaggggtttggggatgtttatgtgatctgactctctgttggaccagttaattttgatccttcaccttcctaaagcatccaaaccttaggtgcagatttaacttctcgccatccacgccatctagtggcttgtatgtgttacgtttggttttaaggatgattcctaatgactcgggggcggggtacgcgaaaaacaaaaaggttggtagcgacaattttcctgtgtctctctacctcagtaacccctcatacgaacacctttaactcttttaactattttaaatatgcgcagtgatgcgcagagaggatgaaggggacgcaaactttcagagacgcacgccccttgacgatgacatttagaaaagggctccacatccctgttattcgtaaaggacgggaaaaggagttgtgtcaagacctcgatcgaggagagtctctgattttttggcaagttggacagatggcatatcaatccctgcaacgttaacaatctggttttgaaaataaataaaaacagaaagaggaaatgcacttaaaaattccgcgtcggagctttgcgggtcttgccttccagtcgcccccagaagacaaccaattcctgcgcattccgctccgctcaccctccttcccagcttctctcgctctctttccccccattttcccacgctcgccttgaaccgggactcgagaggcagaagcaaggcacgggtcccctttctcctctcctccaccaaaccaccgcagcccagcacgtgaagcttccctttgttcatccgaggctcgcttttctccccagcagatccacctggatgctctccctcggtgacattttgcgccggggttggtgggtggctggggtggagcgagaggagcccgagggggcgggggcggagaaaggtcaagccgagggaaaggcaggagacgcctttcctaacctgcgtggcggggcgtgcgcgcggttatttatttattttctccttatttattgatcgcactagcagagcagcgcggggagcccggggagatgcaggaccacccactggcggggaagcagctagcagccctcccgcgcccccgcgctgccgagcgccttctgcctccgcgctcggacgagagcccgtgccggccccggccccggccccaccgcgccaacgccgcccgcccggccgccccgcagccccgccgccccgcagccccgcaccgcgctggccaggctcccgcgacagtggccccgcagtaagttggcaggagcgagtcccctccgttctcgcctcccccgcaccttttgaacttgttgctgctgctctgctcgcctgcgcctggcttttggaaggtgaaaaggaggagggaggcacggagggatgggggaagggaaagaagagctcgcttgagctttatttatgctctctcggcgcatcggattcggctgctcgcgagctgctttctctcctcttccctttccgggtgcacggcgaggagaaagtctctatgcaactaagccccggcgcgcacttggccaggtatgtaccgcgggagcggcgcgttctgcgcggaagcagatgctgctgccgccacggcggcggcggctgccagctcctgagctctgtaactgtcacactgcacctgagctgaacttgaaaagagagtgaaggggcgattgggcgaacgcttttggcagacacagagggtgtttgtagacgtgggggaggagaatctctattaacgccccccaccgtaaccactgcacatcacctccatctctgcaaatacagcccgaggagtagaggcagcagcagctggacccccaaagagagacgtggggcagcggctgtgaccgcatctcctgagctacaacaacaggtcgcctttttgagactcctttggcgggaagggctacttggaaaggaaggtttgaaagagtgagaagggtaggtgtaagggttccctaattcgtcgaaagaattctattgggtgactctcgttcgtcttctctatcctacactccacatactgaccctatattatccagactgtgccggggagaaatcaaaaacacctgtttgaagaaacggctgcacctgtgtgcttatttgtgccagagggtggcctagcccacctgcaggaagagatttggctgggttctgttgagggtgattgttaggacgttgtattttgttgccattattccaaatacctgtcttggagggaaagttgcccttctgagaactgtgactttaccaggagccctatcttggaataagagttacacctctggaccacgtttctcactagtactttgcttgactggaggaagtgggtgacttttggctgcttcggtgacccattgtagacgcctcgttacccttcttccttccgcttcaagtaatcatggcggcgggggtggcagcgtggctgccttttgcaagggcagcggctatcgggtggatgcctgtggcctcggggcctatgccggctcccccgaggcaggagaggaaaaggacccaagatgctctcattgtgctgaatgtgagtggcacccgcttccagacgtggcagga

SEQ ID NO: 11520 - DNA, 6000 bp, Homo sapiens
ggagataattaggtcatgagggtggagccctcgtgaataggattaatgtctcatacaaggggctccagagaactgccttgccgcttgaacacatgagattcttgcaagaagatggccatccatgatccaggaatttggccctcatcagacaccaaatctaacaatttcttgatcttgtacttctcagcctccagaacagtgagaaatagattcctaattataagccactcagactagtattttgttttagctgcctgagtgaacttagaataaacccaagatctttgccatgatgacatgttttctttttaagggagaaaaaactgaaatctaagtaatattcatccagaagtaattttcaaagtttatgattatcttttataaccactgtttcattgaaaatatacaaaatacagaataatattattctactgatacgatgagaaagaattatcttgaatcttgtactgtatcaaatattcctgaaatggaaaaaatgattcctacctttttgtgttttttaatataatgttctcactgaattcttgaatataacaggtttaaattactttacagtcaatcctgacaagatactaaaaggctaagaatgtaacatgctgtggttttcctatcaaacataattatgcctccttcagatggactcagggtgccacatcactcttagctctggagctatcagtgaggaccctcctacttgttttatgcctgatactggaaaaatgcaataacaggccatctgggccactaggaacaaagatgcaaagctcaggcaggtaggaatgaactgctttttaagcagaaagttctagtaggacaaatccaaataaaagatttgtctatgctacaggaagtaaaattagtctttaatgttttcagaaatttcacattacaagaatactaagtagatgtcattgtgtcaatcagatgtgaacaaaatttttaaggtgtaaaacacaagataaatctagcctcatagtctaaaatacattgttccatgtaaaatgagatctatttctgacaaacaccttataattaccaaagctgtattttacttcaaaagaaataactatgactttctcagtttgtaaacatttgattcaattcagtgacttctgttcgtatttaacatctgttcaaatagatttttcaatgacaatggataaaaatgagcaaaaatgtatgtgagcctaacataaacaatttattgttataagaaaaacagatatttcacttcccatttaatttcatagtttattcagtgactatacaatattctatagtcactgtgttataacatggaagtgttgtaagaagcacttccaccaaatttaagtcaaacagattctgcaaagttaacatctccttttccccatttccatctacctatatttatgttagggacactttggaaataatttgtagagtaaggaaacttatggaaaactatggacattttataatcacaagtgaccaaccctgatattagaaaattctcagacacaacaaaatagattgccagattttgctaataaaaatacagagcaactagttaaacttgggtttcagataaacattaatttttttaaatataagaatgtcccaaatattgcatgagagtatataaaaattatttattgtgtgtctgaaattcaaatttcactgggcatcctctcttttatcaggcaatactatgcagagacattttagtagtgatgcttttctctcctattagaatgtgagtccctttatggcagagatgaaataattcgttatgcatcagtgtgtgatacataatgaacacacacaacagaattgtattaaatgaaaaactgaatgtaaagaacaaattttaaagaccctcaaatttgttctcttttagaaaactcttgagttttgaaatttttgtcaaatcttccattatgcaaccgctatctacctccagaaatattccttttccttgtaggttcaactaatataatctcttctcatctctttgtttaaactgttcatatgaaacagtatattatatttattgagagtgataagactcccagagctttggcttatacatgagtttggatttacaaaatgctccaggatggtatgtaggtgaggataaaatgtacctagtttaccaagctaatgttttagatataggttctgtttgtctctgtctctgcctctttctgttctgtctctgtttttctacatatattctctctgaatacatgtatacataaatttatatatatatgtatactctgaatgaaggtgtgtggttttgcaagttcataactttaactcacaatggctaatgcacattaatcaggtaccatgtctcagaaatgactatgaccccagtaacactgtgaactgtgagatacagtacatttttgatgtttctgctctgctgatgccttctcttctcccatgccttggctgttacagtgacctatattccaaggacctcaacctcctactccatcatccctcccagagatcatcagaaccacattcactggtcctccagtcagtttcccacagctgtcattcagtctcacagaattggcctctatcctgaatcccatacaaacctcaatagcaacatgactactccctccaggtggcttttgtgccttcccagggaatgacagtaatattaactatgagaacaaaattagcagaaatcacatattccccttccctttttactagggaaatttatttcaacagtgttgttgtttggtgatctaattcaaaagattgacaagtgatgtgatttttttgtccagtaagagaaaactcagggttatggtggttgttggattattcttgcaggctactggggtatccttgataattggaacctactggaacaccataattcccctaagcaaaccaagcttcccctaaatagcagaagttcttaggagtttcttttgtggtccctcctgtgttgtatttcacatataagctgctccactgggaaatcaatgtttgtcacagtctgaccccactcaatctgctcaaatgtaattcacactgtttttttaatggcatatgacatctgcttctttccttcctgtcctcactgcctttgacatggtttttttccctgctagtccttcttgtttaactacacatctctaggaaagctttcctgcctactccagtcaatattaaataaaactttctctgaactctcagtgcacagtcagtttatacacctgcatacttcttgtaatgctagcaaaaaaaaatggcccccaaattttcttcctatatggaaactcacatgagcagccatcaatccccatcataattcttgtaaaagttgtagcatttctatttctgttcatggaaagaataagatcaaggatcaacttcttaatattgatatgtgtttctgaataaacactaaatggtttcaaaatctgttattacatgactataatctattcctgaagcaacagcaaactgccattagcttgcacatttagccaaatgttcacaggctgggatattagcaagaactcgtagtaacacttgaaatacattcagaacccaattttatgtgcaggaagttttctttaaaatttttaaagctagaatactatttttgagacaagaacaggacacaagagtatacactgtacagatacctacttcaaattgttactaagaatacatgggataattccacaacttggctttctgtgccttagatgggactcctaaaaggctctaaagtgggtctcatatacgaaaaacatgtactaatagttaaaggatatcatataaatgaaaatctcataaattttcagtgtagagactaccaccaattaccttctcattatttccttttggcttcaaattaattcaacaaatattcagggaacacctattgattttttttaaggccattttgctaggatctggggttatagtaataaaggtaaactccctgccatcaaggcgctcacagtctaattctgaacaccaccaaagaaaagagcacatgagggtgacatttccagctctaaggcagcagaaggtatgcattatacattttttgcatacccttcaatcaagcaataaaaaatcttcccgttcgaccctgtgggaggaggcacttgtgtggttcggtctggcaggaccaccgccgtgttgaaagtccccccagacagctgtgcccagcacggcagtttcgttggggtctagggaaagggcagggtcagactggtcacaatcagggctggagattttttggagtcaactctcccaaaggcaatggggtctactgctttattaggaaaatggaaagaaaaaagggagggaaacaatgtacccaggcgcccccaccgcattctgattggacccacttaagcatctgcagaaaacaataaaatgaaaaaaactcttagaggtgaaactcaaaggtcaacctctggctgtgcgggacaatgggtgtccggccttcccttcccttcccttccgaagtgatgaaggagttccaatgttctgcgaacactggaaaccccagcggatccctctaactccagggcagcgaaaccactggcagcggacagagggaggattgtcggtgtgtgaattgctaccctgggatccggacccagagcggcagccgcgcccctccgccccccgcgcgaccccgggtccgaggcacgctcccagcggagcggtcctgcgcccccgccccctccaggagccgcggcgcgcacagccgggctggagcgcgcacccggcactgaggcttcgctgctctcggagcgctcagaccgcggccgccgcagccggcgaaagaggcaaagtcccgcacgccggaggacatgcgcctcggctagcggccccgggccccaccaccgtgcggctttctccagattattcctctctcgctgtctctgactgtctctctctgtctctgtctctgtctctctctctctcacacacacacacacacacacaaacacacatacgcacgcacgatctcacttcgatctatacactggaggattaaaacaaacaaacaaaaaaaacatttccttcgctccccctccctctccactctgagaagcagaggagccgcacggcgaggggccgcagaccgtctggaaatgcgaatcctaaagcgtttcctcgcttgcattcagctcctctgtgtttgccgcctgggtgagtgagaagagctcggtggggtttcagctccgggatcggtgggatgagggtgggagcatttcagcgtgtccgcgacttgccgccgccgccgccatctagccaggaggaaaaagggacagccaactgggctcccacggagcgggcggccgcgcggtgcaggcagctgcgtgggatttgcgcgccccctccccgccccgcgccctcgccccttccatcggcccgcgggcattcgtgccccgggccccaggagacggagctactggagacggagggctactcggatccctgccgccaccgttcttctctcctcttttgcaaagtgtagaaatcgccttttagatatacataggaagataaatgaccagaaatacagctgtggtgcggggctgtgtactgtactgtcttttttgctgttcatttttatgctataggtatgatgggcttaaatggaaagtacacgtgtctggtgtgaattgcagacacacacacacacacacacacacacctgaaaggtagtaacaggcacaagcaccaacctgacttttcagggttttttttattactttcaatttagtcatattcaagtctgcgcaattacttacaaaaaaaaaagttccatctaaatctctaggtttggtcagtgctgccaaagtcagaggagagctgcaggttgatatacttattcacagatttcatttttcatctgcaccctccaggttacatttaaaactgaaattgcattcagcaatagccagtttaagcattccctttacctgcgatgca

SEQ ID NO: 11521 - DNA, 6000 bp, Homo sapiens
agccacacacaagtgaataacaacaatattttttgtcagccataaacagtcattaagtagctaaagtactaattacatgcaaccttgggagactcactgctctataattatctttacaactgagtatgtgccttttgaagtttctgtttaaccctctaaagttattttgctatttgctctggttcttttgttttgtttttaagcaaaagggtagattttataaagaacttgtctccatctcccaacctcatgtttggtccaaactcttcaaaaattctgaagtggaacagcccccaatcctaataaatattcttaggttcttttcgtttgttcatttgttttttaagacagagtcttgcactgttgcccaggctggagcacagtggtgagatctcacctcactgcaacctccacctccctggttcaagagattctcctgcctcagcttcctgaatagctgagattacaggcatgtgccaccatgactgtctaatttttgtatttgtaagaacttctaagttcttacatggggtttcacaatgttggccaagctggtctcgaactactgacctcaagtgatcctcctgcctcagcctcccaaagtgctgggattacaggtgtgagccaccaccatgcctggccttattgggtatcatttatagctgatttccctcaaagttccttcttttcctgtgccttttcctagttgatgagtctcagggacactcctaccttgtcatcaactacccagatgctcagtcacctgttgctttagcattgagttcctgtttctcttgtctcaggtgagaatcatagagcactcctattttcctctgttcttggtgaggaggcaaacacaattacctggtcttctcattcataagtgttaatatgcttaggttatcatgggatggtgtaggggggcagagagaagtacaaatattaatacatctttataatgtcattaaaaagctgaagttgcagttaattttctttttggaggacatgtgccatacatttatgatatgcgttatatgctagatgtattatttaataatagcaataaaagcaatattggttattaatgttgctcgtaacttgttgacgtaacaaacatgttaatagctaaagtaagttggtttgagtttggtactgagaagtaatcttgttaattattgcttgtttgatttttggtaactgttcttcctccccttttgtgcaatgaaagtacaatcagcctgtttggtcagactaatgtataactaccaaaaactgcaaaaatatctggattctatattaataatgtgttttgccactatttgttttgaatgtcacttatttaaatgttatgtacttattccattaattcaatttaaaagactgaaaactttccaggtaagtcacactttataagtcagaaaaatatttcaactgggttgagggaagaaagcttgacgtctgagtttgaatggagtgtatgtttagttgactccttcacaaagttgcaaagaggtagtcaaaataatgcaatgtacactaaggcttgagtcagtctgacatgctgatagaatcaagatccatgaagactttcttgagtaggttccttctcagaagcacatatgtagtgatactcaccatcactgaggcacagcaccatcatcagatctgactccactgcagtataaatttgatgagtgcttcatttccaccagaacaattccttcatagctcgcatattttggttactttttgtctcttaacttcttgggaaagttttaatgttagcagttctgtgaatcattaaatggtcctgggcgtggcccttcttttttgataatttttactgcctttcatacgggagtggatggtcgcaagggacaatattattaataataataacaggaacaacttacatttatggaataccttctttttgccaggtataaagacaacaaattactctctaagttctggggctggggcccatgaattgagctgacaaaagacagattaagaaaataaaagcatatacattatatttaatatttttactgcacattgaagcctttataagaaaaatgaaaagccaaagaagcaactcaggccaagggcttatatacgttttaaacaaagaaagctaaattgtggggaaatgataaaacaaaggaaaagagtttaagcttctagaggcagtaatttgtgggaaagtgactagaaaatacacagggaaatctaatggaagataaggaagattttagtagttttgtttgtaccgatccatttcagtattgacccccagtctccagtgataagaatgttctcttcctaaaacagggagagcctctttcacatggaaaattttatgtcatacctgaggcagaaagaggaaagtcagagagtccttcctgcctctgctgttgctcaatcaccttcagcctaaaataatcaacatgctgggctgggcacagtggctcacgcctgtaatcccagcactttgggaggcctaggcgggtggatcacctgaggtcaggagttcaagacaagcctggccaacatggcgaaaccccgtctctactaagaatacaaaatttagctgggtccagtggtgcctgcctgtaatcccagctacctgggagcttgaggcaggagaatcgcttgaatccaggacgtggaggttgtggtgagccaagattgcaccactgcactccagcctgcgcaataaagtaagactctgtctcaaaaaataaagtaaaataataaaaataatcaacatgccaaagtagcatattttggggtagcatattttgaattccttcatttcccccatctgaaactttaccataagtttctcataataaaatctgaattagtggctgtggagagaagaatcagtttagcagctgagtgatagatcttcaaaagaagaatatgtagatcagaatgagaataaataagcagaaaagtgcaaatctaagcacatttctccatatcccattaaaccaatctcccaactctgggaataggtcagtctaatcaaatggttgagcctcattatcttatggagaatattaatcttttttgttcaaaggtataaatcagataacgtttgtcccaactgattcacaaagaggcagcattttcatcaaccacacaagatagaatgaccagtgttgttcatgaacaaaaagtggaacctgtaattcccaagatctagtgtgttccacaacttttgttattggtcatattgatgtctccacaccttcattttcacgtgcctctgtcagtttgtagaagcagaaaatgttgtgaaacatttgacataggagaactgcaatctggctttggcagctaaaaggcttgattttgtcacctgaccaagttaatccagatttttgatctatttatatacaatttctggtgctaaggagcctaatcaggagagcagccgagctatcccacccaggttgtgcaagagtggcctatgaaccagccaacacatttggtgatttggcaaaagtttgtgctataaaaggtagttctagaatcacttattgtcaccggatagaaagtcctgactgtgagttttccaggttcttggagtgttgaacaaagaattgaacaaaacgcacaaacaaagcaacaaaagaacgaagcaacaaaagcacagatttattgaagtgaaagtagcctccacagagtaggagcaagcttgagcaagtggctcaagagcctgactgcaatgttcttcagggttttaaattaaactaaaagaatttggttaacacccctaggtaccctttagagacctccaattggttacaccctacgcaaatgaaggattgacctgtgaccaatcagacactgaagtggaggcttggtttgagaccaatcagaggctgaagtggaggcttggcctgtgaccaatcagaagctgaagtggaggttggcctgcaaccaatcagaggctgaagtggaggcttgggccacaaccagtcagaggcatttctcgttcgtgaggtaggggaggagggttttgtagaggtcaggaactctggtcccttttcacctgggcatggagaggtggggttttccttttggtccaattccaagaagtcagccaatttgtcctcaggctccctgtctcccaaccctattctcctgcctcattatgacctccatgatgggtttgaggatgtggtgtatggagtcaaactacagggtttgattgcaatattgtcttggattgttacttgggaagagatcagtaccatatttgtttttaattggaaaagtctttttcttccaatgtctttatttgagcaagggacaattcttgagcttacatagaggtttttccttgcccagtgaactcaccagaaggaaaagtagagtgacattgtttttctgaccatggataccatactctttcattcatttatcttccatagttggtccacctggtaccccatggacaggaataaaaactaattcaggtttgttcatgctatcagatgttgacataagcaataattatattgtttagctgacatgaccaaggtttgggaaactggtgcaagggtggtgtcaggtttgtgtttaacctatgaagaaaagagtgaggttaatatgaaagaggcagcatttgaaagaaagcccacagtggaggatcagagagagaataggatagattgagacaagtaatctccagtcagcttctcaataaatgggaggttttgttgaaaaagatcccccctctactcccctccccacaccagggaggaaagaaacttaaagggggaaaatagatgaaagcaaagttttttatctgtgatcttgaggaaagctgtttgctttgtggtgtcatcttgcttctagagccttggctctgaaatccttactatgaggtcacctgtagggatggtcttccagttgtcctgagagtgatgactggctccaccttgatgtggctcacataaattcagaaagtatgatagcagtgtaggtggttagcagcacctcataaggtccttcctagcaaggtaacagtacaagctttttctaaaaatcttgatgtatacctgatctcctggttgaaagagttggcttgatggattttttcctataagttctttttatgtctagatttttatgttccacttgacctgatgattgaggatggtatgaagtaagaagttttaatgagtaatccagagattttgtgagtgagtggtttatttctactaaaaaatgagttccttggtctgattcaatctataaagaaatgccaaaatgaggaataacctcagtcgttaatttctttaccactatcatggtgttgcatgaacctggcagatggcggttttagtgagccgagatcatgccactacactccatcctgggtgacagagtgagactctgtcacaaaaaaaaaaaaaaaggcattacaatggagggattggttaataagacctgtgtataggtggtctgctactgtgttgcgaggtgctgtgtcttattaagtcataagagaatggacacagaatgggagaatggggaacgtggaggtaaaggagggaacctaatgtaagaatactgaatttgccaattaaggcaccagctgtgactacttcatacaggaatggggacatgcctgatgccatagggtctaattgacttgagaatgtgaaaggaaaataaaaactcagaaccccaattcatcatgccaaaaggaaaaaaaaattaagctgaaatgtgagttgtgcaagaaactgccttttctcttgttcctaagcagatagctagagataaaatgttaactccacaggtagttactctgtgttcaccttatcttatgtaaagtgcagatttactgagcactggatgaatacataattgactattcccctacctacttcttttcccttgcaacatgtggattatcataccctccttctttccccgccggcctgcttttcccctttaaataccgaggccctcaaa

SEQ ID NO: 11522 - DNA, 6000 bp, Homo sapiens
gtctctgtgctgggatcctcaaagtgctgggcttacaggtgggagccactacgcccagccctggatttgcctattctgacatttcatataaatggaatcatacgatatgtacccttttgtttctggtttctttcacttagcataatgtgttcaaggtgcatccatattgtagcatgtatcaatacttcattttttatggctgaataatattccattgtatcacattttgtttatcctttagccagttgacggacatttgggttgtttctacttttttggctattatgaataatgctgctatgaacatttgtgtataagcgtttgtgtgtgaacatacatcttcggttcacttgggtatatatttaggagctaaactgctggatcatacagtaactctatgtttaactttttgaggaactattctaaagcagctgcactattttacattctaacagcaatgtatgagggttctgttttttctacattttcatcaacatttgttcttttctgggtttttttgcttgtttgtgttatagccatcctagtgagtgtgaggtggtgtctcattgtattctattttttatgttcattttaacataaatgtagcatactgctcacatactataaacccttttcatttaacaatatattgtggagatcttgtcgatatatacagaacttactctcttttttctggctttatggtaattcactgtctgaatgcaccatcttttatttaaccagttctctactgatgggctgttttttccagtctttcattatcacaaacagtgctgcaacagtgctacctttaaacactccattctctacatgtggaaggataaatcctaaaagtggaattctgggctaaagggcatgtgtatgcttttatttttatagacattgccaaatggtagtcagtggtcttttttaacacctcaatggtcttgaggtgtttaaaaaacaagtgggggtcagggtaacaattactgacaaattgatttccatactgaatgtaccagtttatacttaccagaaatgtaagtacatgttatttaaatgaacacttgatgataagatcaaatttgtgaaaatacttgtgttcttagtatggtactcttgtgtgggttgacttcagaatcacttctttttaggggctttgggggaagggcagcttataaaaagctttccttggttgcagctccaaggaggaggtagcacctgaaaacggcttctcttggcgcccttatctacatttccttgatgaaacaatgggtactcactgaagatgctgggtaaaatattcattcatttattccttcagtcaacaaatatttatcaaaagcctactatttggtgctagctgctggagatggaatggaaacaaaatcagaccaaacactcctttcactgacattttcaggcttttgaaaggacacagacattaatacaactaagggtaaagtaacacactgggaaagaaatgcctatcatgccactggagcccggaacagggtccgagggtcagcaagggtgaccagaggaaatatgtttgaattgagatatgaaagatgagtaaaagactaggtgaagaaagtctcttcttcctctggaagaaaaagcatagttaacaaataaagaaggctgggtatggtggctcacacctgtaatcccagcactttgtgaggctgaggcacgtggatcacttgaggtcaggagtttgagaccagtcagggcagcatagagagaccccatctctacaaaaaaaaaagaaagaaaagcaagaaaagaaaggaaagaaagggaagaaagggagaaagaaagaaaaagaaagaaagaaagaaagagaaagaaagaaagaaaaagaaagaaagaaagaaaggaaagaaaaggaaaagaaaagaaaagaattagctggtgtggtggtggcaaagaaagaaaaaagaaagaattagctgggtgtggtggtgtgtaactgtagtcccagctacttaggaggctgaggtggtaggatagcttgagcccagaaagtcaaggctgcagtgagcagtgatcgtgccactgtactccagcctggaaaacaaagtgagaccctttctcaacaacaacaacaaataaagaagagaggcaataatacctacctcatagcatcgttagaaaaattaaataatacatgtaatgcatttagcaaaatgttcagcacgtatcagttacttgaagaatgcttattttgtttccactctttctttcttcttttttttttttttgagatggagtttccctcttgttgcccaggctggagtgcaatggtctgatcgcagctcagtgcaacctctgcctgccaggttcaggtgattctcctgcctcggcctcccaagtagttgggattaaaggcatgcgccaccatgcctggctaattttgtatttttagtagagaatgttggtccatgttggtcaggctggtctcgaactcctgacctcaggtgatctgcccgcctcagcctctcaaagtgctgggattacaggtgtgagccaccatgcccagctcttttttttttttttttttaaataaccatagtgaatgttaaaatcccagttccccaagcaaaacattaccaccctacttatgtacttacttctaaactctaccccacactgccttgggttgttagttatcttatcttattcaggtcttgtttactcaaccaggtgacaagcttatttagaacaagaatctggctttatactttttagcaaaataatagctactatttgttgagcatatatgacatactctttatgggcattatttccaaccctcacaacaaccctgttttacagattattttcctcattttacagataaggaaactaaagttcaaaggggtcagttagcctggccaaggtgttgaaggcaggactaaatcctgatgcaggtagctacatttgtagctgacagaatggtaaagcatagagctgccctcacccaaacccttcttatttccaactggcatgacctttagacaatggcagggaatatggggagaaagaattgttggagaggtgcccatcccttcttccagctgtgtgaagtataaatttagaactcaaactaagtagaactcaaatggtcattgtagaattcctgcattcattcagcaagcctaggctgctaatgagcaaaacccctcactgggagttttgtagttgatgatacagataatgttaagattcatagaatgttttttatgtgccaggcattgttctaagcgctttatatggattaattcatttaatatcaggttaagactgttatgatctcacagaacagctgaggaaacagaactacaagaaggttaaagggttcgcccaaggccttcacctggcaaagtagtggcgtttggatctggcagtgatttcgcagcttgagacctatttaataacagtgtgagagaagggtcacacagtcaagcaaaaaaacagacgaaactctggtatagcgaaggaccaaaagttctgcgggctgagcaggaaagttggctccaaatgtctgcctgcctgccagcagacctccagccccaaccttctgctttcccggcttccccaccccctcattcccgacagaccacagccagccagccaggaaaggaggggaaaggtcgcagtggggatggctcctcccttcccgtcttagagcccttcttaagcagagcccgccgagctcgctgagatgtggaaagtcacagggttctttcccatccggcacgggcacttgacccgggtacacggaaccgccagttctaaagccaccagcggccttcccttccacggcgtgtacaccccttcccgggggtcctccccattcccagtgtctctccgggactctactttctgagatcccccgttgcgtgctctcaagacagaccgcacagtcttggctgggtgggttcgggggtgattagtaaggcagcctagccccccaaatctggacataaggctggtctgtgacctcctggctctttagttcaagccgaaagcacccttaaaaatcatctagcggccgggcgcggtggctcacgcctgtagccccagcactttgggaggcagaggtgggaggatggcttgagatcaggagttcgagaccagcctgggcaacatagcgagactgtctctatttaaaaaaaaaaaagaagaagaagaagaaaaatcatctagtggccaatgtcttcattacagatgagaaaaccgaggcccatttaaataccaagtgacttgcccatatgcagttaggatcccacaccagggccaggagtatttcacgttttctgaagcgacacgacaaactctcatagaaagcagagcttgcagagcttaatatgttgcacaagggcctcaccattccagagataccgatggcaactgaaactcgggatttggaatcttggtacagctatgaagtgaaacaaaaccagctcttcagtccttgaaatgaagaaaataacgagtggggtaggggtctggtgccctctgacaatttagtgcacccgaaatctctggggaagaacccacccttcacggcggggcttcacggacacgaaggccatcggtgtttttcacctactggggagaagggatatgtgctctctgactccttcaaatgttttctacagcagagatggcagtcgagattaatacacacgcctcgtctcactccagaacacaatgactcaaaaccgcacgacgtgtacttttggaaacagctccgcgggagagcacccgggacaatccccaaaccccgttgcccgcggggtggggccgcggacgtgcgccacgtcgtgtgcgtcccgggcgtgcgtgcggcctccagtgcgcgtgcgcgtaccctcctggggcgtgctcgcggctataaggggcggaggctgggcggcgttgctctgcgctctgcggctgacggcgcttttgtctccggtgagttttgtggcgggaagcttctgcgctggtgcttagtaaccgactttcctccggactcctgcacgacctgctcctacagccggcgatccactcccggctgttcccccggaggtgagcggccctgtgggcttccccggctccccacccccatcgctagagtgctcgccgcgctagcagcctcgcgttccagggctgggggtgcgccgccgggatcctctctgatcgcccacgccccatctggggtccccattcagccgtcagccctgttttgtcctaaggtggtcctaactaggatccacgtggcccatcccacgcccacaggtgctgagttaggcatccctgccatgccctcccagagcaccttcacgatctccttgctgtcccaacacttagcgtgttgcgtgttaactaccctttgtctataaggtttgcaatgtggccctagtatcttccagggtacctaacacattgcagatattcatggtatgtttgttaaataaatgaacttgatagatttgaccctcatagagttatttggacttgcaaaaagtttgtagttaactccaatctgtgatgtgggagagacttctaggcaggttcctttctccagggcatgttcttatatttcccattacccaccacccccctgcaaaaggactgggcctatttcaggaaggtgactgatgcctgcactgtagcacaggggttgtgtattgtgccttgcaggaacaaaattttcaataaagtaaatgtttgtttgtttgtttttgagacggagttttgcttttgttgccgaggctggagtgcaatggcgcgatcttggctcactgcaacctctgcctcccgggttcaagcaattctgcctcagcctcccgagtagctgggattacaggcatgtgccactatgcccggctaatttttgtatttgtagtagagacagggtttcaccatgttggtcaggctggtctcgaattcctgacctcaggtgatccacccgcctcggcctcccagagcgctgggattacaggt

SEQ ID NO: 11523 - DNA, 6000 bp, Homo sapiens
atactcagcagcagtaaatgttttcaggcattgggtaacactatcgctgctatgagagaaaagagttgaaaacatctgtgatgccaaacttcgtggaaaagaaaaaaaataacaaagcattgtttgtcacactgtcactaaacattatccctcagaatcagtcctatttgtatatgaaaacttcaattgcagggtctgaaaaagaaaagctcaggattttctagaataaaaacagatcatctttttaagctaaagaatagaagcttttaaattactctctgggaaggtctgtaggaaaaaataaataattctaggaagaataatgtgtgtattatgaaaccattattaagatttcaaaacagtaagagacaattgaagaacccattgtaagtagtgattgtcatttagcggagatctacttttaacccaggattgttatatttcaaactgaggtcaaggaaaagaaaggtttctttggcatccatcagataaatcagcccaccttttccaaagctcctgctgataaatacggtgcttccctgatttaactcttaaacagtctgtgtgagtagaagatgaaggacaaggcaagatctgctcttggctcattttcccaatataggcaaagccctcaacttcattttcttggttccttgaaaatagaaaaaaaattttaaaaatgttatgactgccatacctggtgggaaatcactggagttgaacttgtcaccctcttaatccacttatgatgatagagtgctgatttgtgcatctaattattgaagcctaattattgctgcagtgaaatcaatgtggcatgttaaatatgcgccacactcccaggaatgagacctgtgcttccccttcttctcatgttagtggtgaccttatttataatcttattcaaacgaaagctttgtcaaagattcaaagtcacccttcacaggcattgagagctcttcagtgtgtgtctgaaggttatatgtaatgaagtttggcttaataagtagaaattactaatttattagagttccttgaggtggaaaagaggaatgtagattaaaaaaaaaatctcatagatgcattttacaaagtatttaaaaagcagttttgaaaatgttccacaccagccggcacggtggctcacgcctgtaatcccagcactttcggaggccgaggcagtctgatcacttgaggtcaggaattcgagaccagcctggccaacacggtgaaacgccgtatctacaaaaaatacaaaaatagctgggcgcagtggcaggtgcctgtaatcccagctacttgggaggctgaggcagtagaactgcttgaacctgggagtcagaggttgcagtgagcccaagatcatgctactgcactccagcctgggcgacggagtgagactccatctcacgaaaaacagacaaacgaaaatgttccacaccaagagttactaatcatataaatgctatattccttgggtggggagtattcttttttttttcctcagaaaacgaactggcttaagagattaaaataaaacactcagaatacacatgatcatttcttgtatggaaacagcaactagaagaagaaaagaattaagttccctggggtcagaatgctgatggattatgtttatcttgttaattatatgatggtgatgagcattatggtttgcattgtcaagaatcactccttaatactctgtttcagaggtcacaggtgtgacccaagaaactgtatttttcagtcttgaccgacaatgttatatttatagcaatttgctatgtgtcacatgctcttttaagaatttcacatgaattacttccattatccctcctaccaaccccgacatgtatgctatacccattttatggtttaagaagctgaggcaaagaaaagttaaacaacttccctaaaatcacagtgaatggcagagttacaagtctatataaagatgtgttctaagtgatgacctagaaaaagaaaatggacataattgatgaccgttggctaaaaatgatgcttccctgtgcaactcctctccaaaaggccttaagtatactgacttctattaaacatagcacttcagtcacacatagactctgttttattgaggtttaagaaaaatattcgtttgccttcattggttatttatttggttgctcattttggaatgtgcagctttattagtaaaagggggcttagtgttcttaatgatgtaaaggaacaaaaaagtaacaaatcactgggttttcctgtctattgctggccagggatctatttctcctcacttttttgctttgatgggtgtgtgtctgtgtgtgtgttccaaaagactcaagcagcttcatgggtttatggaggctcagtagacagaaataatggagtaaaaaaggaaaatgtgaattcattctgaaaagagtgtctaagagaggagagatgacaaaatcagatatttaatgtagtggaacaaatgctgggagaggctgagaacaagacttagcagggctgttttgattttctcacaggtatcttataatcacccagtgatggtgggatgtaagtatggaggttgaaggcagagacacagtattgtaatgctgcattttaggatgacttcaatcaagcaaaatcaactttgtgtcaagtcctgcttggtgatagctatgagttaacaaaaagggcagaaactttcagctacagcatttccatttatcaataaatttacattgctataaaattaatcattggattgtcaactgttacatagatgtttcaaatgaagtgtcttttcttgtcaataggaatagaagcttataaaaacacagggacagtggtttttgctcttgtggatggcctttaatacctagcaaaaccctggacgtcaagaactgaactgaatttaattgactatattatattatatcaatgtatctttaacttgctctttgtctatccctgtgacccaaaaagtgatgtgtccaattctgggctattcaatttaaggtttccacttcttgctctttatttgattgaagttggatgagagaaaataaagcctatgtaatatataatatattgatgttatattcacatacacatatgcttttacaaaagcaagttttggcctaagctacactttagaatcctatcattgtacttttatcaaatgaggttagtatctaaaaataatagatacaattattggcagaaatttctcattaaaataaagaaataaacatcaaaggcaggtctgaacacagaaagtttgcatcctaaatcttttttcatggagatcacaaattccctgaagcatcaaacatatatatattctggagatatatatatatatatatatttttttttttgagagagatatatatatatatatttttgagatatatatatatattttctggatatatatatattttctggatatatatatattctggacatatatatattctggatatatatatcctggacatatatatatatattctggatatatatatcctggacatatatatatatatatattctggatatatatatatatattctggatatatatatcctggacatatatatatatatatatatatatatatatatattctggatatatatatcctggacatatatatatatatatattctggatatatatatattctggatatatatatatattctggatatatatatatatattctggatatatatatatatattctggatatatatatctatatattctggatatatatatcctggacatatatatatatattctagatatatatattctggatatacacatattctgaatatagatatagatacagatatagatatagatatattctgtagtctactgcccattagctgaagaaaacatggtcactggctcatatttaaagtaagagaaaaaaattacttctccttcggatacatttgtcaaagctccaaagaaataaacaatctgtgaatagttcagcacaattatatatttacaaagcatagtggatttagtctaacattttcccacctggaaaaactgggcttaagtatctccgacaaacaaaaagcaatactgcgttcttcccaatatgccatgtcacctttgtagcactcacacacttgcagggaagggactcggggttgggggtggttctgatgtagaaattgcagatggagagctgggctctggggatggaaatggagagaagcgaaaaagagcctggagaaacggctgtcatatttgctcagaagaaccgccaaatcagagagcacagaagatttcattggaggagcgccttcaacagcaactaatcctgtcatactgaaagaaaattgtaaatgttctctccagaaattgtccgcccattgcagctaatcgaacacacacgcacgaatacagacacgctctcctgctgtactaaaggcgccagggcgcaaagacctagggagcgcgcgcgggcacacacacacacacacacacacacacagacacacacacactcacacactccaggctgcgggttggccagagcctggaaatcgcagatttcaccaggaaatcgccgaggtacccgaataggtgttgcctcccaaaactaattcctacttccccaagcactttggtgaagaaatgaatccagcccagctcgccgaggcatccaggtctccattctattttggtctccaggctcttcgtgaaagccaggtttgaaagtcttgtttgcttctcctttagtggtttggcgtggagggcgggggcagcgtcaatttaactccagtctaaaccacgaacaggtcacagactagccaagtggctgagacgagtgtggggtgcgtgactctgcctgcgcgcgcgccagccccgcagctctcgccagagccttggggtcggttctctcccgcctctcccgcctctcccgccccacccctacagtgtctcggcatcaactaatcttttccttttcttttgcaagatcaagggagaaagagaaccggcagctggcctcggactctaagcggtgcgcagctccagcccgagcggatcggccctgaacccacaaaggactcctcgctccttcaagcctccaccacctcgcagccggggaggcaactggagcgaaaccagcgacaggtaagggccccgcgctgtgcagctctccgcttacccactccaagggccctggcaccagggggtctctcccttcatatccccccaagccggaggctcaggggtcggggcttgggggaattggagggaggtcctccccacgtgcagattctcaaacggaaactttggatcctggggcttggagggttgcgagcagtgatggcgggtctgaaaggaaggggcaaacgaggcacagcgcgaggcgaggtacccctacgattccgacggtcactgagtccagccgaatgtggcgaaagcagcctgggagctgcgctgtcccggcgtcgctccctattccagccccccattccctctactgttgctgacccccctcccgccacccactccagatgcagccatggacaagacaaggagagcttcgtccctcccgcccctcgggttccttcctgctggggtctgaccgcgtcttctgtgcgtgtgggatggaggcccggctcgctcgggctccgagctgtcccccggctccgctttcggagcagcccttgggcgctggagaggtttcccattgcggtctccaggtcatggccaaggaggagaagcaattagaatgggggaaagggtcccaagacaaaggagagggaagcattctgcaatcccatcctatttgagccccgcgcaggagctggactgtccgccgtggctgggggacaaggtctcagcccgaagctcatgaggtaccagacagtgcctgggcttcgccacctaactcacaatgggtcctgaaccgcccgggcagtccccggggtcgtagactggggaccgctgcacccctccccgcccg

SEQ ID NO: 11524 - DNA, 6000 bp, Homo sapiens
gcattttggaaacacacatctttgggcccagctgttccacttttaagaatgtcgcttgagatagcctcatgcaagggcacaataatatatacaaggatgtccactgaagcctcattagaagttgagaaaacttggaaacaactcgaatgctgtttagcagaggataggctaaacaaattacaacacgtctgtacagtggactgaagcagcaaacggcgttatgtctctaaatatgaacaggaaacatattcattatacaataagtgagaaagaccagttgcaggatggcacaggtatgatgatcttgtttccataaaaactaaaaatatacatatgcctgtgcatgcatggaaaaatacaagaggataggaattaatttgtgaccagagtttgtcagtgggagttgggattataggatattttctgtacagttgtgtagagttgattttttcttttctttctttttcttttccttttcttttttttttttttttttgagacagagtcttgccgtatcatccaggctgaagtgcaatggcgtgatcttggctcactgcaccctctgcctcctgggttcaaatgattctcctgcctcagcctccaaagtagctgggattacaggcacctgccatcatgcctggcaaatttttgtatttttagtagagacagggttttgccatgttggtcagctggtcttgaactcctaacctctggtgatccacctgcctcggcctcccaaaatgctgcgattacagacatgagccactgcgcccagcctgagttgatttttttttaatagacatattagtaaaagaaaaatatacagaaaatagtgaaattacgggaaatatggcaactgtctgaccttcatcctagaaaaaccctgatcagtgtccctgtattgcatcacaggtaccaaaattgtaatacatccttcatcatgctactgtcccagtaaaaaccccgagcatctctcatttcttcccttccactccatcctggctaatttactgtccacaattcacagagtattgtctccactctgcgcagccacagaatgggtgtggtaacgtctccatggcatttatggtttctacaaatcacaaatcacatatgaagggctccaagaatattagaggaatgagccagttaactcagcgcccatgggggagctggcaactccccaagaaagctggacatctccaagctggccaccaacattctatagcctctccatgagcagggtgggagctgtgctgggtgcacagtgccatgtccacaggttgatgtgaggggcacgttctaaatcaagtgcctgagaagggcttcggagacctagatcctatccctaaacaactatgggacagtgtaccggtcactttccctttctgggtttctgttttcacctctgtaaaaaagagtaaggcttggtcagtgtttctcaaagcactctccttggaaaactacatctgggatatgttataaatgtccctgaagaggcctttgtggtaaaatacacttgagaaatgcagctctctgcatcgtgctcttggagatttccaatgcatattagcaggttagagtctctgaggtctggcagtaaataaacttacttatcaatgcttataccagcaattctcatgtttatttcaccttggcatcctttaagatattttttttctgagcatcttggttatacatacactgagttaagtgttatccacagtcactgctcgctccctgaatccgtgaccacgatgagtcaccctccatgccaccccctccatgctgccgggccatcatcctgcagtgttcctgtggctgaacatggattatttcaggtgacccctggaaaaaacgaagctctgttttgtgagagagaatgggttagcctctcagtacagatcccgatggaatgggatgaaggagaggtagcctactgaaaaaggagaggggtggggagtctaaaagggcttgaaatgcagccaggagcagccagatggggtggtgcagttgggggacactaagtaggagtgacatggagggacactaataagcagggaactacagaggaataattttcataatacgtctgttaaaaacagggaggcagggcaaatggtcagaaggaaaggaaggttcttggcacctgtgcggttcactatcttatttgtggctgtaactcatctcttcccctggatttaaataccaaatttatgttgatggcttccacgtttgaatataatctttcgaggaagagcatgggctttagagtcatacagcccatgcctcagtttcttcctctgtaacttggggctaaccataagatttacccgctaggtgtgtgtatgaggattaaatgagttgacacataggaaagctcctagaataactagtgtgtagtaagcactcaaatgacatgatcatgatcaattgttattattcatattttcagccatcagtgctctctggctcgacacctccactcagatgtctccagggcatctcaggcttaacaaaactgaatcagaattcttgattttcccaacaatacctcacctttcccagactccctgtttcaatgaatggcacctgatatacctgtagctcaagtttggaacctgagggtcaggtgtggtcctcctttccccttccctttcatatgcaccccaccaggaacttctgcagagcatgaacccacccccaaaatatatttcaagtccatctacttcttcccacctccctctctcctctagccaagcatcccttctctctgggtgaaggcagcagccttctgtgtgccctccctgtcttttctctcactcctttccagggaatctgcacctgtgaccacagccttctgtaacaaatgtacctgtgaccatcctaagacctgtgggggcacagaaaaggaagcccatagctacccctgctggcttttggtgtccatttgcatgaagtgtctttttccacccctttactttaagtttacatgagtccttatgtgtcaggtgagtctcctgaaggcagcagatagttagttggtgagttcttatccattctgcagttctgtatcttttaagtgcagcatttaggccatttacattcagtgttaatattgaaatgtgaggtaccattgcattcatcgggctctttgttgcctgtgtacttctttgtttgttttttgcttttgttttttaacttgtatttttgttttataggtcctgtgtgatttatgctttaaagaggttctgttttgatgtgtttccaggatttgtttcaagatttagaactccttttaccagttcttgtagtggtggcttggtaatgacgaattctctcaggatttgtttgtctgaaaatgactgtatctttccttcatatatggtgcttagtttcactggatacaaaattcttggctgataattggtttgttgaggagccggaagacagggccccaatcccttccagcttgtaggttttctgctgagaaatctgctgttcatctgattggttttcctttacaggttacctggttcttctgtctcacagctcttaagattctttcctttgtctcaactctggataacctgatgacaatgtgctgaggcaaagatctttttacaatgaatttcccatgtgttctttgtacttcttgtatttggatgtctaggtctctagatggctgcagaagttttccttgattcttcccccaaatatgttttccaagcttttagaattctcttcttcctcaggaacaccaattattcttaggtttggtcatttaacataatcccagacttcttggaggctttgttcatattttcttattcttttttctttgtctttgttgaattgggttaatttgaagaccttgtctttgagctctgattttctttcttctacttgttcaattctattgctgagactttccagagcatttcacatttctaaaagtgtgtccaaagtttcctgaattttcaattattttttctttaagctatttcattgaatatttctcccattcaatattgggggattgtgttgggagaggagggtctccctttcccacttccgcaaatggggcactcacagtatttggagtgtcttctgggtcctgcaggagcagtctggttccttcagagagtctgtgggtccttttgggattgctggttttttcttgcagttgatctggagctaaaattcaccatggaagcctccagatgctgctctgtctgaagctgcaatctagtcctgccacccagccactatgatcccctccatctctctgtccactttagtcagataagctcaaagctagaacaaaggacccatatatgagcctacggatctgccttcaaacacttgagaagccctccaactcaccatgagaacactgaccccaatcgggatctttgctttgctccaacagccagacactcagacaggtcctcagacccagcaactaatggacttggtgggatggttgtcctcaaagcagccagcattttgatcaggctggcgtctggtcctgtatttttctgggatattcagaatctcttgacatgtatcttcacttaattgtgaatttaaaaaattatagatggatgtagatatagatatagatatagacatagagatagatatagatagacattttggagaagagtctctctttgaagacttcctctcagagtacaagtccgtggttacaaccattttgtttctcagcaaacatggggaagtttgcttttcttctctgaggaagttaatataaatgtttattgacagtgcagtcatcaaggaataaagttgctgattcattcctttacactgaaaccctttgttgtgccctcctcttccttcctctttatagggagacactctgagaaagagcacattgtgggggcccactccatgtgatgtttgcttggttgcctgttcccttttctacctgcagagcacggttcccataagggcggcgagatcagcctcctgtctcatctggaagaccaccactctggggtctcagaggaatgatggaagccttggggtttctaaaattggaagtgaatggccccatggtgacggtggccctgtcagtggctctcttggccctcctgaaatggtaagtgcagccagccctagggactgtgacagcgtcagccgtctcaccctggagccttgctggtgccatggcggggtatgtgggagtgtgtttttcttcttttctaatctagcgggagtgagtattaacacagcttcagaattaaaagcaaacagccaggttaatcttttgctaaaatgcatgagattgaagtgtcaggaaaggctggtgattcagtgactgagaacgctacacataattaagtttgaaagagatggaaaaagaaacaaattggaaaggcattaggtttgggtagaagcatttccttgaaccccgtcatatctcctcacctcatttttctaaaatcctctgtccttgttggatttacagtgaattcagcctcttggttcatattacattcaaaacaaaacaagacgtaggagctgtttggcaaatgtgggcctctttgcaggaagtcattgagggggatttctgtagggttaaggacaaagtggtagatctaatttctcatagttgatagagggagatggattctgatgaacatagtgtgtgcagctcctacaaaatttgagaccctgaaaggatctcaaacttgaactccgagttgctcccctgtggttttgttaattcaacagcaaattttcctaaggctgactctggtgtctgtaggtcgaaggcctcataatatgctacatttatgcatattcgccctgtcagttaaacttattagagttacccattcaatcaaaagcacctggatttagatggctctggcttttgagggcaaagtgagtggaaaaaataatggaggactggagtccgaacagaattttaatttatgttttcagtagtaataaagccttctctagatt

SEQ ID NO: 11525 - DNA, 6000 bp, Homo sapiens
tgatttctttcctgtccctcccagcatgtgtattctctgtccagtagcatttgctggtgctgtcttctctttagcatcgtagccatttgacttctctctgctatgaggtcatggaggaatcacgctcatctatatttcagtgcaggcttgaccagactgcctggctttgcattctgggtttgcctctcattagttacatgacctggggcaagtcgcctttgtgcctcaggtttctcatctgtaaaactgggataataacagtaccgactgcatagcgtagttaccaggaggaagtgaaataatgcatggaaatcatttagcatagaacataggccacagtacgcactctgtagatgttgttactgttattctcatagtgccttgtttgtagtacacacataatgactgtatattgatggaattgtgtggaggaagtggttattgctatattttctgtggccggaagtgaggaggcagccccagggctaatgcttgatccagaggtggggtcacaatggttagggtaagggtggtggctggggatggagaaaaggatttttttttttttttgagacagaatctcactctgttgcccaggctggagtagtacaatggcacaatctcggctcactgcaccctccgcctcccaggttcaagcaattctcctgcctcagcctcctgagtagctgggattataggcacgcgctaccatgcccagctaatttttgtatttttagtagagacggggtttcactatgttggtcaggctgatctcaaactcctgacctcatgatccgcctgcctcagcctcccaaagtgttgggattacaggcgtgagccaccacacctggccgagaaaaggagatattttaatcacattccaatcctcacgtttgcatagtcttcgaggctcccaagtagacatgcttttctaatatctccaagcctagataaggccatgtcaccagacagcaagccactccaggcaccacaatgattataccttggtctggcctgaaccatgtttttaaatccagggacttggagctaagcctttaaactgctacagtcaggcaacatcatagatgttgtgcagggtaggtgttcaataatttttcctttgtaaacatgaatgactgcctgctatgttcggaattctgatttggggtcgaatgagagattggcatatttgaatgggccttggattggggattcagggtctgagctcttgtcacaactgtggcagatgcaaactgatcatattaattgtaactgacacttactgagtatttactaagtaacatcaagtcttttactcacattattttgtctagtttataaatttattgataggtagtattttaatcttcatttaagttacagaatcagagacttagttgcttaagctcccccagttaataagcagacctgggctttgcaattcaggcctgccctgttcggatctggaactctgagtcaccacccacacaaacctcctattcctgggtctcaatttcctcttctgtaaaataaggaggctatgcttagtgatttttaaagttctttaagggcgataccaaacaactcaagtcacatgtcttaggagcttgatggatgtgcatttgggtggcagtttagacatttgctgccttggggccattgtgaacatcagtgagatcatgtaggtgaaggtcttgtttttatttatttatttttattgaggcaggctctcactctgttacccaagctgggctgcagtgacatgatcatagctcactgcagccttgacccccaggctcaggtgatactcccacttcagcttcccaagtagctgggactacaggtgtggaccaccacactcagctgattttttttattttttgtagagacatgttctccttatgttgcccaggctggccttgaactcctgggctcaagtgatcttctcgtcttggcctcccaaagtgctaggattacatgtatgagccactgcttcagacccaaggtcttggcactcggccagcctccatgcatgccagttttcctttctttcctcttttagctgtaaattctttgattctatgatgccaaagaaacacggtaagtcagtgttaccacggtggttgttgttcactgatggttcatgaaatcagaaaagtaaggataaggaagtaaactttcaaagagataaattgattcaattttgattatctgtctatgtctactgtgaaacgactgtgataagagatagtgatttttgtttgtattttccagatgatatacatggtttataaatttaggtctcttggcccagatttttttctgaattttcactagcccataaagacaaatgcctagaaatagcagtagctgagcaggactttttaaactatgtgtggtaaaacagcaattgttttaaaattgtccaatatatcacagactgtggcttttgtaaaattaaaactaaattacttgaaaaataaattttaaaaaagcatatacagatacaagctccattttttaattatcaagatcaatgacatgaaatgattctgtcaaattgtaatgcaagtctctcaacacttaccttcaatttctgtgcttatttttctggaagctggcaaccacaggttcacagataactcttggagtatcacagagcggggaactctgccccacttggaggaaggtccacttagtaacagagcaaagttcttaacctggggtttgtagatataattctgaaagcctgtgaacttggagggggaaaatatttacatatcttttctttgctaaattctaattgaaatttagagttaggctgcaaactacagtggtgttagtagtacctatgaatttggtttcaagagaggtcacagttactttcacatcatatatttaaaacaatctcaagatattgtttacgcttatcatgtttttgaaattgcaatcgctattagacatatcgctttattgttagtatgtcattaaagaggcacaaactataatttaaaaaatattatagtaactgtgtttcaatgtaattgattttctttgtatctcagctcactacaacctccgcctcctgggttcaagtgattctcttgccgcagcctcatgagtagctgggattacaggcacgcaccgccatgcccggctaattttcgtacttttagtagagacgcggtttcaccatgttggccaggctggtcttgaactcctggcctcaggtgatctgtccacctcagcctcccaaagtgctgggattacaggcgtgagccactgcacctggcctaagaattaattctaagaggggtttataagcatgtctcagctccataagttcttcttgcccactgccctccaaaaagatcaatgagaacagcaggcattgcagtaaataaagagttgaataatcacagtgttggccaaacaagagcaggcaaaaacttctcaatcccctctccctcaggattcaaaggctaaggtttgtaaagggtactttggtgggcatggggctggggaacttgtataattgattggcagggaatgaaatcacaggagcacctaaaactgtctttgtgcaactgagtcagttcccaggaggggtgtgtgtgttggcctcaagactaggtggtgtctgttggtctactgaaatgctaacaaatatctaaaagaccagttatttaggtttcacaatagtgattgatatggttaggctttgtgtcagaacccaaatcttatcttgaattgtaatccccataatccccatgtgtcaagggagggaccaggtgggatgtgattggatcatgggggcggatccccctatgctgttctcatgatagtgggtgagttctcatgagatctgatggttttgcaaagcagttttccctgctcttgctcactctctctggcctgccgccatgttaagaagtccctgcttccccttccaccatgattgtttcctgaggccttcccacccttgcggaactgagtcaacgaaacctcttttctttataaattacccagtctcaggcatgtctttatagaagtgtgaaaacagaccaatacagtgatgttatctttggtagttggggaagttatgaattttgtgacactggttgtgtgactggggcagtaagcaacttatagaaaaacaaactaagccatggcaggacattgtttatgcctattctttagcaaagtctaagcccctaccataattccaaccttgccttatgaatgcgcctttaagctccaggcaaggagggggatcattttcccttgactccaagtttaactataaactaaatccctctcataggtttcttggcctttgtactagaataagcaaaaagccaaccaaaaaaaaaaaaaatcccctagaaaacataatttagcctgggaggttagaagcaagatggagtcagtcttgttagatttctcttatttatagttctgcaaaggcagttcaagagtcaccagactgttaaaggatttccatactgcaaacaagcttaaggacaccttaaagaagaaagaagaaaactatttttaaaacatttttaaaacaacttccttccatcacaatcatcagattgtgctactaaacgtcagtgagttcctgagagattcggagtcagtgcaagagaccagggctcttttggaatactggggtcatttattttttgctctttatcatctacaaattgtgtctgtgttctcttaccagacatacagggtgtcctcaccaccgattaaacattcagtgcctggaggggatggagtgggtcatgggagctggcttttccttccaaaagtcttaaggatgtccttcttagagcaagaccacgattactaattaactaaaaattctgatcctggaaataaaagctggccattcatttgcatttgaaagccattaacattttcttgataggtcggtaaatagttaccagatctttggttgctttggtggactgtgctcctctgcttttattgctaagccatccttcagacagagagggagcggctgcaagaggtaatgaggtatgtttgtgaaccttgtattcttttacggttacagatgtgtgtctacaagtgtgtgtgaatttgagttgatctcttttagtcaaaatgcccttgttggccgggtgcagtggctcacacttgtaatcccagcactttgggaggccgaggcgggtggatcacgagatcaggagatcgagaccatggtgaaaccccatctctactaaaaaaatacaaaaaattagccgggcatggtggcgggcgcctgtagtcccagctactcggagaggctaaggcaggagaatggcgtgaacctgggaggtagagcttgcagtgagccgagatcacgccactgcactccagcctgggtcgtagagcgatactccgtctcaaaaaaaaaaaaaaagcccttgttaatttgttaaacacaaagataaacaacaccaataataaatcaaaaattatgcacatgcatacacatggaacaaaattctcatttatctttttttcttagtgtgtgtatatttttctgaactaaggctggatctataagcctgattgtagtgaaacctgtgtgtttgtgtgtgtttctgtgtgaggtgtgatgaattatttaatacttaggttgaggtagcaggcagaaattctttcagattctggaaatgaagtgagagaaatgaataaaaggagttagaatttgggagtgagattagagcattttccctctgaaaggatttggagttgtgattgagaaaatgtaactgaagaaccaattataatcagaaaattgagaaatatatcactatgcttatgggtttggtgcctctgttgattaaatacagaataattttaggggatagtctgaggatgtgtgtaaaatattgggatgcatttatgagttggtgtgcattggtgggtaggagaggtttcctgtggaatgtgggaggaggtcataaagagaaaggtagggta

SEQ ID NO: 11526 - DNA, 6000 bp, Homo sapiens
accgggaattctaaatttaagtttaggattccctggctaattttcatatttttagtagagacagggtttcaccatgttggccaggctggtctcaaactcctggcttcaggtgatccaccctcctcagcctcccaaagcgctgggattacaggcgtgagccaccacgccctgcctgactgttatgtttgtcttccccccgccactgtccctttttatctcaaccttttaatatagcttccacatctgcttttaactcattaagaatataaagtgaagactttttctttgaactcttacatcttcattccttttctactttgcttcagattgttaaaagatctcaagtgctgtcgttgctgtttactcattcttcatgttgactagctccactttgtcggtggtgctttaagttctgatgggatagattctcagaatccatttgaatgtagagagagacgtatactataagacaagagaatatgggaaccaggaaatgtgtcagccacatctacaagtagaaggcagatctcatagaaatgcaggccaccctttcagtttaggaaatgcaaatgttttcagagagcactatctggaggcgcagctccagaaatagactgcattctactggaagagccgaccaggggaccatctgctccacatcatagatcatcccatctcctatatgcacctgaatggaaaagatacaaaccaggaaaggagcaaagaatggtgtggagtgttgatcacttctgctctgcatatgaggactgccctgcccaaaatcttattaaaatctagaatgttttcaagtcctattgtttgtatgggtaactgcaaaggatttgttatttttcttttgagatcatgtcatggttattttagaaagaggacactcctagcatttcccttcactccactaacttcctggggaccatctttgagcattaaacctatgtaaagacagtggtctgggggaaagtaccagcaagtatatcctataaaaaggagatagagatctctgttgattgcagggaaaaatgtagattaccgtgatcattttatttcatttgtggcagaggctgctgttcccctggctaacacgctttctttcttcctctcttaggtttaacagctttaatttcattttgtgcagcatgtattttgcaggtttcaagcaggtaggggtggtcacgtgacactgtcctggccaataatacatatgaagtcactgaatggatcttccagaaaggttctttgaacagtgctaattcagctggatgtagcgttttaatcctgttcccttctttttcttgcctgaaatttgtagacctcatagctggagctctggctaaaatgttgacaatctgagaacaagtcctcatcctaaagttggagtcttgttgacttgggaccttcatcgtatttctgtgttatctaatttgtttaaaccactgttgtacaactttgctgttacatatagctgaagtcaacccctaactgagagaaaagccatcctctttctcttggaggcactaatatctctgaataccttgttattattgcatggttaaagtaatatcaaagtgtaggactatgatgggtaaactttaataccaccatgaagggtatccattacccttggtctacaaatcagttgcaatctaggtttgactttcaaacaaaccagtaacataggagaatttttgaacattctagaagtttctgaacagaaaacaataaaagctttagttgtacaaatgggcatttaacacttccattggtaaagtgtttggagactagactccagcttttaggaagtgcaactgcacctagaggccacaaagcctcaagacagttcagtgaagggcctgagccctgtgaggtcatgcattgggagctataactaatgttttggaataagagataggggactcagaagactcctttatggctttttactagaattcttatcagtgaaattatttgtaaagctctttgtttatgacaacatcagcttacattagctgttctaaggggaaataaggaagaagaaaattgcacatcctaggggagtgagcaaagcccaagaaggaggcaaaaactcagaaaaaatgaggcagaaccaatctaggagccttcctatctcacctggagttttctactcagcagttccttttggttccaaatttacataatagattgttgtgtgccagaaatgattaattctgtgagccataaactttattaggtcctgcccattagcaatactccagggttttttttttgaacaagtcaaaaaaaaaaaatatatatatatatacacacatatatatatagaaagaaacagggtctcactctgtcgcccaggctggagtgcagtaggacaatcttggctcactgcaacctccgcctcccgggttcaagcgattctcccaccttggcctcctgagtgtctgggactataggcatgcatcaccatgcctggctaatttttgtattgtttggtagagatgaggtttcaccatgttggccaggctgatctcaaactcctgacctcaagtgatcctctcacctcagcctcccaaagtgctgggattacaggcataagccactgtgcccatccacatagaaaaagtttaaatattattttttattgattcattctataacacttctaagcacctggagtgtcccaggcaccaaacaaattatagcaaaaaatttacattaaactttaaaaaggaattcattactttgctttttaatagctgcaggttgcagcatactttaacaatgcattctatgctctccacctaccattaaaacttggtttgataagacataggcaattaggatgcaaagccgactaatcacaaatttaaacctctttgcatcctgagtatgacacttcctttgaaaactagatgcctctcaaattttattaacaagacaaatataactaattacacaagccttgagcagcaaaaacttcatttcatattatagtcacctaatatgaggtatatcatgaaatagaaaagaaggcagatatttttactgttatgtcaatacaggatacgttgcaaattactacaggaatttctgggttttataaagtaacaactacggtttggttttgtccatatttttattttaacataatctagttatgtgtcttttttttaagttttcaatataaccatagatgtctagcaatcaggcatgttaatgtatgagttacgtaattccacacacaatgcaaattctgtttctttgcagaagtctttgaaagccttggagataaccagaaaatgaaggaagccctccaccactgagtttcagggcaaagggaagaaacaagataaagtagaaccgtcagtacaagtggaattattaatgacgtccaaatgcagtcattaaatactatcagacttatttattgactcctgatattaagagtgaacaaacccctggccaagtgggaacttgctcggtagcctttatctttctatcactcattcagtcaattcattaaagcctgtttgtctctcccaggtgactcttactgagtttcattgttttgtttattgtgtttgttggctcatagatctctttcacaattttcttcggcttctgaatgctctttaagtaccagttttgatcagcccatttgctttaataaacaggagagcaagatgggacagggcgatacagggagaaaagggggcaaagggaatcgcaccgggtgcttgtgctccctagaaaaaccagcaggtggtagcaacacttcgtggcaaggccccagcccagctctgtaggacccaaacaatagaccccaaatccccgtcctcggctagagaaggggttagaggtgggcggaaacacttttcctcgcggcgccccctcggttcctcaaccctgcctccaggcgccagctgagagcaccttgcaccgcccctcctcactgcagggaggttctctccggagcgcgggcgagggaggaggcacccagaggtgcagcgacttgcccaagccatgtcagagccaggcgtacagcagcgcttccccttttcaacccgactgccctgccccttggggagggtagatggagggaggttcgactcagaagccccaacgttgaccaagatccagacacgaaaagagaaaagagttcccggctagcacggcgacgctttcataccgagacgcccccctctcccgctgcctcggctccccctaccaccgcccgtactctcccagatttctcagtttgtctttccctccaccccctgcttttccttccttctctcttgctcagctcacgcccaccttagttcaaagctgagtaggagccccactgttttagttcctagagttaaagccgaagaggagggaggcgcgagggggtgtgtgcagggctctgccctgccctgaactgccacggtccgccagttgcgcttcgctccgcgggtgtccgacccaagccgagcccgagcccgagcccaggcaggagctttacagacagcctcttcccttcccacttcctgcaggcgccccacgcgtgcgatcctcccggccaagacccgcgggaggaggccgcccccttcccggcgcacaggcggggccccgggcgcgccccgcgtctcccccgcgcgccggggcggaggagcgggcgccgcgcactcaccgcctaggccgggagggcgggctcggctccccggaagaagggagtgggaaggcggccaaaggggctgaaggggcgggccgggccggcttgggaggggacgcggagggggcgggccgggctgcgttcgctccagccgcggctctacagcagcgggcggcgggacccgggacccagcttggcgacggcgatctcgacgcgggcccccaggatctcccggcgccccacctctggagcagcccctgccgccagcgtcaggtccaccccggaatcccagggactctcggcgccgaacggacccgggccgggtgcaacggggtccccggactggagaagacgcgggtggcaccgtgcgagctccaggagccccgggtccactgcgaggcctcggggggcgcagacctgcagagactgcggccaacgggaaggtgagcccgcggggttagcaggcggcgttgtgggggtcggggacagtatgcttggggacagaggaattaaggtttgcaagagtagtggggctccccagcccctaggtggcttcctgagggagtactgaggatccttcctcaaggccagagtggggttcatgaagggtgaggaaacggtcaacctggctactcccctctcactccactctgacctggcatcattgacaccgcattacccttgctgttaggatcccccagttgcgttcccagacattctcctctggctctggcttgggagtcctaatctgggagggtcctcgcagagacggagctccacgcttggaacaggattgccacccctctgactccagtggcatcactccaatccccttggagctgggaggagtcaggaggctgaccacacacctgtcccctgctccccacaaggcactgtcccccccagctccatgaccacagttaagccttggaggtggaaggaacgcttggttcctgctgcccagccatcacccccaacgtgcaaccaaattctattgcgtgctcctgccccagctccaccctcgctctgctccctccatctgggtgcttggccctgcttgccccacacccccacccaccgatcttggccgtctggcaccctctctcctcccatccctgggggagctggcatggacccagcatagcaatgttgtaatgtccctggcagcgcccatggagcggagctgctgggtctgttcccagttaacccaggccctccgcccgccaggggaacttgactgaggctctaggaggggagatgctggtcctgagctgagagaccagtgggagggagctgtgtggggctgttagtagaccacagaagctgcccaa

SEQ ID NO: 11527 - DNA, 6000 bp, Homo sapiens
cctgggcgacagagcgagactccgtctcaaaaaaaaaaaataaaaaagaataaggaggcaagccacaataaagaggagaggagacatgaccgccagtggcatacaatacaaagtgtcttcagaggaagttgtagcttagctgaaatttcagaaagtaggtggccacgggttccatggctgcctggatatgcagagggaaagtgatgactgaaaacacctttaaagaacataagggttttactgcccactatgctggggaggccagactggaagacgtgagagtctgaaaacaagggtgtaacccagaaagaaaattctttcacctatacccaacacaaaacttctcctccatgtatcttgcatggcaactttttacgattttccttcaaatagcaattctataagcctatgggcttttaaactttttgtataatggaccctaggatgatctatttaaaaccccaaaagaggccgggtgcagtggcttacacctgtaatcccaacactttgggaggccaaagcgggcagattacctgaggtcaggagttcaagaccagcctggccaacatggtgagaaacccatctctacaaaaatacaaaaattagccgggcatgaccgtaagtgcctgtaatcccagctactcgggaggctgaggtgacagaatcgctcaaacccgggagacggaggttgcagtgagcagagatcgcgccattgcactccagcctgggtgacagtgagacaccatctcaaaaaataaataaataaaataaataaaacccgaaagaatatatatcatttatgcatgcttatgaatttgcttccacattcaggagccttacaggaatccctagaagcccatctttgtgcctccaaataagaacctaagctactaagcccagcgggatgatggagtgaggagtgggcatggtttacattttcttttcttgttctcttgcagggatttaaacccatgggatttaaactattcctaatttcaaacacaggatatttactctcaaacccttgcccaccagcactggcagtctgtacatgtctttgaccctcctaatttcagaatctggttttaagaatcgcagttggtgctttccttctagaccacacgcttccactcagcttggctggatgtgagcacttccctactccactggtctctgccttcaaatctcagagtccatgactaggctgctctgttttagggccctgtctttctcagaaatagtaagaaagtcataattgtatctcatatcttgctgcttatatttatcaagtttctacagcaactgatcactttcaggaaagctatactcctcaaatgggagaatcttgtttctgaagtcctccaaggaatgcagtgttaccttggcactctatttttttgtgtgtgcaacaatgtcttttattatgtatgcggttttaaaattatttcttgaatctctccatacacaggcaaaaaataagtgtgctacttaacatactggaacttgcctaacttaatcattgcccagagaagggaaaattatcaccaaaatgtgcttaaccaggaggccaatgcatctgccaacctccaagaacatggagatgaacttgacagacagactgtccaccatctgaacctttattcaccaccatttgataacccttattcaggcccaaatcagcagcacatttcttgccaacaatcattaagtgtccaagaagactttcgtcattatcttctgctgcagaaatctgggatatatgttttttcgatatcaacagaaaacgtgttggtgcttgaggggaagtgtcatggaaagcaaggcactggtcatcctcaaaaatgattttggctgggatttccttgcagatgatcttcccgaagacagtgttgccaccaggccgagcgacctgagccttggcgatctcacctgccatctctgcctgtctcccacacagcaggcagggtagaggctcagaaggagggaggaacccacagattctattttctttgttaagaaagtaatcctttctgctcataccaatcccatagatgtctatccttattttctgcctgcagaaaaggtgggtatcatcacagaatgtttagtctctcaattcatcacacatttgtaattttttggagagattataggccttgaggtttgtaggattgttgttagagcaggtgttttgtttttttttttttttagctacattggtgtataattgacaactagaaattatacatatttaattactacttgagaccgtgattacagcagttactactgttaccacttgaaaccatcattatgaccgaacaaagggacgaatgtagaaatgaaaacttaagacaaaagaaactgttttaaggaaaggcaacatgaagaagaagagagctccctgcttctagtgagcaaaggcagctcccctgccgagcttctcagcccttcatatttactgggtaacaagaacaagaaggaggtaacgattggtcagctgctgaattgatcacaggttcatattgttactgacaagcttcaattgtacctaatcataagaaacatttgtgcggcctccaacaatgtacaacttgatgtgttgatatatgtgtacattgtgaatgatcatcacaatcaagccggttaacatatccatcacctcacatagttgctttgggggtgcagggaggtgagaacattcaagatctaccctcttagcaaatttcaagtatgtggtattactacctatagttaccatgcacattagatctccaggactttctcatcttgtataagtgaaccttgtatcctttgaccaaatttccccattctcccaccccctactccagcccagcccctggcaactaccctctactttctgcttctatgagtttgactattttagattccacatacaagtgcaatcatgcagtatttttctttctgtgtctgcaatgtttgacttagcgtaatgtcctccaagttcatccatgttgtcacaagtggcaggattttcttctttgtcagggttgaatagtattccattatatatatttatatacacatgacattattcatctgttagtggacacttaggttgtttccatttctaggctattgtgaataatgctgtaatgaacatgggagtgcagatacctctttgagatactgatttcctttcccttggatgtatgggagttgctgagtcatatggcagttctgtttttaccttttgaggaacttttatactgtttttcataatgactataccagtttacattcccaccaacagtgcacaagggttcccttttctctgcattctcactaacatttatctcatctttttatttaatttttttttgagacataatctcactctgtagaccaggatggattgcagtggtgccttcccagctcactgcagcctccacctcccgggcttcagtgatcctcctgtctcagcctcccaagtagctgggactacaggcgtgcaccaccacacatggctgatttttataatttttatagagacagggtctccccatgttgccaggttggtctcgaactgctgggcttaagcattccacccgccttggtcacccacattgctgggattataagcatgaaccataatatccatagccataataatggctatctcttgcttttttgataatagccatcctaacaggtatgaggcgatattgcattatgattttggtttcctgatgattaatgatgttgaggccctagaaaaagtacttttaatgatattggcttccctcctgctttgggtggttccatttagcctaggtcaaaatcacattgtagaccagatgtttggtgtccctaccctgcagtccctgaacttggactgtcctgggacagaccccacttggtaatgcatcctaaactttactttggctcagttcatatcttttctcctacagtgaagagttcatagggaagacatgtcataggaaaattggttttataacgtgatgccaggaagaaaagtttgtccttggccaaaaaagtatttattgacctgaaaagggaagaatagcagagagcacttccccatcatctttcatgtttgtcgggcttgtcatgagaagccctcacccctttcccacctctcccttccctgtgcctctttctactttcgattctcccctgttatctcccttgttatctatctgatggagccagtgtgggcactccacagtccaaatggaagctcagtccctccgggttggcagtgtggctgacacctaacagtctgggaagtgggagaaattctagaacccaaggctattaccgaccctcgacttcccacttcccataagtgttccacacccagtgagtgataaggatgggatcaggggatgcccccaagctgttattagcagcctctggcagacagaagggcaaagagctagagaagaacgctggacatgggatgggctggcagagctggccagacagaaccctgggtggacacagagttgggaacaagctggccaggagatgtggcagagaggcaccagttactttcccaggtgagttaatgtgccagtgtttccagaacttcgagtcgcttcatctttatccagcacccacccctcaccttccgcatcctgaagaagagagatgggcaactggagggcttccatgcagatccggctctacacataggtttgagagcatactcagcagtttctcatcctggtccaggcgatatttatagagggaccagtgacatggagctggaagcctactactggtgactaagaagggggacaatgccactggctcagcagagggaattccctgtggggctgtccctcaggttctcatcccaacccccacccccacactgcactcacacctgcttcgaccccaagcagatcagatgtggcagtggggggtcatgtgacggagaggggtctataaatagctggaggtgggcatgctgccccagacgccttggggacagcaagagcagaggcttaaggagctacactgggggaaggacaggggcaagcaggccaaggcctggccggggctcggggggagggaatatggagcaatcccggtcacagcagcgtgggggtgaacaaagctggtggggtagtgacccccagtaccagtatatgccctttgaacactgcaccagctacggactgccctctgagaatgggggcctccagcacaggctccggaaggatgcaggcccccgccacaacgtccaccccacacaggtaaagtgctctaaggggagaggggagccatggatgaggggagacagtggtgccagagactggtgaaaatgaggaattgggtgaaaagagggagcagtgttacatttttttaacttaaaaaacaagtacgtggtgatgtgttcaaaatatgaaaatctttgaaagtctgggctcacttaagtatgcacttagagagatatgcatgcactttcatacaacctttaccaacagagtacccaaatcatatggggaaacagcagagcctcacatgcatgaatagctcgtgcttacataacctacgtggagtggattgcgtaggagcccacactgcagtgtgctgggagctgtctcccacaccctcacccacaggtagacactgccagatttctgcctctgggaccctctgcagaatacacacaaacatgaatctttctgcagaaggcagaagaaaggaattgggcaagtgtagaaaacagactgaattgcttatcagtgatcaaagatctaccaacgtcaaaatgagcagagatgtacaagcttttaggtcgcaagatgatcaagtaagaacctattaagtgttaggcacctggaaaagggcagagatgtgatcccagcaacagaagcatgcaggctaattaggagtgtctatggatgagcagcctcccgctgtgggattggtgggatatgaacacctaggaaagggggaatggggatgggcacaactaaaggaaag

SEQ ID NO: 11528 - DNA, 6000 bp, Homo sapiens
gagggaaagtgtataggggatgatgctctgatgtcagcttcctgggctgaccctgaagaaagaaggaaacgtgggcatttgtggttgtcagtcccacccctctcttgggggagtggcccttggacagggcaggaggctgctcaaccttggccttgactgcaaaggtctctgggtcttgctgtgtgcttcacccagacctcatcctgatgcgcgcccaacccatccatggttcatcatccaccgtgtctgcagttccctcagggagagattcttttgtactggcatgcaggccagtgggatgagaggggcagtaaatctgggagcaagtgggaagctgcaggccgagtgcacacagtactcagcgcaagggaggtgctccaatatcaggaaaaagatacaacggctctttcatttctctcctttcttttttcagattataaagtaatacatgttcacagggacaaaatacaaaagtataaaagccttctgtcctcctcaatctactccctaacattaactactgttaacaattcttttttatttgtttatttttttgacacacagtcgcattcctcgcccaggatggagtgcagtggcacgatctcgatctcggctcactgcaacctccacctcctggttcaagcaattctcgtagctgggattacaggcgcacaccaccaacccggcttatgtttgtattttttctagagacggggtttctccatgttggccatgcctagtcttgaactcccggcctcaagtgatcctcccacctcagcctcccaaggtggtgagattacaggcatgagccactgcgcctggctgtgctgttaacaattcttgacatcttctggaaatgtgctattttacaaaagcacgtatacatatagcttgcatatacaaaatgtgtgtatgtgttcacatgcagatagatatataaacagacagaatttgatggtgtcatgagacagaaagagaaaatggtagcccacaggtataaagtaggggtgttggggtgaaggcagacttgaaaggggctgttgatggaccaggtaggagggcctgaggagaagtgatggaatacaaggatggaagcaaggatggggcaggagagtcttaatatttgtgttgcaaaaaaattttgcagtttaggaggtgagaaatccaacatccagttagcctcagtttccttaactaaaaaatgggataatgatgtatattcctcacaggtttatagtgatgattagaaggggcgaatatatatataaacaaacatacatatatgtttgtttgttttttggacagagtctcgatctgtcacccaggctggtatgcagtggtgcgattttggctcactgcaacctccgcctcccaggttcaagtgattctcccatcttagcctcctgagtagctgagactacaggcacgtgccaccacgcccagctaatttttgtatttttagtagagatggggtttcactatatcttggccaggttggtcttgaactcctgacctcaggtgatccacccaccttggcctcccaaagtgctgggattacaggcgtgagccactgtgcctggccagggctaatatatttaaagtgcttagcattgcacctcaaacaatattctaagcattctctcagcgtgtgctgctattatagttgttgatgttattagggtgctgctattgttgctgttttcagaatgcttcacgtggtccctggcccgtgagtgaacctctatccatctgcagttggcatatggaaagaacctcctggtcacatttctctttccattttagaaatcattcttttgttgtgacactgtcttttcattttccttccctgactgctcttaacttcctactttatgctgtgcactcttgaagaaaactttctggtacctgatggttataaatccttggaggcgcgtgaagatgttttaggtagtaaagggcagtggccattttctcactttgtctccctggcctggtcttaagctgttgggcattctttagtcaggaacatcttcttatttgctgtacttcacacatactgcctaaggatatcaattagaattgcttacttaagaaaaatgcccagcaatcgttaaggccactcttgttcatttcctgcattttttttttttttttttttgagatggagtctcactctgttgcccaggctggagtgcagtggcgtgatcttggctcactgcaacttccgcctcctgggttcaagcgattcttctcctgcttcagcctccccagtagctgggactacacgctcccgccacctcaccaggctaatttttgtatttttagtagagactgggtttcaccacgttggtcaggcttgtctcaaacttccgacctcaagtgatctgcctgccttggcctccaaagtgctgggattacaggcgtgagccactgcgcccagcccattgtcttcattttaagagcactgactctgctgctcctcttgagacatcttgggcagtgattctgttcttctgggatactctgggtgtttctacttgtatttagaatggctggcttaaaagtctttgtttgaatattccgcattctgaatgctcttagttgtcagtaaaactatgcctgcctacgcactcttctatttctgatttaaaaataggttcagctgcctaacaattacacatactctattttgcacgcgcacattacttaaggagacatttagagggtagatagcttttattcctatgagttatcttgaaatcatcttcttaactatctttttttccccaaaggggccatattttgaaggatttgtgatgagacttttggtctgtgaagcccaagacacaatctccaacatgcacaggaaatccagtatcaaatttctaacatgtcttcagagacaggcccagggctggcttgagcgtgtcagagaggtgtgcactgcgtactacccatcatacatggccacacatgcctgtggctgtgagaaatactggtggtgacaaagacaatgagatgccagagaaaaagatcagtggggtttgcaaaagtgattaagatgtcgtcctaggtataattaaagacttaataaggttgaaggaaagagaggacattgcacataccgaggcccctgagagatctgcctggcaacccagaaagggacatatgggggaaaacgccttagtgtaaccaggtcagaattttcattctgggcagaactggaatttgaataataatactgagtcatatagcgcatacagctatgacatttcatttatttctctatataatgcaataaagtagatggattaaccgtgacgtttacagatggagcaggggagaatgaagaggcgtcagtttgggcatcaggctggatcttcacactctgacctcactctgctctatcctgcccagtgttgcttcacctgatatcaggggtgcaaggcaaccagatctgacaccagtttcagtttagatcctgcctttacctgggtgtgacccgggtccatctcttcagctcggcctctgctttctcttcataaacttttggggttagtcctcggatgatctctaaaacatggcccaggtgctccttgccagtagagtgtagccggatttggagggactggacactcagtgtgaacaagacgaaggcctcaggaggcagtaaaagctgacaagaggagagaaaatgaagcgcctacgggtgcatactggactagcgggcgaaaggccatgactccttagtttggagaaagaactggggccgagattggggaagtttcccagtgcaattaaaaaaaaaaaaaaaaagaactagaagaattacccaggtctggcttctttcgtgtagcctggggctgagtcgcaggctgagaaatccagtctggccagtagggggctccaccaagcgcagtctcagaatgcccaagagctccaccgtcgcccggggtctccaccaagcgcagtctcagaatgcccaagagccccaccgtcgcccggggtctccaagaggagtgggtcgtggtgggcgttgaagggccgtaaaagacgagcagcccgcgtccgcgtccgtcctcccgggtctccagtccgcaggcggccgccgcctcggccccgccctcccacctccattcccggccccgcggacccgaacggtccctctcgcaaccgatctgctggctggggcgctggggatgcgaattcctagaagccttaagaggctgcccagcgttggaagttcgtatccccaagaatgctggaggttccggctcacacaccccctccgggcacagagtcagctggggggtgctgggagggagaacgccccgctcctcaccccccatccccgtgcaccctggagcccagctccatacgttcggccaccccaggcggactcggggtggccgggtagcgggtggtggcaggaggggaccgggtaacggcaggcccgagaggaggtcgctgggccgggccggaggcgcacaggggctgcgtggctacctcggcggcacccgccccacctccgccggctaagcccggagggggacggtgagtcagatctcgggcacccgcgggtcgggcggggagggggaggcaggtcaggaaatgacatcagaggcctgtgctcagggagtgggggtctgagccgggctggggcggcgggggcggcagtgagtggggtgggggcgagcggacctcggcggagcctccggcctgaggcaggatcagggccccttcctgggggagtttcctgcctggtccgcccttccccgctctccccgccccctctccgggccgctccttgtatggtctgggcgccgctctctccccgccccctctcttctccctccctcctccttccgtgtgtccctccccgcccggctggaggctgctccggaccgggacgcagagtctgcggacccggcgccgaggcggccacccgagacgcggcgcgcacgctccggcctgcggtgaggcgcggggagcggcagggcggccccacggggagggggcgcggggcgccgggagggggcgagtgggggtcaccaaggggagctgggaccgcctggggctcctgagcccggctccgcgctgcgtaacccggcgacccaccccagcagcccggcccggccatggcggccccccgcccgtctcccgcgatctccgtttcggtctcggctccggctttttacgccccgcagaagaagttcggccctgtggtggccccaaagcccaaagtgaatcccttccggcccggggacagcgagcctcccccggcacccggggcccagcgcgcacagatgggccgggtgggcgagattcccccgccgcccccggaaggtatgcggcggggcttggggaatgtaccccggcaggagccggggtggggggcagtcgtttcgggaatttggggatgtctggaaaggttgttgccgagggggctgggcgcagccaccctgtcccgagcagatgttcttacctcatcgtggagctcgtggctgggagccagggctcctgggaccgttccaagtcccccgcctgggagtgggagtcgggaatgtggggcacgaatcttcccctccgggtccgttttccgaagtgtaacgggagctgcaccactcctcggcagtgcgcccggcctttcctgacctggtactcccagggcgccctgcgcccctcctttgcttccccacacgctctgggacccctgagagagttcttgggttaggggttagagcggttaactgaggggagcttgggtgaggggtagagggaccccggccgacgtctttctccttcctaccccagactttcccctgcctccacctccccttgctggggatggcgacgatgcagagggtgctctgggaggtgccttcccgccgccccctcccccgatcgaggaatcatttccccctgcgcctctggaggaggagatcttcccttccccgccgcctcctccggaggaggagggagggcctgaggcccccatac

SEQ ID NO: 11529 - DNA, 6000 bp, Homo sapiens
ttcttagtggcttgggtaaagccttgacatgtacacttgttaaaatggcctcttgatgactgacaagataaccagctacaattaatggtcattgtaatgttgagggggaaaatcatccttgaagatgattagatactaaatgaattagcacacagcatatttaaacacaagtatcaagtcaacaaatatgattttatcaatctttaataattttactaacctttattaatgtatattctagtaatgatactatatactatgtacatatacaggtagcctagtatttcatttaaaataaaattgtattcttgaaattaaaatcaatacagaggaaagcttatttctctgaaatatttacaaaatgcacaaatttttaaatttcaaaatttaacatttgtgttttattttaatgaatacaattttcaagtatgttatatgtacagaatggaatacatagcacaaaagaattatttactatctgtgtatgaacctaaactgcatcaatgaccatataaagcaggtaatataatttaaaataaacaataatgatgtaacaaattttttcatatataaaatgaaaattttggagattaacactgcgtctgcctttgtgggtgatttattccacagagctctttcaattgtttagctgccttgaatcttgtagcttagttataaagagaagtttggaggtaaatgttctgcagcattcaaaaggcttccttgaaagccatttaatgcttgaaaaccttttattaatgtatttgaaaatagtcatgttggattggaatatgagagaaaaactgatttggttgattttcctggctcatcagttttgaggttattgtaactaacacacctcagtcagaggcactaatgaattaaacacacagtgtttgattctgtgctgtctaataccatagcaactggtcacatgtggctatttaaattagaaattcacattaaagtaaaaattcagtttctcagtcacactggttatgtttcgtttctctctctctcttttttaaaggaagttttgctcttgtttctcaggctggagtgcaatggcacgatcccagctcactgcaacatctgcctcccaggttcaagtgattctcctgcctccgcctccttagtagctggaattataggcacgtgctgacatgcccagctaattttgtaattttagtagagacagggtttcaccatgttgaccaggctggtctccaactcctgacctcaggtgatccacccgcctcagcctcccaaagtgctgagattacaggcgtgagccaccgcgcctggcccacactggttatatttcaagcactcaatagatacacatggtttgtggcaactaatggacagtgcagatgtagatggaacagatccattcacactgaaagtactattagccagtattattgtaagatgtacgataacctcctttgcaattttatttagtcaaaagatagtaaatgcagtgtaaagtcattagagaaatattgacttttaaggataattaaaaaccattaggataataaacctatgttaaggttattcctgattaaatcaataccatcatgagacatattccaaagatccactgtgagatgctttatggaaactctaatttctaactaaaaaggcatgatatgtgaacactcatagcttaataaaaattatagttaatatgaatggcagcctgtcatcataaacatggttagtaaatttcctggtatccctctcatattcttcccaattggcatcattcatgaagtttctgtgtgattagttccaactggatttccaaggtgatcccccttttctaaaagaaataatcataatctcttccctttgccacaatgatgacttcatgaatatgaattgagctcaggccccagtcctaccatgaattacattcctcctatgatgccgcttgattcaagggtgtacaagagcttcataaggtcaaaacaaagtgaagtccagcagttttgctttaggatgagggagatagattctcacttttaccggatgctggggtgtgtggactgatacccagaataatcatagttatgttgttgccctgaaaggtgctagcctgaagatgaagacatatagaggacaggggatgagaacatcacacactatcactaaaaatcagttacttgggctgggcagggaggctgaggtgggtggattacctgaggtcaggagttcaagaccagcctggccaacatggtgaaaccccatctctactaaaaattagccaggtgtggtggagggcacctttaatctcagctactcaggaggctgaggcaggagaatcacttgaacctgggaagaggaggttgcagtgagccgagatcatgccattgcactccagcctgggcgacaagagcaaaactccgtcttaaaaaaaaataaaaaataaaaaaataaaaaataaagtcagttacttatttacctttaactatagatgtcaaatttagagttagattttctgttatgtaaagtcaaaattattctgaaactcttaggtatgtgacgacttgtaggcaaagttatctctccaaattggaaattagtaatcttatttaaatagagtcttcacatttagtaaaagcatattgatgttggtacatttaaattgcaaaataaaagaatgacttactctttagaagcaagaataggactgggcacagtggctcacacctgtaatcccagcattttgggaggctgaggagggtggataacttgaactcagtggtttgagaccagcctggccaacatggtgaaatcccatctctactaaaaatacaaaaattagccaggtatggtagcagatacccgtaatcccagctacctggatgagaatcactttaacccaggaggcagaggttgcagtgagcagagattgtctgggtgacagagagagactctatctaaaaaaacaaaacaaagcaaaacaagaatagacagtatattcaccaggtatacgtatattaacttctattaatttaatattttcgcaaatagttgtttgaagtctctggtttaggatagaacagaagtacatattttgggtgatatctgaaaaatggactctgaagggagcacaaggagagagaatccagagtgaataagacagtagctcacggctgggcgcgttggctcatgcctgtaatcccagcagtttgggaggccgaggtggatggatcacctgaagtcaggagttcgagaccaccctggccaacatggcaaaaccccgtctctactaaaaatacaaaaataagctgggcatggtggcaggcacctgtagtcccagatactcaggaggctgaggcaggagaatcgcttgaacctggcagacagaggttaaagtgagccaagatcatgccactgcactccagcctaggcaacagagtgagactctgtctaagaaaaaataataataaacaaaaaaaatagtggctcatgtttcacaggcgcgtaatccacatcactgctgtgcattctgagagtgcaggcgtgaagtatagtcagttcgggattgtaatcagggtccttaactgaaagatctaagggaaactaagatgttttacccctcccaccctagacacacagacaataacagcggtgataaatttcaagatgaaatcacagatgtgctcctccatctcccattctcaaaattaggaaggctttattttgaggtgccagagcacacattaggggacatacaccttcctaggtagacatttcagatattttagagagcatgtgaattaagaacttgaagtcccaaaatagtgtttaaagacatatggtaactagcagaggcatgaaaacgctatttttatcagcaaatcccagggaaggatggggagacagatgatcctgtaagggagctaaatttcttacctttcatggcatagagtcaaccacttaaagtctaatgatgatgagcgaagaaaccggtatgtaattattgaggcatcattgtggacacaaccaggaaaataaaatctgaaaacaggagcccttaaaatacaatttgaaatatggtgtcaagtttgttggagatttgttaattcaagtggtgagttaacctaaaaatatcacagaggccaggtgtgaggtaaaaacacaaactgttttcctgcttctctcgcactacaacagtgggcacagaaggcgtctgtgtgtgggactttctctccatgtaccaagtaagcaaccagttctgcagtggacacaagctgactgtcctccagcccagttgcattctgaccctgtctatctggagagagcctcagatcccacagggtgagggctccatcccacaggcctgccctccacttcccatgccagttgcaagccccaggctcttttacctgtgcttctgactgaccagctgtaagtcagggatcccaccacctcctccttgggtttgattaatttgctagagtggcttacagaactcagggaaagacttatttacattttccagtttattatgaaagatatgacaaaggatacagatgaagagatgtctagggtgaggtatgcaggaaggggcctgaagcttccatgccctctttggggacatcaccctctaggaacctccatgtgttcagctgtccagaagctcttcgaaccctgtcctcttggaccttttatggagattgcattggacaggcatgattgaagcatggagaaatgtcattacacaagaagggtaaggtatagtcctcatagactgggtagcgaaacccggcaaagcctgtctgttctgtctgctctgtcgattcttcttggcctcgctgtgcagtattcttctctcccaggaatggggcaggactcctggaatgggggcctatgaacaacaatcagacaagcagatcagagaatttctttgtagccccctccaggacagaaaggcggaggaagattcctgccctggggagaaaaatgagtggataaaaggaagggaggagaaaggcagagagagtctgttttctgaggtttgctcctgaggtctaaagaaccccaacgttataacaaaggccacaggagttagagccagaacataaatgaaaatacatatataaaaaacataaaataataatgaaaaagggaggaggctactattgtttatgactcaatgtaaaacttgcagagagaaatgagtgaagaataatacttcaatcattcttctgtcttggtgttcacaacatagagacacacacacatatacacacagaatcagaatcagaatgaaggagacataaagataccatatgtgcatagatggacttcctgtaagaatgaatagagaaggaaaggaatagaaatgtaagagaatacaaacagttattccagtagagaatgaaacgatataattattgagtgatcgttcatggagtggttttggaagactctcaggaggagtctcctgtccttgatggcctattagccctttttgccacatgtgaaccctaacactctgaaggtgaaagataataacagacagtgttgagaccagagctaaaattgttgaacacataatcatgacagggtaaattaactatttcactttatcaaatgttttaataaactcttaaataatatgcattgaaaaactggcatttgatgtggaacattctcttagatactatattttataatttttaaatttatgtatgtatttattttggtgagcaactgaaaactgcaattgtcagtgaacttccaagtgaaatgcctttgcgctgtctgagttttagatcttcaaaagctcaaatgagtaatcctgtcaaattacatgggttgatatggaagagagataagtaaataaaactccactataatatttgtgtggtaccacacacatttggcttaaaaataaaaagggattgaagactgtgtaaagaaatggaattttttaaaagataagataggagtaaatatagaaaaggtcttaaatgacttcag

SEQ ID NO: 11530 - DNA, 6000 bp, Homo sapiens
gcaggggttgcaatcctagtatctgataaaacagactttaagccaacaaagatcaaaagagacaaagaaggctattacataatggtaaagggatcaattcaacaagaagagctaactatcctaaatatatatgcacccaatacaggagcacccagattcataaagcaagtcctcagtgacctacaaagagacttagactcccacacaataataatgggaaactttaacaccccactgtcaacattagacagaacaatgaaacagaaagttaacaaggatatccaggaattgaactcagctctgcgccaagtggacctaatagacatatacagaactttccaccccaaatcaacagaatatacatttttttcagcaccacaccacacctatcccaaaattgaccacagagttggaagtaaagccctcctcagcaaatgtaaaagaacagaaattataacaaactgtctctcagaccacagtgcaatcaaactagaactcaggattaagaaactcactcaaaactgctcaaatacatggaaactgaacaacctgctcctgaatgactactgggtacataacaaaatgaaggcagaaataaagatgttctttgaaaccaatgagaacaaagacacaacataccagaatctctgggacacattcaaagcactgtgtagagggaaatttatagcactaaatgcccacaagagaaaggaggaaagatctaaaattgacaccctaacatcacaattaaaagaactagagaagcaagagcaaacacattcaaaagctagcagaagacaagaaataactaagatcatagcagaactgaaggaaatagagacacaaaaaacccttcaaaaaaatcaatgaatccaggagctggttttttgaaaagatcaagaaaatgatagaccactagcaagactaataaagaagaaaaaagagaagaatcaaatagatgcaataaaaaatgataaaggggatatcaccaccgatctcacagaaacacaaactaccatcagagaatactacaaacacctctacgcaaataaactagaaaatctagaagaaatggataaattcctcgacacatacactctcccaagactaaaccaggaagaagttgaatctctgaatagaccaataacaggctctgaaattgaggcaataattaatagcttaccaaccaaaaaaaagtccaggaccagatggattcacagccgaattctaccagaggtacaaggaggagctggtaccattccttctgaaactatttcaatcaatagaaaaagaaggaatcctccctaactcattttttgaggccagcatcatcctgatgccaaagcctggcagagacacaacaaaaaaagggaattttagaccaatatccttgaacattgatgcaaaaatcctcaataaaatactggcaaaccgaatccagcagcacatcaaaaagcttatccaccatgatcaagtgggcttcatccccggggtgcaaggctggttcaacatatgaaaatcaataaacataatccagcatataaacagaaccaaagacaaaaaccacatgattatctcaatagatgcagaaaaggcctttgacaaaattcaacagcccttcatactaaaaactctcaataatttatgtattgatgggacgtatctcaaaataataagagctacctatgacaaacccacagccaatatcatactgaatgggcaaaaactggaagcattccctttgaaaactggcacaagagaggaatgccctctctcaccactcctattcaacatggtgttagaagttctggtcagggcaatcaggcaggagaaggaaataaagggtattcaattaggaaaagaggaagtcaaattgtccctgtttgcagatgacatgattgtatacttagaaaaccccgtcttctcagcccaaaatctccttaagctgataggcaacttcagcactctcagcatacaaaatcaatgagcaaaaatcacaagcattgttatacaccaataacagacaaacagagagcaaaatcatgagtgaactcccattcacaattgcttcaaagagaataaaatacctaggaatccaacttacaagggatgtgaaggacctcttcaaggagaactacaaaccactgctcaatgaaataaaagaggatacaaacaaatggaagaacaatccatgttcatgggtaggaagaatcaatatcatgaaaatgtccatactgcccaaggtaatttatagattcaatgccatccccaccatgactttcttcacagaattggaaaaaactactttaaagttcatatggaaccaaaaaagagcctgcatcgccaagtcaatcctaagccaaaagaacaaagctggaggcaccacgctacctgacttcaaactatactacaaggctgcagtaaccaaaacagcatggtactggtaccaaaacagagatatagaccaatggaacagaacagagccctcagaaataattccacgtatatacaactatctgatctttgacaaacctgacaaaaacaagcaatggggaaagtcaccgcaatttttaaattcacagtaacaagcctcccctccccatgttttggaattttgggatgttaaatccacttgttccttttgttttgcaatttctcatcatatctttacctgtgcaccccctccttttacatacacaatgttttgtatcatcttattgagaatgatatactctataattgcactgttcaaaacggtaaccactagccacatgtggccgtttaattatatgatttaaaattaaaatgtaaaattcagtttctccatcacattggccaccttgctagtgctcaacagccacatgtgctagtggctgccatattggacagggcagacagtaaacatgtccatcacagaattctctattgaacagtactgctttataaataaacactttacaagaaaccacagaacaattgtcaaatacatctcaatatgactgcaggaaatctgtggtctattctttcggcttgacccattttccaaaattgccttgaaccatgggaataaaatgaattttaaaatgtcatagtactctaaaacatgcacctctactcagcccctgccctctccttcctcacctcctcccaacatctatcttactcctcctttaaggctgtagtcacatcacttactagaaccatgggacataggggaaatgttccatgtatgctcatgttcagaagggacaggagtgagaaggcttgaacaagaaatttcatgagggagatatttaaaactgtgcttggaagtctctacagatgatctaaaagatgaagcaggagaagcaatatttgcatctccaaacctagaggaacagtgcaaaaacagaaggacctatctccagttgctgggagtgagaccagttgttagctctcagctgttgagccgtcagacctgtccagaaattagcttatgctgaagagagatgccctatgtaagtcaagtgtcttttccagaggaagtttgcatccgatggggattataaagttctgctcactctccttcattctgaaagtccaaccaaactttagaactccctgtagagtctatatttgttgtgactacatctcagtctcacttctccctgcctaatcctgggttcttcccttctccctctagcacatttcctgagaagattccctaataaacttccttcatccattttatcttcatctcaacagtctgtattcctaggaacccaaacctttgcacatgtacatgtacatatcacttatgttaggaaacgcagtgatgtaatttgcaatattagtaggtcaaaaggaaaaagacatggaattatatcagtcaacgtcaaaataaaattttctaaatttataccacagataaaagactttaatgaaataggactaagcaaagtatagccacactgattttaaaataaactaattaatttccaataaccaacatcaatattaatgataagatattaggtgccctacaggtaaataaataataaaagcacattaactcacttttgaaaaggtagcaagcaattgtaattatacaagagaaagcaacataagatatttttggaaacaaggagggaaaattatcactatttgcaactgagtctatgataaacctggaaactccaagacaatcaaaaggaaatgttttaaatgctaggatgtggagaaataagaacacttttacactgttggtgggaccgtaaactagttcaaccattgtggaagtcagtgtggcgattcctcaggcatcttgaactagaaataccatttgacccagccaacactccagagtattactatagacatttcctagacaatttctccccacagggaggttctctgaaattacagagctggacagggaagaaaggcccagaatcctagaagccatgaatgagttatgtaaaaatgttttgatggttaatgatccttacaatcagactcagacaaaaatgtcccctctcaggttcccctttctgtgcccttcttcccctgggcagtgcctatcagaggctcctcttctctcccagtggcatctgctttagaacaatccctgctgctggtgtcaatgaggtttaagcccttctcagggggccatttgcatctagacaaacttctaactgttgggacatatcccagctgggaaggactgaaatccaccaacttccttggcattcatgcctttctttccagtccagatgaaatcattaaaacactcttttttcacttttgagaagaagagacagttggcccacatgacagcaaataactactgattaactttccatttaaactgtttattttgcataatggcatgaaagagaatttcaaacacaggcacgtggtggcgttcattagcagtcaggaagctcaggaagattcaagagaggaagaagaccgactggagtctcggttttactttctttttctcttggagctgagctataagacaacaggactgaacagggagccaactgtttctttgaacagtaaatcaggtaagcccagatttacgaaaagttctgcagtgttgatttctaggtcccaagccatgcacaaacattttcatttttcttagaacaaatttgtcctattttaagagaagcaatttagagtgactgccttttccttaagtggagccagtttacaggaaaccgatgtaatttactttacacattactggcaaagaaagaatttccatagtataaagtcaataaaaagtgctaactgggaagaatttgggcattaatcggtggctttcagttttctgtgcttgtacgcttggtctatgcctgccagatttaagcaagagaaactagctgatgaaaacgtaccgatatttctcactccatagtagttcctacattgcaagggcttcataaccaggggctgttggggaatgagaaaaattcaagccattaatggatcaagtgaagtgtatttccagcttaaaggactgcacggtttcccagagtcataatcttcattcactgagtctctcagcaaagactcaacatgagggaggaggtttggagagagtagaggagggaaggaggcaaggtgggaaaagaaagagagggaaagggaggactgagcctaaggtgtaagggaaggcacacctacagagaaagctgacagaagcgaagagtgtgcaggcaaaacaaaaacagaagggagccgggctgatctgtgagaggacgggaggaagaaagcgagagagagctgggcatgaggcttacaaatgaaacccacttctcagcccctcagcaagtgattccagttctctgtaaagtaggaagtcattcctttcccacccaccttgtcccttatgagtagacaaatgaaacatggttgtttagaaatataaggatcttggcctagtgtgatggctcacgcttttaattccagaactttgggaggccgaggctggtggatcatttgaggtca

SEQ ID NO: 11531 - DNA, 6000 bp, Homo sapiens
tggagaaataggaacacttttacactgttggtgggactgtaaactagttcaaccattgtggaagtcagtgtggtgattcctcagggatctagaactagaaataccatttgacccagccatcccattactgggtatatacccaaaggactataaatcatgctgctataaagacacatgtacacgtatgtttattgcggcattattcacaatagcaaagacttggaaccaacccaaatgtccaacaacaatagactggattaagaaaatgtggcacatatacaccatggaatactatgcagccataaaaaatgatgagttcatgtcctttgtagggacatggatgaaattggaaatcatcattctcagtaaactatcgcaagaacaaaaaaccaaacaccgcatattctcactcataggtgggaattgaacaatgagaacacatggacacagtaaggggaacatcacactctggggactgttgtggggtggggggagtggggagagatagcgttgggagatatacctaatgctagatgacgagttagtgggtgcagcgcaccagcatggcacatgtatacatatgtaactaacctgcacattgtgcacatgtaccctaaaacttaaagtataataacaataaacaaaataataataataatgagctatttatgacaaacctatagccaatatcatactgactgtgcaaaagctggaagcactccctttgaaaactggcacaagacaaagatgccctctctcaccactcctattcaacatagtattggaagttctggccaaggcaatcaggcaagagaaagaaacaaaggatatacaaataggaagtgaggaagtcaaattgtctctgtttgcaggtgacatgattgtatatttagaaaaccccattgtctcagccctaaaactccttaagctcatgagtaacttcagcaaagtctcaggatacaaaatcaatgtgcaaaaatcacaagcattcctatacaccaataacagacaaacagagagccaaatcatgagtgaattcccattcacaattgctacaaagtatattaaatacctaggaatacagcttacaagggatgtgaacaacctcttcaaggagaactataaaccactgctcaaggaaataagagaggacataaacaaatggaaaaacattccatgctcatggataggaagaatcaacattgtgaaaatggccatactgcccaaagtaattcatagattcaatgctattcccatcaagctaccattgactttcttcacagaacaagaaaaaactactttaaatttcatatagaaccaaagaagagactgtatagccaagacaatcctaagcaaaaagatcaagatcaaagctggtggcatcacactacctgacttcaaactatactacaaggctacagtaaccaaaacagcatggtactggtaccaaaacagatatatagaccaatggaacaaaacagaggcctcagaaataacactacacatatacaaccatctgatctccaacaaatctgaccaaaacaagcaatggggaaaggattccctatttaacaagtggcgctgggaaaactggctagccatatgcagaaaactgaaactggaccccttcctcacaccttacgccttatacaaaaaataactcaagatgtattaaagacttaaatgtcaaacctaaagccataaaaaccgtagaagaaaacctaggcaatacccttcaagacataggcatggtaaagacttcatgactaaaacaccaaaagcaattgcaagaaaagccaaaactgacaaatgggatctaattaaactaaagagcttctgcacagcaaaagaaactattatcagagtgaacagacaacctacagaatgggagaaaatttttgcaatctatccatgtgacaaagtctaatatccagaatctacaaagaacttaaacaaatttacaagaaaaaaaacaaacaaccctatcaaaaattgggtgaaggatatgaacagacacttctcaaaagaagacatttatgtgacaaacatataaaaaaaacctcatcatcactggtcattagagaaatgcaaatcaaaaccacaatgagataccgtctcacaccagttagagtggcgatcattaaaaagtcaggaaacagatgctggagaggatgtggagaaataggaatgcttttacactgttggtgggagtgtaaagtagttcaaccattgtggaaaacagtgtggcaattcctcaaggatctaaaaccagaaataccatttgacccagcaatcccattactgggtatatacccaaaggattataaattattctgctataaagacacatgcatatatatgtttattacagcactgttcacaatagcaaagacttggaaccaacccaaatgcccatcagtgatagactggataaagaaagtgtggcccatatataccatggaatactatgcagccataaaaagtatgagttcatgtcctttgtagggacatggatgaagctggaaaccatcattctcaggaaactaacacaggaacagaaaaccgaacactgcatgttctcactcataagtgggagttgaacaatgagaacacatggacacagggaggggaacatcacacatgggggcctgtcgggggttggggaggcaagtggagggagagcattgggacaaataccttaaaacctagatgacaggttgatgggtgcagcagaccaccatggcaaatgtatacctatgtaacaaacctgcatgttctgcacatgtatcccagaatgtaaagtacattaaataaaaatttttaagtatgcagctccttcccattctctcttgctcctactccagccatgagatgtgtgtgcttcccctctggcttctgccatgattgtaagtttcctgaggcctccccagaagccaaggagatgccagcatcatgctccctgtacaggctgtggaaccgtgagccaattaaatctcttttctttataaattacccaatctcgggtatttctttaaagcagcgtgaggacggactaatacattttcttcactgcatttataaggatacggaagaaaacaatgaacatgcaaagactggaaagagaggaaggaagcattaatacagggtacaaaaggaagccggagttctagatataattctgagactcaagtgtagtcagggtctgagcttcacctgggtttccacaactgatagtaagtatcaatgaataataataggcaacaaagcccagagacagtgagacataatcaagagctaatagaaatgtagaggaaaataaagacagaaacggttacttttcaataggaagaagatcccagaaagcaccagtaggaaagtggaaatgtgggacgggaagggatagtagccaatgcaagttgcattaatgagcacattaccactgtatacggtgatgaggatgttcccactgcagacaactgggtctcagtcctgctggggactcagcaatttgtatgcagtacatcacagagttgtctcacgtggtggacaacttgataagttgtggtgtttatccataagtcctaactgacattgattgaaatctgctcctaggatatcagctctgacaacttcaggctgctgcatgcattacctacatatacttttgtagtcagataaaccctctgacagagagttatgagtggctgaagtaagacatcatacacatgcatggaaacaataaatggcccggagctgttgaagaggctctgaaagcgtctttatgaaaggtacacgtcaagtatcaaagacttattcaaagctgatctatgtggcttgggctaggatgaggctagtgagaagccctaggcacctcactcttaagaaaacactcactcccagggtcacccacctacaagatctgcacttgggtgacctgagagtgagtgcctccttaagctgtgtgctctagatgccccacctgcctcacaatagccccagccctgccggtctactgggagaatgacaggctccctgtttcagcaatgatgaatggaaacagtggacatgtcagatatccaggagactctgtgcccccaaaaagatgggaaacagtaaaagctgggtctcttccctaccagaaaaaaagtggtctggcatgaaagaggttaaaaagcagatcctatccagtagggtaagactcgggttattgtcttccccatatactccagaaagccaactccagaaagtttaaatgagttaggtgaggtcctatagctggttaatgacctaaccagatatgcagcctgctcctctgtagccttcttaccacccagtgattcgcttttttgctgacctcatgatgctcttgagagaagatagaataactagaactggtgataccaacatagacgactagactaaagcctcctaataaggctaaattgaagatagtgcgaaggtgttcatcctcaacataccagttcaccctcaagtccttcaatagctgggaaagccctcctctctcagagaatgataagactttgccttcaggtttttctggcagactggatctggggctggcactggccacatgaatgtctaattaatggacagatgatgagaacagctattacgttatttgttccggggcaggagactctctgggcctattttatatggggaaatgtccctatagggcaaaggcaactgaagattagctcagtaatcaattttagaagtacagtcaggcctcagagactacaacatccctcccttcttagagcatggcaagatatttgacatcatgaggccctgctggagacacataacctcagtcacagcagaaagtagagtcggtaggagaagtattgccaacccacagctcaatgggaaatgtttctgtctctttaaaccataaccatggggcccaccctgagcttcctgatttctgaagtctgagtgatttcctccgtgtgccgagaggaaacagccttctgcactcacagccgaagggaaagcagcaggttggggcttcttgtggccaacttcagagcctgtcaccaggaaaggtgagcctgagcctgggagtggcgggggctgggggtgctctgagaaccagaaagaacatgattcctagagtgtttactgcctgaacacttgcattctacaaggcatcatgcaggcgagcaagatctggaacaatcaaggacatacttccaggtttttaagtaggcaaagttcagaggaaattttaggatcatcttctccagctctggagcacacacgttcttggtggggagtgaaatctgtctcctcccacattcccttaacaaagtaagaaaagagtgtgctggaaccacctccaggaataaaatacagtttgaaaggcattaaacattcctcaagctccctattgagcaaaggcaaaagatatttctatggccccataagccatctaacctcggagtgagttacgacgtgacaagactgggtacatttgaactctcctcctcactgtccacagaaggggcccctgaggagacatctgagattaatatcttggtcttcaacccctttccctgcatggccccttaaacatctgctcccttaattcaagcttctcctgctccagccacggggacacctcaaattcccatctgtacaataaagggggttgcaaaaatgactgatgtccaagttctgagctgtggacatcagaaacatttaattcatgaatcagaatctcaggatggatccaagagatgtacatttttaaagaacattcaagtaattctgagaagcagcacatttgagcggtgaagaactcaataaactttgcggtctcttaaagtgttaggaatacaggattctataagtgtacattcctcaatgattaagggccatttgtcacctcagagttcagctgggtcttactttcctttaaaaaaaaaaactatttaaaatcatttcaacccctcttctaaactatggaaaattcca

SEQ ID NO: 11532 - DNA, 6000 bp, Homo sapiens
ccaactttttcatgtcgatgtccacatggtaacatttgtcacaacatagtgtgtaaacagaagaggctgctctcaacctcagatgcaactgatctcaggcctcgagccaccttggggttttggggggctctttgtctcccctctgaagggtgagggggaaaatatctcaacaaacctataattgatagacagctcaagggccgagaatttccaatgtaatgactcaaaaggaaatcagcctggtgagggtacacctcagcaagctcagaaacattattcgtgacaggaagatatcagcttgtggatcccaagatgctcaccaggagacattcagttgcaggtgataatgtcagggtagaggagggtctcattaggctttcaggagggtccaccccactccagatgcaacaggagctgtcctccatggtgccagccaggaaatcttcagggaccttatcatcccatctggacctcatctaactcatctaataaacaactagaggagagcgtcaaggcatgcattcagtcctgctgctccctcttggccttttgagctaactaaatgggtgaaggttctactctaaatgcaatgctatggaattagacaactagacatcagctacccagacaactccagaggtcatgacaacaagctcttaaacctgctctaggcactgtcctgccctgacacctacatactctctgcttcctttaaaataaccgcttcaaagggccccttctccacctccagtcaaccttgatcacatgtccaagttctactccacacctcagggctttctccttggggttggtccgttttgacctcttttcttcccaaaatcctgcttaatacattgtctaaaactgtgctatcatgtattttttaccatgaccctcagttttatactgcttcccagagcttacatacactcatattttgtgtgactaattttgatagtttctattctactctatttcatgttttgatgctctacaatggggtgtatgaaatacacttgtccaaaacattcatttgggacccttactcattgtctttcatttgcataagtcttgtctctctaataagatttcagattccttacgagggtggctttttgtctgcttcccatgggtgctgtctggacttaccacccattaggtctggtgtggtgcaaaggctcaggagaatagggtaaatttgcttcaaaagatgcaatatttagatacttagagtgtacttcatggcatcgttaatccttcctccatgttgtatgtcaactgtgggctcaaatagtggccccttttattgacctggatgtttctgaatcctcaactctacctcctggattcacccctagatgatctccgcccccaccgtgaagcctcttcagcagctgtggtctctgtagagcaccctgatccaggaggctcctttcctcacctccaattagaggcgcccctgacctggaccctctcagccctgaaaagagtagccatgaccttgtccagacacaaaggaaataataatgttgataatatagaaatgcctgcattttaatactttttttcagcatcttttacctgctctttgattttcgtaagaacacaatgttctaaaaaaaagttccaagaaagaactttttttagagtgactaccgacaaggaagagaaatcacacttcagcatttggcttcagggcctcccaacattgacttggggtttcatttccacatttcccactagtcatgttcataggagaccttcatggaatagggtgagatgatggatgaagagacagaggccagatggtgaaagacagcaagcatgactaagagttaggagaccttgtggtgaccaacaggctcactttgactgggactaaggggtttcccaggacgtgggccttgtagtactaaatccagtcaaattcagggcaagttggcggttggtcacctaggacctcagcccagtggctcaggagaaagtggtaaatgccatgcctcctctttccctcattctcccttcctccttcatcagaaggcaataattgtctgtctcccatttcaaacagaaggtccaaggcatgaacccaggggtccttgaatcactccaagttggtagggaaggtggctgcccaaaatgtctccgagatggagctttggcatctcctcagcttaataaagctgattctcagggcagcctacaggtatctactctgagatggctactgcactcagaactccagaaacttcatcacatagctagagcacatgagttgcaactcagcgtgctcagttctgtgcaccagggagcatcacagagagaaagcagggatagcagaggtggctggggatggatagagacatgctttcagtaatgattcatcatattttgtactatgtcaggtttggtagagaactgtctctgtccaggctgaaaagggattgaatttggtgtcaaacagaagggtagggaaaatggccacttcctcggtgtcccaggtttcctgggggtttgtttgttttgcaaatctgaacagaggaatagagagggtgtggaaaaaggcacaaagagtctagttttggaaatcctttcatatctggatatatacgaatttctacaaccctactttctgaaagtagctacctaagattattcttctagcactaaatgtaactacaaaaggggacatgagggaagagttagagcatttaagttgtatgttttactgatttactcagtaagtatttttgagcactttctagggctaagttctagcaagatcctgacctaaagacagtccctggcctctaaaaagcccacgatctcacccagaaaactgatagagaccagttaacacatttcatcattgactccctggggtctctttgagccataagaggagcctgggaactgctagagaagagataagacttagagaacagatctcaaagcagaaaatcagtccttagctggggtgccagagcacccagttcagtggataaaaataatgtttgcaaatagttcaaaccaaaaggaaagaagagaaggagtttgaagatgttgccagaattaagtgaatttgctacattgatgggaatggttagcttcggtgcccctcactgtttataagattttgatgtgaactctgttggtcaagtttttgaaagattccagccaggtgctgggggagtacctggtccctatctagcaagggtgaaatcctggtcagattacagcccactttctgccctgctctgctcaattcacataaattatgagtgctgactaggttgaaagtccttgaagaatttaaaaatgtaagggcgaataaaaatcaaaaataaggagaaaacattaattctcttttctggggaaaaaacaaagtggaaaagaattacccctcccttcttagagcattttctttagaaaccttgtaagtgtgaaatctttctctaccctttgtaatgcaaatctttttaaaagctgtttgacagcccagggctgtctgtagagcatctggaagccatccctttgaaatgcaaacatcaaggaaggtagcgtccccacctcccagtctctgtgtgaaaataggggcctaatttaggagcctaacttaggtaggagcctgacatctgccagcacctttctgagttgcaaatcttcctcttgccatagaggatgtgagaagtttacttttcctctggaaagacaattagccaacacagatgattactgagtgaatttaggatgaactatgcatgtcaaagggtgctgtcaagtcctcttacttgaggattagttatggtttaacttgagaacacgtgtgtaataggtggcacctgcctggctgtataaccaggtggcatccctctccgtctttgcaatctcttcctggattgtctgggatccagatcacattctggttcaatggacattcaataataaaattgttttctttctcttctgcctctgtggagaggttttctgggctagcaggagattgtttaaaattgttttcccatcaagtcttagacaattgttaccatatgactgtaagccccacttcaaatgtcaacagaaaaggatatggggattctctgggccatgacggccctccgcctaagtcccactgtgttctccatcgcataattgccttatgtccactgccctaaccttaaatggcaatcaggtttatgtccactgccctaaccttaaatggcaatcaggtttatgtccactgctctagccttaaatggcaatcaattcaaaaatagaggttctatcaccctgctttcaacccttaccagataaactgacacgtagactccacaatgtccccacagggtgggctccatcacgtgccagacagcttaccagggtcagtcacgagcccagagtcaaaccctgcaagggcttgttctggtcctctttggaccagagtgcctttctgatcctggttagcagaaactttccagaagcagagcctgtgagaaggggcccaagagtgctgggaggagaaggtgccccggtgatgggtgctgagggcagcagctgctgcccagaactttccagtcactagggaccttttctgaacttggaagtgggagagtctgtaattcccttcatatctccttcttccaaatactgcttgcttgaaacagtcaaaaaaaaaaaaaaaaggaaatgggatggggcacactgtcccagggcaggctcatgacaggaagtgacccgttaaggaagcagcacatcgctgcattcggctggttttcagggtcttgttcccaatcagtttccagccaacaccagggtgtcctagtccgcagaggtgtgggggacacactccataatctctacttttctttttgtgcagctgagtcatggagctttcagccccagcacatggctcctccttaactgcgtctgctcaacctccctcagccctgtgaacagcatccccgcacacagacgcagagcaggactctctctgctgccacttcaccttcctgagagaggaccagcggccagagcctcagtgactgccaccctggaggacagggcacaacaaccgtttctggtaaggagaactgggtttatgctcacagagactttgggaattgaaaggatcacagtttggtcacagctgttcatttctgacatgaccttgcacagatcccctcacttctgggttcgctggtcagtaaaacggggcaatggtgatgagtgttgcgggcatcagcaggtgcacagctggtggagcacagcctgaagaatctgtgcctgcactcacagcccagtcccaggacagcgggctttgctgccccattgcccattacttagccaagtcgatctccatgaaactctcagggagtaaggctgaactgatcctctcatcagtgggacagatgggagaactgaagctcccagagggtgataggctttcccccatctcccctagcatgccggggcattcttctcaattttaccctcctaatttctcctgtcccagaccagccagacacgtaccatgtctcagacaagcctgggagctgaggatggattcttagggctccccagggcaaatgtgggatattttcccaccccaggagcctcatgttccaaacaagacccctgagtggaccttgtcttgtgactttcaacttctgaaaactaccccatgctcccccagatgccccacatttttcctatgacaccctgccggacgcacaccaaaccgcaaaacacatgattccaatacctggaaatacatgggctggggcagatgggtgaaggagatacttatgaacaaggaagacaagaagtggtttgatcttttctaaaatagtatggaagaggctgctttcttgtaatttgctaaaataagctcttctcatggtaaaatcaggttcatgcaattttcaaatcggaatgtgcattttgttcatttgcttcacccttttccctgagccagaccctcccaccagcttgccagaggct

SEQ ID NO: 11533 - DNA, 6000 bp, Homo sapiens
cgtgtcaaggaacaagcctgaggcacggggggcctctcctgaggacacctcccctcagccccaacaagtctcccacccatgacgccctcacggagtctccctgccaagaacagtgccagctccaagaggaccttcccatgccacctctgcaggcctagcgcaaaggatatcttggtgaagaaactgtccaggttctggatgtgatgccaggagcctgggcacagaggggagagtgtcagcccctggcatgtgatcaattctccacgttctcaacccgctgccagaggcccagcctgggataagtactggagctcccaggcaccactaaccctctcccacccacacccacacacatacctcggagcccttcagggacatgaagcaggggttgctgctcctccccgtggatgggtgagtcttgggacccctcagggtcacagtcctccagccgctcataatcctgttcagggatcaaagggcctacccgcagcccaggagagtcctgggggcactgctgtgagggagtgggggttgccggggccaggggtggggtggagtgggatccccaggagggagatgcagaggcaggtgtcattgcaggttgagcctgtgttgggggggtggctgggatagggagagcactgtggcaagactgagaagcccctgtcccctgtagcactgagcaagggggccctgcggtgggaggggaaaatgaggagggggagcttcttgtatgaggggcaggggacagagagaagatggagatcctccctcccccaggtccccggcatgaaggaggaggaggaggtggcagtggcatggggaggaggggcaccgatccgggccccagatctccccaccgccccagccgccttcttctccccccccagcccattcggctcaccatcaggccacggcttctccagaaaggttggaaggatgggagctgttgttgcttccacaaaggtctgtgacactgagctgggacttcaacaggaacaatgacaacaacattactaggtgactcagcctaggcaggcctcaggcgtcccagctctcagtcacctgtctgatcactcacaccccttccagggcaacctgaggccaaatccctcagggcctgagaggggcatcagtttaagaggaggggccaaagagcacattgagatgagaagattcctattatctccatcttcagaccttgaatgaatgaaagataaaaagaacagcagccaaaatgacaaaagcaaaaagcaaaatcgtgttagagccaggtgtggtgatgtgtgcttgtgttcctagctactcaagagactgaggtgggaggatggcttggtgcaggttacactggaacagtataggttacagtgagctagatcctgccccctgccaccccccccaaaaacatcctattaaaggattgtagcagggcgcagtacctcacacttgtaatcaatctcagcactttgggaagccgaggaaagaggattgcttgaggccaggagttcaagaccagcctggggaacagaatgagaagactccatctctacaacaaatcttaggaccaagatgttaactatttcatttcttaagagtgtacctcccccacttccctccacacacacactacagtgatcaacagagaaatgttttgtgaccaaaacagaaaagaagaagtaaaggggccaggcatgttggcttacacccgtaatcccaggactttgggaggcccgggcgagaggatcacttgaggccaggagttcgagaccagcctgagcaacttagggaaacaccatctctacaaaatctaaaaaacaaacaaaataattttttttctttttgaggcagtctcactctgtcacccagactggagtatagtggcacaatctcggctcactgcaacctccgcctcccaagttcaagtgattcttctgcttcagcctcctgagtagctgagactacaggtgtgtgccaccacacccagctaattttttgtatttttagtagagatggggtttcaccatgttggccaggctggtcttgaactcctgacctcgtgatccacccgccttggcctcccaaagtgctggcattacaggcgtgagccactgcgcctggtcaaaaataaattttttaaaaagaataagaaaaggttgcatgttttattggtctgaggtgctaaggaagagaagaggggaggctgactttgcagccaagttggggaaaactaagaagaggaggtgaagaaaggaaaggcagctatcttggatttgagagttggtttggagaacttagagtagaaaattggggttctctgaaagttccattccgtttgcatccttatcattttcaactgtgacattctctcaagtccggatcccacttctgggaccccctgaaaagcatcagggctgaatcagaagggaggacagctgtgagtctgggacttggaaggataatttggatacccagggaggagctgaactgagttccttgttgtcacctcaacaaggaggaggagacccaggcagctggtctggtggcttgcccaacgccattcttgaggccctgaatcaccaggtttccttctaaagcccattactgagatactgactcagccaccaggtgtcaaggtctctagggcttaggcctaagggctgatgttggggccagtacccctgaaatggcgatatggacactgtgcttcccagattgttcactggaggcaatcatggaatcacccacaaaacttgaatccagatgtgcctgattttctccttctgtgtggggtattgtagtagtagctcaggtcttgcatgcctttatctcagagtaggaggcagagctatgaaaacaagaccctgtccttctagaggtagcaaaatggaatcccacattgcagaggggccaggaaattcccataatctttctgagacatctgtcaagatgggttatgtggggtgttgtctagtctctcccccacctcactcgcccaatgtcactcagtatcgtggctattccaccatagtcacaataggacccccccatacaccaagagctccccagctcaaccccaaactaatcctgggacattgtcctacctagtttcaccctgaattcattctcattgacagcctccctaccaccactcccaattcaagtcgatttattttaaagggcacttttccttgccaagcatttggaagggaagaggacagatgaataaaacagagccactacccaagaagctgcagcccagtggggagacaaatacgcaaacaagtaattacagggaagaaacgagtggtgcaaactctttggcaggagcctgaggcaagtcattctgacccgggtgaggaaggtatctgcgaggcagacagatctgaggccgcgccttgataaattacaggccctccataccaatagttctcaatggctgaggcgtagggcaagagtgtcagaatcaccgggggagttcttccccaagtacacgtgactgtggggaaaagaaagagagatcagattgttcctgtgtctgtgtagaaagaagtagacataggagactccattttgttctgtactaagaaaaattcttctgccttgagatgctgttgatctgtaaccctacccccaaccctgtgctccctgaaacatgtgctgtgtcaactcagggttaaatggattaagggctgtgcacggtgtgctttgttaaacaaattcttgaaggcagcatgcttcttaagagtcatcaccactccctaatctcaaaccactccctaatctcaagtacccagacacaaaacactgaggaaggctgcagggacctctgcctaggaaagctaggtattgtccaaggtttctccccatgtgatgaaatatggcctcgtgggaagggaaagacctgaccgtcccccagcccgacacccataaagggtctgtactgaggaggattagtaaaagaggaaggaatgcctctttgcagttgagataaaagaaaggcttctgtctcctgctcgtccctgggcaatggaaatgtctcggtgtaaagcctatctctactgagataggggaaaaccgccttagggctggaggtgggacaggctggcagcaatactgcttcttaaggcattgtgatgtttatgtgtatgcacatcaaaagcacagcatttttttttttaccttgtttacgatgcagagacgtttgttcacgtgtttaccttctgaccttctctccactattatcctattatcctgccatacccgataatgatcaataaatactaagggaactcagaggctggtgccggcgtggatcttccgtaaactgaactccggtctcctgggcccatttttctttctctatactttgtctctctgtctctttcttttccaagtctctccttccacctaatgagaaacgcccacaggtgtggaggggcaacccaccccttcacgtgacagatgtcccagcagttctgacgcacctaggagagcggggtgggtggcagggcatatgtacgtgttttgaaaaaactcccagtcgatttttgttcattcctcccccaaaacccgcgttctacacgcccttgagacgacgggacatctagagatcctggagccttgggaaaatggcccgaggtcggcggctgacgcgttactatggatactccatagcttggagggccagtcgggccacaccctttggacgtcacccggagcccacaggagcacctggcaaaagccaggcccacttcctgctcggctccgcccagagcagggggcgggcggataggcgattccctccaatcacagttccaaaaggagggggctgacaacatatcctccaatcacagcttgaagtgagattgatgtgtcttttcaccaatcaccgccaaggcgcgagggggttgtcgggatgggggcgggagccaacatagagccctcagtgggatgagggtgaaactgctattgccggcggctcctgttttaccgcgtcagcatgctggtgcatttatttcgggtcgggattcggggtggcccattcccaggcaggctgctaccgcccctccgcttccagacattctcagctgtcaggtaaaaacggaaaaacctactcagagcgggccattgaccgcccggcagggcagtgccggcccgccgggagatggagtccacgagcttgcgcgaggcttgctgggagctgtaggccaggcctaccggggtggaatgtcactccgcgggtgttggcctcaattatttatagtgacactccagtcgccagcaggaggctcctgcgtctgcagccgcgtgtcagccagaaggaggggacgctcggggtcagtgaccacgcccagtccgcactcccgaccgggggtcccctttcctggccctggaggtgattgcgcgatttggacgaaaattcttattagtatgaagagacatttaatgtagtggtgcttccaggattcaaagtgagtcgaagaagaactagagatgttcagcagggataaagagccaatctaataggccgggcgcggtggctcgctcctgtaatcccagcactttggaaggccaggagttcgagaccagcctggccaacatggcaaaacctcgtctctactaaaaaatacaaaaatttgccgtgattggtggcacgcgcctgtaattccaactacttggaaggctggggcaggagaatcgcttcaacccgggaggcggaggttgcagtgagctgagatcatggccactgcactccagcccgggtgatagagtgagactctgcctcagaaaaaaaaaaaaaagagtcaatctagtaacttgtacatgtgtgtttttcgcaaaacactctacacaggttggtcgagagagagagacagacagacagacagatgggaaacaaacaaggaccctgaaactacaactcgaatgtaaatgctttatgagaagggactgattcctttttttttcttttcttttcttttcttttcttttctttttttt

SEQ ID NO: 11534 - DNA, 6000 bp, Homo sapiens
cactgtgacaatcagggtgtccagcacccctgctctctccccttgccctcaggagaagccctacagaccccatcaccctaccccacaccatcactgccctcacccattgtgctcaaaactccatggactctcccctcccagagggctcaaggcagaggaaagcaaggatatcggaagatcctcttcaactggtcatcgacatcattgccgggaaaaagaggccgcccagcattggccagctctgggggatagacagggggctaagatgtgacatgtgaaggacccctcactctgaggtaccccctgaccttccagctccagtcccagggcctccctcccttcccccagaggggaccctccagaccctatttgtcaactcaaatgggaaagaaggtgcctctgcaacaccccagcacatcacctgcaaagatgcagccggctgaccacatgtcgatggacgtggagtacagcttggccccaaagaggacatccggtgggcggtaccacagtgtgaccacctggaggagaccccccccgaaagggacctcccacttagaggactggggaggaggtttgaggaggaggctcagagaggagaggaaaataatgttttgggtcctggggttggagctgagggactccctcccccaatcccatatcccatcttctagctcacctcagctgagtaacagcggacgggaatcccaaaggctcgagccaggccaaaatcagccaatttcagctccccattctgaagggaatgggaaggggacatggagaagggcctttaaaaagccttgggacagcaccaactccatcctcccagtcctcttccctctgtgctccccgtgccctggccccagcctctccattccccaccttcttcccaagaagtaccctgtttattagcaggttctggggcttcaggtccctgtgtagcacattgcggctatgacagaatcccagcccttttagtagctggaagaggaatgactgggaggagagagggagaagggagtcagacgccctgaacatgcaactgtgcccagcaacgggtcggctcctctcctcaccctgtgcttcgctccaccccacccacctttcagcacctggttcagagtgacaccattcattcgccatccaggacctgctttatactgtgctaggcattagagggaccaaagtaaagaagctggctctggtccccaccttcctggaccatacagcctaatgggccttggcaggtggatcctagatccggcctagatcccagcccatgctgatcttcccttcctggccgcatctgagtatgcacgccgtgaacatcaacataaatatcgtgctgtagtatcattcaggactggctcccctggaacctggaccaaggcatttggtcttgggcctagaaaagcacctggcacacagtgaagcattcagtaagtatgtgttgaatgaatgagtgtatctccttgaacctcattttctcatctctcgagtgtaaataatatcactgacatcagaatgacactgtgcgggtcaaagatgaccacgtgaaaatgctcactaagactggagacccctggaggacagaaacagggttttctcattctctaacaccctagagtgtccctgttcagggcccaaacttagagcccaaggggtgcttacaccgaatgcagactccgaccccagcctgaggggtcccccaacaccactctcctcacctttacaatctcaggatcgaggtcaccattgcaactgtcaaaatacttcttcaggtcctgaaaagggatatgagtgggggaatgggacagagtttaacctcaatctgggcccctataccttcccaaggctactgtcctccaaaccccgcctttcacctggtcacagaattcaaaaaccaaagtcagcttcttgtcgctgtgcaggacgtcatgaagcctagggcaaaagaagggctcagccaggcaggtccgcctgacagacgtccagtgtcagcccccgcctcccccaagcggccacaccggcaaggagcacccgcctcccgcacacctgacgatgttcttgtgcttcagctccttgagtaggcagatctcccggagggcggaactcggcacaccctgcatatgtgagggggccggtgggcagcagtcagatcccacccagcccaggccctcaaacccctccccaggccgtatcccactccccagtcctacctcatcatcgtcatccagcctcacccgtttcagagccacgatctcatgagtctcccggtttttggccttgaacacagttccgtaggtgcctaggggaaggaggtcaggggtcagggtgaggatgcggcactcttccctaagccaggaaatgcctcctgagagaggtgaaggcagcgtctcagtatgcaagggaagggattcagggtgaaggtaggttggtgagctttgtgagtgaggatgtggcaggtggggagggaggagaaggtgcccaccgaggctccaggggctcggcaggaggggcgagtgcggttgccagggcaaggatgtctaaaatgaaggcggtgctccggaagggtctggaaatagtgaggaggggtctgggagaggactgaggggctgcagaaatattgaggttggaggtctgcagcaagaaacgaggctgggggtcggggtgaggttgtccaagtgctgctgaggctggggtgagaaatttcaggaagtgtcgcggttgggaggtcgggtctactgggaacgctaaggttggagtgagagccctgcgggaaatgctaacacggggaagactggtgtctgcacggagtgctgagctagggggccagggctgcagccgctgctgagatcggagcctgtaggcattgctgacggtaagggagccagggcttcaaggaatgccgaaggatctgcagaggagctcttgcaggaacatctcgagattccattaccttccccaatcttttccagtttctcgtatttctgcatcgcggcggccgcggggacccctgcgggccctcggttttaagactctggccccggcgttgcagaggaggcggcacctgagcctccagccccgccccgtctgcccgcgcagggccttctggggcttgtagtcctaaaacgactaggtctccccgcaatgcccgagaccgaggacaagaagactacaacccccagccgtctgcgctcacgctctctgcagcactcgactccagggctccgtttctaccgcggaggcaaaccttggacttcaagtcccaggaagcaacgcgtgtccgttttccgggcgccccgccgcggcgccgtggttcccagtgtgccccgctgttgttattccttttatgtgctcccagccctcttgaaaagggccgctccgggactacgcgttccagaatgcagcggaaatgggggcggagcgctctcggttaggggtttggggtttggcggcctagatcccgggcactggcggcccagcgctgacctggttggtggcattgtgttcccaacggcctcttgacgacctcagcacgggtttccacctctccccaagccacctagtgaccccagaattgactggggaatgcctgtgagcgatgatgacctcacagggaacagctgaccgcagggctgggagaacagctgtgccccttcgaggctggattttagtggagggacacacgccaaagaccccctctctgctgagccccgtttgttgtctcggagcccacccgactctagccgctgaactctgacatgctgaggaaaactgggtggagccctgggggtccccctcagaccccagtctccggaacagggcccactggagtcagccagggtgtggcaggcaggttggttaaccccctccacagacaagaccacagaccgatgctcaacttgcagcagcctctgcctcaccccttaaaggagctgattatagattcccttacgctgcctctctaattgtctcatgattgcattcttgagggctatggaccgagggaaaaggatcccaaacagcactcctcagcaccggaaccagagttgctgctaaacacgtgttaattaactcgtttctatctgaatgcttttgcatacacaagggaaaagaagcaaaaagtgtattccttatctggaagactttgtgatttcgttgggcaaaaaagaactacacacaaaggtcttgaatgataagtgatggctctgcctagggttcggttcagtgtggaggttccattcaagaggaaggaggccagcacagcgaatctctgtccctctctggaagtggagagcctctaacaagttaccctctcccagatcagctcagggtaccgggcggccagcctccagcccctgtcacccttctcacccactcgccacccgtccctcaggggctttcttggaggcacgggggttattgaggggggcaagagaatctcaaccccgatacgtttatgtttcgacttccccgaatttccttgtgcctgcgttttgctgcctgggatccctagcgtgagaagggctcctttacactcagaggtgccgtaatggagccaagggacggcatcctcggggctcccgagccccgagtggagaagcttggggcagagggacggcgggggcggcccctggtgccgggctgtgcctggaagcgcgcccccgccccggcccccgctcccgcctccccacccgcgaaggcgggaccgcgcacggtgcgccggggggcgcgcacgcagggggctggcctgcccgcggcgcgggggaaagttgagttgggagaagttgggagcggcgggggcgcgccccggggtgggcacggggcagtcgtcgggagcgcgcgagtgcgccggaggacggggagagaccccgagacccccggggcacgaagtccagagcgagcgggtaggcggagaggtggtggcgggggacggccagggccgcagagggaggaagggagggggaaggagaggggggaactcgggactcgagcggggagggagtggaagtggaggaaagggcggagactggggcgcggggaaccgcggtcttggggagaaggatggggaggcggatggagtgctggtcggaagcgggcattccggggtccccttctcagagttccctaaagccagggtgccgcgccccctgccaccaggagggggtagtctccccgaggcgccgccggccctcccactccccggctggctccagaccacccctcccctccggcccccccgcatagtccttcagtcccgtccggggcgcccagactgggggttgcccggggcccccatccccaatctccgggttgagaggcgaagccaggaaaggcgggtggcgggtaaggtcggacaaggggtcagacagaagagggagcagctgggtgggaatgggaaagatgagcccggagagttggacctgactcccggggtcggtttgtccaggcgggaagttctgtgctgggtgtgagaggcggcactgcctgaaacccagggtctactttatcccccttcgtttcccccgccagccccacatggaagagctgcggaatttacgagttcacttggggggtggttaatgcccaagtgggggtccgaggtgctaatcccttggtcaaggggagagatactaatcctctgggccggtcggggctggtcccgggaatgtgcccctacccggattatcggcaccgatgctctggacagaagctgctttgtgttctgggacagcaggggagggggtgcagaggagtgtggaggagcgcgacgagggcacagcctgaggtgggagtgggcgcctgcaggtgctctgggcggactctccccacacccttcccagactgggtgcactcacgctcacccacaccacccgccctggctgaaggcctgctgagggggaggggaagagcgtggttagccaagttggagtgcttgccaagaatgtgttgccaggctccccatcctgggtgacccccccagacctatattgtttgacg

SEQ ID NO: 11535 - DNA, 6000 bp, Homo sapiens
aatccattgagctgttgtggagttacgagtttttagagctacctaaccgactcaggcagcagggcgtgcaactacacttcccagcttgcctcagcgggagtagatcgaaacaatgggagaggagaggtgggagcgtgaggggaggactaaaatgaagggggcgctgggcagggaggggttccagaaagcggggcatcgctgcaaagatgttgccaacggaattccttcacgaaagaaagcgccttggtttcattaaaccttaattttagaggctggttcattgttaaacttttagaaggtgccagacgttgttttggaacctcggccgcttagcctccccgctgccgcattgttaggtttccactgaagccatgcaagtttggtggaaagggccccgagataaaaaggccccttggctgagatttgttttattattagttagccatgctaccgggcccgttactttccctttgagtctcactgtttaaaatctctcacatgacattttgggctggatggtttaaaaataaatacaatctctcaaggacttcacattacctacattgtaaactccaaatgtttagcctcaagtacaaggcaggccctttgtgatctttgttacttctccaggctcctgtgcagcagaagcctcaccatcagtgacgtttggggcagcaaaggaagctattgctccctttgagcatattctccaaatgtggcaccttttcgcccacagtccgtgactcaaacaatgagaattagtttttcttctcaaactcatacttcagtagaacttacctacttaaatagttcggagattaagcgtgctattttacacctgcatgcctttgaacatacattttcctagaatatcctccaccaacgaagtgcctactatctgtcaggctcagatatatgtgctggagttgcaatggtgcaaagtcactccctgacctcagggagctcataataaagaaggaacatgtgaaaagtaaacaagccgggtgtggtggctcacacctgtaatccaagcactttggaaggccgtagtgggaggatcatttcagcccaggagttcaaggctgcagtgagctataatcaaaccactgcactccagactgggtgacaaaactagaccctgtctctaaaaaaacaaaaaacaaaaaaaacagaccttgacaccatgaaattaagtgccctaaacgaagtgactttcgtgtgttgctggggtacctaggtggagacctcacttggcatagcataattaagagcataaccccagttctatgcttcattgtgtggccttgggcaaagtacatgttctcctctgtaaaatgggaatatagttacaaaaagaatacagttaaatgactgtaaaacccttctgtatgaagcaaaagagttatttatgggccgggcacggtggctcacgcctgtaatcccagcactttgggaggccgaggccagcggatcacgaggtcaggagatcgagaccatcctggctaacacggtaaaaccccgtctctactaaaaatacaaaaaattagccaggcatggtggcgggcacctgtagtcccagctactcgggaggctgaggcaggagaatgtcgtgaacctgggaagtggaacttggagtgagccgagatcacgccactgcactccagcctgggcaacagagcgagactccatctcaaaaaaaaaaaaaagttatttatgattgtggatcacataaaaagcactcatttggctgagtgtggtggctcatgactgtattcccagcactttgggaggtggaggcaggtggatcttttgagctcaggagttcaagaccagccttggcaacatggcgaagtcctatctctattaaaaaaaatacaaaaattagccgggcgtggtagcgcatcgctgcggtcccagttacccagaaggtcaaggctgcagcaagctgagatcgtaccactgcgctcctacctgggcaacagagcaagaccctgtctcaaaaaacaaaacacaacaaagaaacagattcaagcgcctgtgcctcctgggagaaatatgcttctcctttcccagcctcgtttaaaaatgtgtggttacagataacaatatttattatgctttttcatttatgccatcacattaaactccccacccccaacaaactccgaggtgaggattattaccattttgcagatcaggaaactacggtgacaagcagctctgggcagctctgttgcctaggctggagttcagtggcacgatcatggctcactgcaacctcgacctcctgggctcaagcgatcctcccacgttggcctcccaagtagctgggactacaggcaagcaccaccatgcctggctaatttttgtttttttttttcagagatgaggttttgccatgttgcccaggctggtctggaactcctgggttcaaacgatctgcccactttggcttcccaaagtgctgggattacaattccaggcatgagccactgcacctggctacagtttttaaattttacatagagatggtgtcttcttatgttgcccaggctggtctcaaactcctgggctcaagagatcctcctgcctcgaccttctgaaatcctggtattacaggtgtgagccaccatccctccccctgcccaccctgccctgggtttagccagagaaaagaactcgggatgaggggagaagaaacagggaaagagaaatgggaaaatgggggagaaaaggaggtgagtaaagagagaggagaaagggactggctaaatttgaaaaaaatcacagaaggtcagtgctggaaacaagaatatttggcttagactctgtttaaattatgaagaaacggagacccaaggaaggaaatgtctcttggagaattacctaggaacttagtaactgaaaaggatctggacctgcagtgttcagtatggtagcctccggccatatgtggctatggagcacttgaaatgtggctagtctgaattgagatttgctgttaagtgtaaaatacacatcagacttcaaatattccatataaaaaaagaatgtaaagtatctcatcaataatttttcatattgactccatgttgaaatgattgggatatatctaataatacaataaaatattaaaattaattttaccttttttaactctaaaaaatgtggttactaaaaaattttaaacaacatatatggctcacatttgtggcttgcactagatttctactggacagcgctggtctagaaatcttctgaccttgagctaagtgtatctgctgtttcccagtctcttccaacaagtcatttacaacctatcatgtgccagctgatgagaacagattcagttgcagtctaaggatgagactaaaacagggataacaggtgctggtaggcaatatcagtgagttctatcttatatactcctagaatggtatctataagatatacatacaagatattcttgagtggttcttaactttaccagccccaatgttccattttaataacatttttataactccccatttactattgtgaaatgaagtttatagatagtatagcctaactacatacataatttcaaaaaaaattatagtgtctgaaccaaagcagaaagaataaaaggaaatcctttataataagataatacttttcagtatgctagaaagcataattagtcagatgctagtagttatgcataggagcaccttgaatgtgacagtacaaatgcagactgaacgctatgaataacactgctatcagtgacccagttctccaaaatggtgagtaattcctaataaattcctgaacacaacaaagtataatcttccttctgttaacatggtggttacattccttaaaaattcagcacattttacacccctacaagattactttgttttttgtatataagacacaggcacatcagatgattataaccagtttttttttaacctatatgaatattcagtaggacatgtgaaagctgtgtgggatcaggacagttttcttgtgtgataccatcttgcaatgtgcaagacatggagcctccttggctcctctcccccaatcatttgacaacaaaattgccccgaacatttccaaattgctccttagggagggtgccattctggttggggaaccactgtggtggtctgaatgctttacctgttccctgttccccagccttaccttgggctgttctcccctcaccaggctcaaagatgccctgggccttcccagttcttctccaagccaatctctttcctctctcaggacattctggtgctcttttctttgcctggaaaactgtccacttcatgtctggataacttttcctgaacctttggatctcagcattgccaaattcccagtctaatttaatactttgtttagtttttccacaggactctgtgcttttctgcaatggtacttatcagactgggatttctacctgttttattcttgctatgtcaagcgtgtttattacctgtctccctcaactttcagttccctgagagcagggaccatgcccatctcgtccaccgcttgtttacccagcactcacgaagatgcccggaacttagcatccttagatgaacgtacgtgcctggcaaacaacaaacatttcttaggcaactgaaaggctgatgggattccacagccaattgggagaaaagcgctctcgagggtgggggtatgctttttccagggcagatggtgttcagcccaagttacggggcagctttggtccactctggatttgcctggattcgcgtatgtgggggcgaacgcgtcttatcggggggcggccggttggggccaggcagcccggatcccagccgaggaggtgcgcggtgctgagaggccgtgggagcgaccatagagaacgcgcgggcggagcgagcggccggatgcggtcaccatagagacgggtgactgacaggcagcggaagaggaagctgcggacaggggctgtgaggtggcagcggctgcagcggcggagccggcgcctcagcgggcactggggtctgttcccccttccccgtccctgctccctgccaggcgcgtgcgggacgccgctcttggtccccacgcctccgccccgccccctcccgggacgccgggagaccccggccgtcctttatccggtgtccgccggcccccggccctgaaacccgggcctcctccccgagggccttgggcgtccctcctggtcctgcgctcgcggcctcgatgctgtctctggcgcggcctccgctcccgccgactggcctgagaacgaggtctgtgccccagtctcccagccgcgacctccgaccccgcctcgcagaacgacccgagctggtctcccgagcccccttctcagcagcccggtgacgtggccagtttatttctgttttgagacgaacggcgaagactcgcgtcgggtcttcgttctagggctagacttggtctctgatcgccgagaggtagcgcaggggctgtgggcccccggcaggggtcctgtcggaagctggccgcgcttctgtttgcgttcccaggaccctggcattgtctctagttgctgcttgtgctctctctttgcttttggtttgcttcatttggcccctggggccctggtaaaaccaggcaccgaatcgctcgcacacagagttccagtccccgcctgctgtctcctcagcagctggggttccgaggagaatgccctgcaagatggctccatcggccatggcgctcctgagaggctgtcagtgctgagtcaccgatctacctcattcgggtgggcagaacttatgtgtgccatgcgagtggctccagaccgctcctgagtgggaggaggggttcctgtagccgttgcgtcttctcaaacacggggagcagagtagaaagaggctctggccccttcccttgtgcccaccgggcctgccgcagtggctcagcagccccttcagtagcccgcctgaggaccgatgccagaggcaggcattcttc

SEQ ID NO: 11536 - DNA, 6000 bp, Homo sapiens
cctggagccttggtcagtaggaaatgtcctgggattggaaagagtacaatggaaagaccagaggcaacgaaagcctaagaaaggagcttacttatcccttttcagtccggagattggaaagaggatgatggaaagaccagaggcaaagaagtctgaggatggacccatgctggtggcacaaactgagcacaccatagtgcctcgagttaatgctcatcagagaatgtccacctgagcctctccttggtcaccagtgctggtgcaatgctcctgcaacagattatacaagaagagaccattcatgaacccgacaacgtggtctccctctcaccaaggccgattcagtcactattgctgctggatagccagcctgtctatagctaaaattaaaaagagtgacaacgccaaatgggagcacacgtggcactagcactttagtagaaggtctgaccacttcttaaaagactaaacactcctgggtgtttactcaagagaaccgaaagcgtcagtccataaaaacatgaacgagaatttcagaatagctttattcgtaaaggctccaaactggaaacagtgtggtgctatcaactgaattgcatccccctcaaattcatatgttgaaatcctgacccctagtaccttagaatggtactgactgtgtttaaagataaggcctttaaagaggcagttaagttaaaatgaggttgttagagtgagccttaatacaatcggattggtgcccttttaagaagaggacattacaacacccagagagagaaccccacgggtgtgtgcacacctaagaaagagcatgtgaggacaaagcaagaaggtggccaactgcaagccaaggagagagtcctcagaggaatccaaccccactggcagcttaatcttggacttgtagcctccagagctatgagaaattaatttcaggccaggttcaatgactcacgcctgtaatcccagcactttaggaggccaaggtgggcagattataaggtcaggagttcaagaccagcctggcatggtggccaacatggtgaaaccccatctctactaaaaatacaaagattgcccatgtctataatcccagctactcgggaggctgaaggagaagaattgcttgaacccagaaggcagaggttgcagtgagctgagatcgcgcctctgcactccagtctgggtgacagaacgagagactctgtctacaaaaaaaaaaaaaaaaaaaaaaaattaattttggttgttaaaccaccaagcctttagtactttgttatggcagcctgagcaaactaaactacccaggtattcatgaccaaaataatgaaaaaacaaatggtatggtatgattttaatgataaaaatctactcaccaataaaaagtaaactactgatacatgaaacaataagtctcaaaaatattatgctgaatgaaagaaaccttacacaaggtttcctaccacttatcatatcctttcagttacatgaaattctatagcaggcaaaactaatatatggtaaataaaatcagaatagtgcttgcttctggggccagatggtaatgggcactgacagcagagaaggaccgtgtaggaactttctaggttctgtaatttttaaaagggttcagttacacaggagtatgggcttgttagcctgagaaacagaaccagtaagagaaacacatgaagaaatgtattgccaggagttggctggtgcacaacggtaggggctggcaaggcaagtctgaaatcggtagggcaagccctaaggaagggctgttcatgactcgttttcctttcccttgggaaaaatcttggaaataaaaattctatggtgtagctgctttataaaacagtctggcaattactcaaaaaattaaacctggagttaccacatgcaactctactcctatgtgtatactcaagagaactgaaaacttatgtccacacagaaatgtgtacaggaatattcatagcagtactatttataacacccccaaagtggaaaccagctaaatattcaccagttgatgaatagataaataaaatggggtattttcaaacaacagctcattattcaggcataaaaaggaatgaaatactgacaaatgccacaaaatggatgaaaggtgaattgtacgagatgtaatatctcaattaaaaaataaagttccaggccgggtgaggtggctcatgcctgtaatctcagcactgaggctgaggggagtggatcacgaggtcaggagttcgagaccagcctggccaacatggcgaaaccccatctctactaaatatgcaaaaattagctgagcgcagtggcgtgcacctgtagtcccagctacctgagaggctgaggcaggagaatggcaagaacccgggaggcggagcttgcagtgaactgagatcttgcccctgcactccagcctgggcgacagagtgagactctgtctcaaaaaaagttcgggcacagtagatcatgcctgtaattgcagcactttgggaggccaaggtgggaggatagcttgagcccaggaattcgagaccagcctgagcaacatagcgaggtcttgcctttacgaaaactaatataaaataaaaaaattagctgggtgtggtggcacattcctgcagtcccagccacttaagaggttgaggcaggaagattgcttcagcctgagaggtcaaggctgcagtgagccatgatcacaccagcagtggtgtgatccagcctgggcaacagagcaagactctgtctcaaatatataaataaaaatataaataaataaacacaatttgaactattgtccttgaatacggtatatgtgcacctttctcagaaagaaagattttactttattacaccaagcaaactgtgtaatggttgcaaaactcccacaataaaatctttgtccaaaagttgtgttgactcactttttttccctcgtgttttgaggatacgacatacatacagtgaagtatatacactttcagtgaccagcccaatgcacgtttgtacaagtaggctccgtgaagccttcactcccccagatcaagaagacccagaacattccagcactccaaaaggctctctcttgctccctctcagtaaccagcaatcctgttctggctcccaaacacagctacttgttactgatagatagataaactgttctatcactttagagtagctttgccttttcttgctcccttccacatgctgtaggaatttgggttgtgacctcagcaagccctcgttctgcagaaacttcacagaaatagaatcgcgctctcccatgagctgcttcggtctcacgccatgtctgcgagatgcatccatgttgtatgcagctgcagtctggtctttttcactgctggtttgcattgcattatatgaatatgccacagtgggtccattctactacagatggacatttgggttttttccagtttgaggctaatatgaataaaagcttacttttatattattaatgggcaagaaggaccttcccatcgagcctgcagaaaggagactcatgagtttggcttggacgtcattaatgcccgtccgtctgccccaggaggtcattatagcccattatgttgttaccgagcaaaagaggtcactgacccgtgcgctagaagccaataaatactaagacactgggtttcagagaaaagaaaagcttttcattgcaaattgaccaacacggagacaggagtccagctcaaatctgtctcgctgtgctgcctttaaggaaataattttattagaaaagggttagagggtgggttccgggattagcaggagatcggtggaaggaaagaggaggtctggcaagtcctcagacatgcgcagttatctcttcatgcttcctcatgggtgctgtgtgcaaatcaaattccggggcagttaatacgaaacatgcgtggaaattcaggctgtgatatcagcaagctctttctgcagaaactccagttggccatattgggtccaactgatttctgccagttttgttatcacttgtcacagtttcagtatctaccccaggaggtcacgattgcccattgtgtctgtcccaggagaggttgcgagaggttcccacccacccccttccactcacagaccctgaagcagagcttgtctggtttcaggcaaaacagagtcagcatcctgaagcggggagggtcaagtctcctgggatgcgttcagaagaaatttcacaagcatttggctgaacttgtgtactgacatctaaatgttgagtaacgtagagtaaagaattaaaaggcaatcaaataaccctttggctcatctttaagtttcttcatgttttctgaaagcttgttctttttcttaagtttatttcaaaaatgctaaaaattagccgggcgcggtggctcacgcctgtaatcccagcactttgggaggccgagtcgggccgatcacgaggtccggagatggagaccatcctggctaacacggtgaaaccccatctctattaaaaatacaaaaaattagccgggcgtggtggtgggcgcctgtagtcccagctactccggaggctgagacaggagaatggcgtgaacccgggaggcggagcttgcagtgagcggagatcgcagagattgcagagattgcaccactgcactccatcctgggggacagagcgagactccatctcaaaaataaataaataaataaataaataaataaataaataaataaataaataaatataaaaagctaaaaattaggccttgcctagagaagagagtcaccctggattctagcctcacctaatatgaggctttccctattttctcagctgaggggtaaggacccttaggaccttggaactcctggattccacctgctggttggagcttacaggcaggggcccctgtggggctgtgacgccctgtgtgatgtcatcaggctttgtgagggggactgtactgccctttgagtactactgtgtggccccgcaacccagcacaaccaggtatctgcttggaacccagccaccataaagcctgctagctaaaaaaaattttacatctctcagttcattcggcacagacccctgcctcattcagctgtgactctgcttggaaaattcatcagttacaaagcagccaatgcaattatctcaagggtaggtgaagtgagccccatgtgctagaagtgggaacaaagatggggggaaacgtctttcactttgaatcagcggaagcagtacatcaaatcactgcgtcttgaaggaggtgctagctctggggattaggtttaagaagatttattttattttttaaagaaggagtagcctcctagctggttacaccaccctaaacgtggactgggcattgtaatggctttagttcatgaaaaatagggaaacttttcattacatgtgtctttatgctggtaatgtttatacagtgactgtattacttatttgaaaaaaatagggaaataaaggcccttagcagtgtcataaagtcctagatcttatatggagatcagtattaagatggtcctaggaaagctaggggttaaaaatgctgattataaactgggcacggcagctggcatctgtaattccagctcctgggaggctaaggtggcaggaccatgtgagtccaggagttcaagatcagcttggatgaaagagtgagactctgtctcgagaaaaaaaaaaaaaaaaaggaaaaaaagtgttgattattgacagaagaattagttgtgatattatctaaagcatggtcatgttttcctgattcaatagactcgtatttttttaaaaacttggccaggcatggtagctcatgcctgtaatcccagcacttttgggggccaaggcagaaggatcacttgagctcaggagtttgagaccagcctgggcaacatagcaagacctcatctctatttaaaaaaaaaaaaaaaaaacaggcgtggtggcactcaccagcctgtagtaccagctacttgggaggc

SEQ ID NO: 11537 - DNA, 6000 bp, Homo sapiens
acttgtctgtcctgtgtaaacacattctcagatgtccaaagtacttctttggcatctttggagttagacagatcactgttggttttacgctggtgatggtggctaagaaggtgaaagacactgaattcagaaagagagacagataatgagagaagaaacacattgaaaggggcaaaaaaaaaaaaagtggaagagaatagtctatgctggaaagaaggtaagttagtttttacagcagaaaaacaatttgaatcatctattgagctccttcaatcagacaggtattcttctagttgctgggaatgaagttttttttttttttttttgcagacagagtttcactcttgttgcccaggctggagtgcagtagcccgatctcggctcactgcaacctccacctcccgggttcaagtgattctcatacctcagcctcccaagtagctgggattacaggcacccaccaccatgcccaactaatttttgtatttttagtagagatgtggtttcatcatgttggccaggctggtcttgaactcctgacctcaggtgatccacccgcctcggcctcctaaagtgctgggattacaggtgtgagctactgcgcccggccgcaaataacccctttatacctatctatttagcaaaatactgcataaaatctattgctagacagacatgagctgatctattacagacagccacttgattgatcctttaaaaggttgatctggcagcacaaaacgagtgccacgcttgattgtattcttggcccatatattatttatacctttcctgcctctagaaagtcatttaaaaattaatcataataaacccatgagtctactaaaattatgataaaatgcaaaacaggccaggcgcggtggctcacgtctgtaatcccagcactttgggaggctgaggcgggtggatcacgagatcaggagtttgagatcagcctggccaacatggtgaaacccggtctctactaaaaatacaaaaaaattagctgggcatggtggcgcacgcctgtaatcctagctactcaggaggctgaggcaggagaattgcttgaacctgggaggcagaggttgcagtgagctgagattgcaccactgcactctagcctgggcgacggagtgagactccgtcaggaaaaaaaaaaaaaaagcaaaacagaacccggctcagtggcacgtgcctgtaatcccagctatttgggaggcacaagaatcgcttgaacatgggaggtggaggttgcagtgagccgagaccaagaccaagatcacaccactgcactccagcctgggtgacagagactgtctcaaaaaacaaacaaacaaaaagcaaaatagaaatcttgtagctgaaaaaataaaagagaattatagtagtataaatatggagtatcttcttaaagtaacagtttttttctagttgaaatttgagaatatatatatgttatatataattattatatgtaatatataaatgatatatatgtaacattaaaaagtatattttttttctggtaagcataaagaatggatgctgtaaatatcagctttcccaaaagcaaaagacaggagtgttctcttttgttaaaagccgtgggcctaatattaagtcttagttttgtaatgtaatttagtttaggtactagataacacagataagtcctagaaattgttcagcatgtcccttggacagtatcttcttaaatattgcttcagttgaccctaaaatagaaaagaaatcagaatcaatatccaaatatttggtgtgattaaagggaaattgatacttgcctatagatggcaattttttgtttttgtgtggaaatttaaaaatctgatttgtattttgaagctagttgaaaagtatctggtaacctgcttagggtttcttacaaaacagtttttggtatgatggaatgctcaaacaagtctgaaattaagcccaggagttctgtaactaaaacatccttctaggaatttatcccaagacacacctgtatgaaacaacaactaagaagagctgacatttgctgagcttttactacgtttcatactctgttataagtagtctgcatggattatctcctttcattcatacaacaactttatgagttctactgctatcctcatttcatagatgagaaaacgatggttagaatgtgcccaggttaacgttgccctatttggctaataaaaatacaggatgcctggttaaacttgaatttcaaatagacaataacattttactgtacatatggctacattctgaatgtgtcttccataattcatgttgaaacaactgacaaagcaacagcactacagtttgaataccttttatccccaccaaaattcatgttgaggcttggaccccagggtaacagtgttgagacagagtaggacctttaagaggcatttgagccatgagggaccagccccccatgaaaagattaacgcagtcactgagagttcccagtctcttgagactggattaggtaccttgagagcgggttgttaataagtaacattgcccctttagccagtgcgcgcttcctcttccgattctctgccacgttatgatgtagcacaaagccctcaccagcagcctaccagatacggctgctggatcttgtacttcccagcctccaggagagtgggaaaacaaatttgtttttaaactacctagtctcaggtattttattatggcagcacagatgaagacaagcctctcacatattgcacaggatatacttaaaccacaaaattattcttaatctggaattcaaatttcaggccatcctgtatttcatctggcaactgtatccaaggacaaacaataacacggcccttacatgatcctaatcagcgtggcctcaaagattgtgtttaaccagaatgatacgctgaaaagagcattttagtgtcattctgtatgatagtgaaaaattggagctaacccaaatcctcaattacgagaataatggttaagtaattattgcacattaatcaggtagaatagtatttaaagtaataaacagatgcatctcatactcatcaggttggcaaatatttaaatatctgatactatcaagggtcaggagaagatgaaacaatggaaatttacatgccctgattaatcctagagcatgatttcaaatgttaatttgtgtataaatcacctggaaatcttggtaaaaatgcagattttaattaagtaggtggagcacaagactccccatttctaacacactccaggtgacgttggtgtcgcttgttgctggaccaccatttgagtagtgaggccctaaaggtctggtcttcaaactcttttgcttgagtatatactaaaataataaggtttaaatacaagaacttagtatccccttatacatatttaaggtgatatttaacatttttcattactagtttaggtagttggaaggattactttctggaaacatatttatgtatttaaataaacttgtaatacacttttaaatatacctagtagactttgccctagtttgcctgccactgctgtgaatagtttctgagggggatcccagcaggattgatccccaatgacgcttatttgatattatactatgtatattttacatgagctgcaaccattgaaggaaactgggcaaagatacctgtgtgctgtctgcactgcccttgcaagagaaaccagtacctgaaatatctgtcaatctccaatcaagacacaagcatggtagaaggagtcaaaagcattcaacttggcacccagcagcagttctctttggctgagggaagtggccacaagactcagctgggggccatcagcggcctacacacccaacaactggagaaatgagtcctcagtccttaaggggaaacctgggtggtacaacatggcatcccctacaccctgacaaccccatggggtatctgtggaagaggggctggggaatgtggttagctcagttcagctcaagaaggccactactttggttcaggtggtgctctttaatttatagtagctgtagaagttcctccattgctacgcgtgtaccccatcagactttaattgtgaagcaatgagttctttaaaaaagttcaaaaatattcttaaccaagtgggatttatttcagaaatgcaaagaagattagtattaagatattcttcaatataacttggcattattggccaaagatgaatgcccacaccatttttcttaaaaattgccaattccccttttatggtatttgtatacattgcactattatcaccaaggtatgagtgtttttttcaccacttctctctttacaccttaatctacattttcttctatcacaagtggcgtttaacttcttttaatatgtttaagggcatttgtctttttttttttttttcacttatggggtctcgctgtattgcccaggctggagggcagtggctattcacaggcgcgatcccgctaccgatcagcacaggagttttgccctgcccggtttccgagctgggccagttccccactccttggggaacctggtggtccctgctcccgggaggtcaccacaccgatgcggaacacagatgcgtgtcgccgcgcaatgggcacagcgcatacagcgcagagctcccgggctcaagcgctgctcccgcctcagcctccggagtagccggggccacaggcagggcatttgtcattaatggggtcttttgagaccgcgggtgacagacaacaggagccaggccacgcgcggcgcctctgcgcgaacgctagggaggactcagcgcgcggcggccggtgacgtcagggcagcgagaggtttcgtcaccgcggcgcgggggcggggccgcctgtcacgcggcgccggcggacgcgcggcgctgggcggaggcagcggctcggggactgggcgagggccctgggcctgaggaggcgcggccgccactgcgcccagcgcctgcgcgacgcctggctgctgggccccggggcagttcagcccgcgccgctcctgcgggtcggactggggctgtggcgggagagaagatgccgcagcccgagtcccagaaggcggcgatcctgggctgcgggcaaggcggtgagtaccctctaggcggcggcctcccggcgtccctcagcacctcgagagctgcggcggcggcggcgcgcggggcctgggcaggctgggggcggcggcggggcagcgcctggctccccgcgggtcctgggctcccgcacgccccctgggcgaggctcgtgtctccgggagacgccgctgcccccgcgcctcccccagcgtctcctgaggcttgttcgcgggcgtgggggcgaggaccagggcgctggcctcgttttcgcgtatttaggacggaggcacacctgatcctgcagcctcccccagcatttcctaaaatgaagtccagatcagtattgtccactttttaaaattaaaagtgcccagaaatagaatagttcacacatacacaaaactagggagaatagtgtggaaggaaatttaatctcgggaccccaaatcactaagccaaagtcaagctgggagctgcgtcaggcaaacctgcccctaagttttgttcctaagacagctgcaaagataaaaagccacacagctccctcaccctttggccaggaggaaattcgctgtggacctccacatctttaccctgaaacagttgtgtggaattgcaccctggcagtgtaaattgacagcttgtcttcgcaggtgaggaacagggacagaactcaagtcatccttctgctcacctgagacagatgcatgtctgacggcttcctctgccctgtatttatgtaaaaatgcagattcactgagccagactaaggcacaagtggctattcctctgcctgccccatggcgtaaattgtgtgttcagtaaaaggcagagcagaggctcaaaagaatgtagccgtttgtctctcatcttacccatgacctggaagccgccactttgagttgt

SEQ ID NO: 11538 - DNA, 6000 bp, Homo sapiens
aaattgcaattcttcctagacacaaagggaggcactggcccagagtcaaggtcatagcaagaccccttgagctgcctgtttcttagcagaagctggagtagacagacatgacttgagacgtcttaaacttgtttggagaatttgggactggatctcccgcccaagcactttggaggggtctgaagagacacaggacgtgtgtatacgtgtgtggggatttggggctgtgtgtgtgtggggttggggcaagggcttggatcaaacatctggatatgaataccaactctgctgttttctgctgactgtgaacttggaagagtttcttatcagttcaagcctcacttccctcataaatgaaatggggatagtaatcattattatgggctgttgggtcccccaaaaatccatgtgttgaagtcttaacacccagtgcttcagaatgtgatgatatttggagatacggtctttaaagaggtgaatcaagttaaaatgaggtcctatgggtgggccctaatttaatatggctgatgtccttataagaagagagattaggacacagacacacacaggcgatgttatatggtggtttagggtctagactgccaaggttcaagttctgctgtgacttacttgctctgagtgaccttgggtttcatattaaattttctgaatatcaatttcctcacctgtaaaatgggggaaataacagtctgcctcatggtgttgctggaggtgtgaggtcagatattaaccatctggcacttccaccgctgcaggtagcttggccattgttattgttatgattaagggcaggtgagcatgtagtgtctttctttgctaagtatgtctgatgccaagtcagtattcattgagcacctcttctgtgcaaggcgcttggaaaggagtgcagtggctctttttccccactcttgcccctgctagattcatcctcaagtcttctctgagttgcttttcctgcagcccgtagttactgaaaaccataatacttatagatgctgctttctagaaatgagcctgtaaagtcttgtattttctcttggtctgcacaactttagggggggtaacacgtcctgtatttgccagttgttaaccttctctttgaccacggagctctagatgatggcaccgataatgcccaggcagatttagttttgatctccaatgaaagataggcctttctgtatttgcagtaataagcaaacacctttagcttgagaggataaacttaagtacaatgtttgttctctggaggcatactgattaactttaaaatatgaataaaaggcagtcctatttcattatggtaagaacacttaatacaagatctgccctctttttttttttttttttttttttttttgttggagacagagctctcacccgggctgtcacccagctctgtcacccaggctggagtgcagtggtgcaatctcggctcactgcaacctccacctcccaggttcaagtgatcctcctgcctcagcctcccgagcagctaggactacaggagcgtgacaccacgcccggctaattttttgcatttttagcagagacggggtttcaccatgttagccaggatggtctcgatctcctgacctcgtgatctaccctcttaacggatttttagtgtgcaagttatctgtaggtacaaggttgtacagcagatctgtcaaacttattcatctcacataattgagactttatgcctttcaattagcaactcctcacctcccgctcccaccagtcccaggcaaccactaccctgttccttttgcctccgtgagtttggctactttcaaagcctcatagaagtggaactgtgccgcatttgttcttctgtgcctggctcatttctcttggcatctttcctccaggttcattcatgctgtcaccaatggcaggatatctcgctcttttgtttttaaaaacagccaaagtcaagtatgtaaaaaggtgggcagctgagaacctggtaccagaatgttccaaggaaaggtactgagtggcacaacctggcctggttctccaccagtaattcctaaacttccccacctggaggctcctgatgacagatgggtgaatggcagagtagatgagtgagggaggtggggagccccggtggggcctggctggtcaaagtccaagcaatctgatcccagcaggacattcctttgaaggatcatgtatcactttacaaatatccacaagctttgcactctatccatatttgtttaggtgtaaaaaaatattttaagctctttactgagaaggaaaatgggatgcacccacatggattccccagcatgcaccgctgagcattccctgtggtaccgctcctcagtttagggtttaggtcaggggccctggaatcattgaaggagacctgtcttcctctcgtctgctgtcttcctcctggatatcacccctgggtcaagcccatggtctcagtgggttagcaatgaatccttcctaagatgcgaacagatgggagctcaacatttgacccatccctggggttttagtttttttgtttgtttgtttgttttgagacggagtcttgccctgtcacccaggctggagtgcaatggcaccatctcagctcactgcaacttccgcccctcaggttcaagcgattctcctgccttagcctctcaagtagctgggattacaggcatgcgccgccacgcccagctaattggggttttaggtttaagaggaatcccagaaggacagggtgatctgaggtcctgagcaactctgaggctgaaactgcgctggtctactttaaggcaggggctgtgattttccctgtgactgaggtcctccaggggtcaactgcatttcaggtgtgtgaggggagagtgactgcccacctggctacccagcccttctttctgagcctgtttactcagctgctggggcctccatgacaggtttgcttggtgaccttacaccgcagtggctcccagggccagagacgtgaccaaggagggaccttgcactgaggaacctgtgaccgtaggaagaccctctaaggccgactcttgcttggcccggcccagtccctcctaccaacactgataagaacttaggttcctagcatcccaggaggcagggtcacaaagacaagctgagaactgataccactgctatacccacccctggacctccctgtcccatgcaggagtctaagccagtgcaaccaaggccaagcacacacccataccacacagcaagggtttcacacggggttttcatttctttacccctggccgaaccatgcaagctaccagccatctacccagacttcttagagtctgccaaatacgtactcagaccagaattaagttcaggccatggtagaggtgaccagccactctgccgtgacctggattcagccatcaattccaaagaagcccacagtgccttgcattttgctggctggtttgtttttgtaaaatgatggggtgggaagcagtgctgggcattggaaaggggctgaacaaggggaaatcttcaacaccttttaaatggaagcatgtctagttggcctcttttctgtaaggaactatactgggcatcacagagatgcaaagactagagtgactgattcaggccctggcctgaaggactttattattgagagttccccgtatatataaatggctgaactctcaggccagtgaatgcctgtgaccaagtgccaatgggtgaaagtagaggttccagaccaggagtgggaaatgcatcaacagagagcttggccacatgctggcctggagtgcagagaaagagtgccaggcctctgggcactgagttctgagctgcttctggagggccaggagatactcccacctgcaaatgactggctgattgcactttccttagagtttgccacctgcatttccgctctacccactaactgactgctccggtgcagggagccaggcaggggcagtggtacctgggtcaggacacgacagcagcctctggcctcaggcagggagtgctggacagtccgtctcctgtcctgctttgtctctttctccttgagctcaggacacagtggggagccctcatgtttctgtaaggtcatcacacaggctggaatgttttttttttcctctctctctctccctgtctttcttttaatggacaaacacccttgaggtcctggttgattttcttagagaaatgtagattctttgattctaacgatggaacataagttttctgaattttgaggaaaacaaagcccaagatttcaacaaccagtgttcctgccaaatccactgggcaaacagaaaagctgcctgcctccggtgctcccagacccccttccttctcaaacacgcatcagacactttgcaccaagaaaaaacaaagggcatccctcctggggccacctctgccccctgtccaggtacgcgctgtctggcgcgccctgcgtgggggccgcaggttcagacacccgggcgcggcgcggggccctgatggatgcggtgaccgaggctgtggctgcgggcgcggcgtctccgcggcagtcgctgcctccgcggccccctccccagccccagccccagccccagccccagccccagccccagccccagccccagccccagccccagcccggctgagcgggcggccggagcatgcgccgtgggcgccgggccgggaggcgggcgaggaggcagcgcgcatcactcgggtccccttcctgcacccagccgccacttgccggttgctaagcagttatcattgtttctgtggcgattgcagaggctgttgctaattggagaagccccactaagcagcggcagcttcctgcttcggatcctctctctgctgcttgcatttaaagagcaaactcgtcttgtctacccaccctccctcccccatcctccccaaaatagccttgtgatttcggaagtatggactaaaatcacactcctccttaccttaccgcttggactctggtggctcccaactcgccgtcagaccccacctgccccggtggtgggaagcgcctggacagaccatgaccacagccaaggagccaagcgcttcggggaaatccgtgcagcagcaggaacaggtaatgctgcttttgggggtccgtgtgtgtgtgtgtgcgtgcgtgtgcatgcgtgcatatgtgtgtgcatgagagagacagagacagagagggaggatatgtatttggggaagaattttgtattttgtattggtttatgactgtagccccctgagccaccaagctgggaggagacgtagagtgctgggtgctgctggagtctgcggctctcctctccctggcttctctctctaaagggcgccctggcttgatgattaaggtacaggcacagggaacctctgtcaaggtaaacttgatgtgaaacacctctggacaaaggcctctctctacagagccgccagatctaacgagttccctgggaaggttcccagctagtactttgtaacttgggggaagagggttgtagccagaaacatcagcgtattctgaccctccaacaggactttgctttggttctaagacaagtcaaagaaaatgagcttactgaaaggacttttctttggatacctcgtggccctttcctcctgtttccctcaagagcaaactgtccctgctagagaagccgaaggatagacggtcgggataaaggaggactcggccgagaaggtgcaggtttaaagggctgaccgcggacggggaaggctgcgtgggtcccacatggcacagggcggccgctcgccttgtcctgagaagaccacggtctgcagaggcccaaggggtgagggaggaaaggtgagtcagccagccgcttcaccacgcgtgtagacatcgtaattccctccttggaagatcttgagggttcttgtcttttaatcattgctcagttcacctcaggcagatcattaaaatagatcctgggagacaccaatagattcacaaag

SEQ ID NO: 11539 - DNA, 6000 bp, Homo sapiens
ctgtcttgcatgccatggctgccactttctcctttccagaacatcccccccccggatttcttggtcgcacactttcttcctatcttactggaccttctgccactgcccctggcagcccctttcctctgctccagcctcagggctgtacgaggcacactgacttctcatcctacacagtctgccttggcccaccctccactccaatgcagagtcaccatctgcagtggtctctgcgatggattcaccaacagctcttcacattggagggtcatctctctgccaatcataactgttctactcccctttccagtgatcaatataggcatggacagtctgaccaacttgacttgcagaagcagctctggggtcttcttaccacttggggctctgaggatgagtccactgttggctgtggaatctggttgtcccatcagccgcagcgtggggctgagtatagtcatgtgtcgcgtaacaacgagcatgtattctgagaaatgcattgttaggagatttttcatgcagacaccattgagtgcatttacataaattgagacagtagagcccactacacacctaggctggagggcattcctcgtacacctgtgcagcatgtgactgtactgcatactgtgggcaagtggaacccaatggcgaggatgtgtgcatctacacatatctaaacgtagaagaggtgcagtaaacatatggcattacatgggcccaccatcgtatatgcagcctatcactgatggaaatgtcatcgtgcagtgtatgactgtattagaatcaggaaaactgaaagagttaatgaaggaggggtaaactggggccagtaagagacggaagatagagagctaccagatgcatttcttttctttcttttcccccaaaggactgttcttgcaaggcatggtgggtctccacagcctgtacagaaggtaccctgtgtgactagcaaccacatgtcacgcaacagccatggtcggctcagtgaggtgaccctcaccatagcttctccttcactgcttcactcacctctttccctcactcttgggggattgtgctttcatggcaagtaagctaaggcacttcccttcatagacaaacactattctgcttttgaaaacgatgacataccacttcacatccactgagatggctagaatcaaaaactcaaggaataacaagtgttggcaaagatgtggagaaatcagaaccctcataccctgctgatggaggtttaaaatcatgcagctgctttggaaaaagtccagcagttcctcaaatgattaaacatagagttaccatgtgacccagcaagtgcactcctagtaactccacccaagagaaatgaagagctacacccacatggatgagcttgtgcacatttatagcaacatcattcgtaatagccgaaaagtgagaacaacccaaacgtccactagctggtgaacggataatcaaaatgtggcctctccatacaatggaacattattcagccataaaaagggatgaagtgctgacatatgctatgacatggatgaaccttgaaaacattatgtcaacaaagccagtcacaaaacatcacatattatacgattccattcatacgaatgtccagaacaggaaatccatagagacaggaagtagatcagtggttgccgtgggctgggggtggaagtcgggataaggaggcaataactaaagcatatgaaggtcttttctggggtgatgaaaatgttctaaaatggactgtgatgatagttgtacaactctgtgaatacacaaaaaaacactgaattcaccgtttaaatgggtgaattgcacaatgcatgaattcgccctcactaaagctattaaaaaatggcgtagtctgtattgattgcctttaaaagacgttcatgatcacttaataactggttccactaatgtgaagttgatcctatttgtgtttttttaaacacatttatggatagaaaaaatatttggaaatacatacctcaaaatgttaacaatggtcatctctagttggtaggattatagactatttctttaaaatatatttttccacgatgttttacaatgagcatgtgatgcttttatatgaaaaaatatatatttggtaatctactttatcttaagaatatttcttacaaatggttattaatgttataataaaaagaacagtaagaacagactaaaggcaagattgctcactacgtgacacctcccagtctttaggcctttatgagtgcatgattcttccgtatccgaaagagctacagccgtcctgtgctcccttccgccagcctgttcagtacagaggccaccagtctgagggttacttagtgatctgggaaggcacggcgaggtgtttaactcaacaatagtcaactcccctagagtaaggccacatctgtgatgatttctgtattgtggggcaattaagaactaaacggtgccatcatgagcagatttccctaaatgctgaactcagagtggctgacaggggctgaagagaatgaaccccattatcttcaacacacggcccacgattagcagggaaacaaaatcaacaacagctttgcttgaggataagcaaatttcaacccctgaaaatcttggaatgtggttactgatatggaggctcggtcttcaaagggggtattcaagggggtaaactcaaactctcccactgtctttaccccaggctgcatttcttcatggggccagactccacaggcacctgggcaaacacacattgggaacgcagtgacaatctctacctacgactcagaggccacgctggaggccctcagcaggaaccccacgggcaaccttcccacattcccacgggacatcttggtcggtgtaagtgcaacagccacagagccacagggtgcctctatgactccaggatcttccatggttcataatgtcccagtacagatgagaggagggacagagtcagagaggctgggttgtatgaacactggtttattaggtagataggaaaagaagaatgaagtcaatagtctttagcaagccaactagctcaaggaatagacagcccctttccattctggagacaacacataaatctattaatattaaatattgtcatgaggtatgcacctgcccacaggggtattatgatggaaatactggggtagtctgcagggccaggtacaaatgacgggaaacaaagccagagaaactgaaatacctcttggaccccagaagacagatgtactgatttctgggatgtcaggagcccagtgcagagcagctggataggtcgctaagagctttcccttctgcttatcgggtctcacacacctggataaaccagttattgaaagctgacctgctaatgagaagcttctggcacttgctggtgtttcctaattgaatgggtgactgccccgcatctcagggccggggctcccgtgcggacgcctctccatgaggttagcagcttgatttagatcagcgtgcgggacggggagctcacagtggggtcgaggagacacagcacaggcttctgaaaggtgccctgtccattagggagcaccccatttacagatgggtcatccttcagctcactagtttcccagcgcatgacagtgggtagcttttttttttcctattataaacaaatcttcgatgtgactgcgatgatctacggatgatctacgtatctggttgtgtgatcctcaagcacttatgcaaggtggagtgtaaacaatggccaagacccaaactgcaatgttccctgaagtccaacctgcttggagtccttgggaacgtgtacaatggttaacaggcttgagaggagtcagctgggagagtgagagcgagactgccctgcagaggggccgctgaggatggacccctgtaggccgtccacacccaccacgcgtgtcatcctcaggaaatgcaaccggatgctcggaatttcgcccctaaagcgactcagggcagtctcagctcaggaagacttctttttttgaccttctggcttaaagccacaaccccaggctgaggatgccacatcaacggcgtttcctcgccacgctgcaggcgtgactcacgtttctaagcctgcagggtccccgggccaagcgcggctactgagagcacagcgtcctccctcagcccctgctcatctgcacggagcaaagccgcagctttctctgctgtcagcgctttatacgactcggatgtaggctctgagcgggcacgggcccgccctcagacggcgacccgaggggcaaacaggatggaggcgcgctcccttggaggctgtggtctcgattttatctgctcctgggtggtgcgggtggtttgctctctaggcgtgagcaaaggccacaaggggcccgaaaaaatcacccaaggatgcaagcccgccattgcgctgagcaggggcctccccgccgccagagcccgcgcccctccagggaggcccgcgcgatcgagacccgccgcctcccggccaggcgcgggacaccaggcgaggggagccaggagccgggaggggcggcgccgggcccgcaaccccaccctgtcctgcctccgcctcctcccggcaggaccgtcccctcccaggccccagctccgcggccgcccactcgcagccggccagtcccgctcgggcccgcgtgccccgcagccgccacgcgccccgcagtccgtgccgaggctcccgcccgagtgcgcgcgggccggcggtggcgtgtgcgcacgtcatatgggccgccggcctcccattggttgcggccgcctcaccagaccgcgtgcggacgggctcgcgggcggggcggggcaagctcaggccacgcccctgggcggtgcgcgcgggcggtgggtaggccgggcaggctcacgtgatgcgggccccgcggcccgccatataaacccgcgcgcccgccaggcgctgcggccgtcccgggccgtgactcctcctttcccccgccccgcctccgttcggagagccggcgggcgggcgcctctcggccaggtacgcggccggctgggataggggtcgcgggcgggctttggtcgcgcagcagccggtcctccccggaggtaggcgggcgcgggccctgttgggtctttgggacgcgggtcccgctggggccggggatgctgctcgctgtgagcgcgggtcccgtccgccgctggccccgggcgggcgcacgggggtctaaccttggggggcggcgctgccgcctggcccgggtgccggggttcgcgtcccgcggggccttcctcgctctttgtctcttctgagtgaacttgatgacccccttcttccaggaagcgcctcttggacgcgtgtgaccgatgcccagattgcacgaccacttctggagctgctcctgtgcgcacagcgcgaggcgccgaggccccccgcgagccagcgccgcggggctggcggccaaggttggggagatgatcaacgtttccgtgtccgggccctccctgctggcggcccacggtgccccggacgctgaccccgcgcccaggggccgcagtgctgcgatgagcggccccgagcccggcagcccctaccccaacacctggcatcatcgcctgttgcagaggagcctcgtgctcttctcggttggggtggtcctagccctggtgctcaacctgctgcagatccagaggaatgtcactctcttccccgaggaggtgatcgccaccatcttttcctccgcctggtgggtccctccctgctgcgggacagcagctggtgagtacccctcctggttcttctggaagtaaaaagggtgtcttttcggttgaaagtacttttcagcctataagaaacatgcatttgaaactggaactatccacagattgaaagtgtgcatctccagtcttgggatttagagaaatgaaggaggggtagagaggacctggcacccccgagggcgggttcgggccacagctctctgaagtttgaggaagcacagtgatggagatgaggca

SEQ ID NO: 11540 - DNA, 6000 bp, Homo sapiens
ctgtagtcagaggctggctggggctgctgtcatctgatggcttgactggggctggaggctctaagctccctcacttggctggtgagctagtgctgggttgtagtgtggctgtcttcacagccacatgggagcttgttttccccaaacttagcgacttaatagaacaaggcagaagctgtaatgtcttttatgatctggcctcaggaaccacacaccatcatttctgcaatgtcctatttgttccctgagtttaccttatttgttttgggaggggagggtcccagtgtgtgaatactaggggcttgactcattggcaccattgtggaggctggcaccattccagtcccatgtattgagggttatcgctcactatacaaggtgaggtcatcataaaaatggttggtgtttatttatttatttttattatttatctattttttattttttttttgagacagagtttcactcttgttgcccaagctggagtgcagtggcatgatctcggctcactgcaagctccgcctcccaggttcatgccattctcctgcttcatcctcccaagtagctgggactgcaggtgcccaccaccacgcccggctaattttttgtatttttagtagagacggggaatgttttgtattttttgtagaaacagggtttcaccatgttagccaggctggtctcaaactcctgaccttaggtgatccacccaccttggcctcccaaagtgctgggattacaggcatgagccaccatgcctggccaaaacagctggtatttattgagcacttactatgtactgtgctgggtattagctaatttaatcctccccacagccccgtgtcaggttgctggcatcctccgtgttttacagagaaggaagctgagacctagagcgaataggtaacttgctcaaggttatgtactcctgaagtgtagagctggaattcgaacccaggccttttggctccacagcttggatccgaaccactaagctcttctagcattagaatgtcagctcccagacagtcttgaggggcacgtaatttagtagtttttgcactttttttttgagacaggatctagctcagttgcccagactggagtgcagtggcacaaacatggctcactgcagtctccacctcccagggtcaagagatcctcctgcctcagcctctggagtagctaggcctacaggcacacacaattatgcctggctgatcttcctaatttttagtagagatgaggtctcactgtgttgcccaggctggtttccaactcctgagctcaagcaattctcttgcctcagcctcccaacgctctggaattacaggtgtgagccactccatctggccatttttgcactttgtccacagaattctttccccattataaatctttggaaaaacccagtatataaagcagaaatgcacagtggctctgattaaagtaggggaggatggccaggtgcggtggctcacgcttgtaatcccagcactttaggagaccgaggcgggtggatcactggagttcaggagtttgagaccagtctggccaacatggcgaaaccccgtctctactaaaaatacaaaaactagctgggcatggtggcaggtgcctgtaatcccagctacttggaaggctgaggcaagaaaatggcttgaatccgggaagcggaggttgcagtgagctgagatcgtgccactgcactccagcctgggagacagagcaagaccttatcttaaaaaaaaaaaaaaaaaaaaaaaaaaaaagtgggacggaggatgttcaatccttacctgtaggggcgcaaggccctcagtgggacccccgaggcaaggtgtctccatgcagcccctagggtgataaggagcctggtttgaagaccactgctctggtcacttacagatggggattctgagggccaaggggtcttggctggacagaggagcccagccctgctaacctgtaggcaggcacgatcagtccagggcacggctctgggggcactggcccttccctgctgtgcaggggctgtgactgccggcttctctgccgccctaggatggtggaacactgtctacacatgttcgaccggatggtcatctatttcttcatagcggcttcctacgcaccctggtgagtaccgtcccgccgcccagcaaacccttggcggcctttcttttcattgtttgaatttatttttctatttggctgggtaatgtgttgacttggcacaaaggagttaggttaaaagcttcccgccacccttttttccttcctggaagcagctacttatacccactttcctgtgttattttatgcagaaaataactcacttcttgagttattttatgcagaaaaagcaaatatatacattgttttttttttttctgagaattctgagacagaatctcactctgtcacccaggctagagtgcagtagcgaggtcttggctcactgcaacctctgcctccctggttgaagcgattctcctgcctctgcctcccgagtagctgggattacaggcacgcgccaccacgcccagctaatttttgtatttttagtagagacggggtttcaccatgttggccaggctgctctcgaactcctaacctccagtgatctgcccacctcagcctcccaaagtgtttggattacaggtgtgagccaccgtgcccatccagaaaagcaaatattaatatgtacatatgtatgcatatgtgtctacatatatacacatatataaatatgtgtaatagacatagacgtatgcatacacatgcatatacatacatatatacttatatttatatttacttaatatttaatttatttaatatagcttttaaatttttaattttttttttaagagacagggtcttgatctgttgcctgtgctggagtgcagtgttgtgatcatagctcactgcagcctccaactcctgggctcaagtgatcctcccacctcagcctcccaagtagctgggactgcaggtgcaagccaccatgcttggctaatatttttatttttgtagagatgggtctcagtatgtagcccaggctggtcttgaactcctggcctcaagccatcctcccgcctcagcctcccaaactgttgggagtacaggcgtgagccattgcaatggccacattttaaaagtatatatttattttgtttttattttttgttttgttttgtttatgtttttgagatggagtcttgttctgttgcccaggctggagtgcagtggcatgatctcggctcactgcaacctccacctcccgggtttgaatgattctcctgcctcagccccctgagtagctaggactacaggcacatgccaccataccctgctaatttttgtatttttagtagagatggggtttcaccatgttggccagggtggtctgaaactcctgacctcaggtgatctgcctgcctcggcctcccacagtgatgagattacaggtgcgagccaccgtgcccggcctgagtttctcttctttacctttacccctggttgtgattgactgggcactgccctgtgccaggccctgtgctggtatctgagggtattgtcacaaacaaaacccccagctccctctctttgttggggacaaaaacaaacaaaccgaaaaccaaataaatattgaaggttttacataaacagggagaatacattttcaaaaagtctaaattacagcaatcagagagaagctgatggaaatgaaagagacaaattctgcaggcattgagactgaaaaagtaaattatttgcaatgtgaaaaaaacaagctggcttctgaatgtggccacagcaccatttaatgctgacacacagtggagacacttctaataatttcccagagataaacttcagaataaactatcaaatggggttgtcatgcagacataaaaacaataggcaccatggtcacgcatgaaagaagtccaagaataccatatccatgaggagtttttgaaagaaactagtttgtgatggcatgtgcctgtgctcccagctactcaggaggctgagacaggaggaccgcttgagcccaggaagtcaaggctgcagtgagctatgattgtgccactgcactccagcctgggagagtgacacccggtctctaaaaaaacaaacaagaaactgaaacatgtaatttaaaaaatccacctgccaggcgcagtggctaacgcctgtaatcccagcactttgggaggctgtggtgggcagatcatgaggtcaggagatcgagaccatcctggctaacacggtgaaaccccgtctctactaaaaatacaaaaaattagtcgggcgtggtggcaggcacctgtggtcccaactactcgggaggctaaggcaggagaatggcttgaaaaaaaaatccacttttttttttttttttttttttttgccgagatagagtttcgctcttgttgcccaggctggaacgcaatggcgtgatcttggctcagtgcaaaccctgcctcccgggttcaagcaattctcctgcctgagcctcccaaatagctggaattataggcttccgccaccactcccaactaatttttgtatttttagtggagatggggtttcaccatttgggccaggctggtcttgaactcctgaccacaggtggatccacctgcctcggcctcccaaagtgctgggattacaggcgtgagacactgcgccaggcagaaaatccagttttcttgtgctttacataatttatcttaactttagagtccaagtgaattttatggtgaagaaacatttgtttgaagttcagcaaaatttgtaagtgtccattttcttcttttgaagtcaagttaaaattaaatgtaatacttttaattaaaaaagatgtgtataactttaattctcaccctttctcctttcccttcatcccgtcctatccttctacccagtgacctatttttaggtctacttggaaggatatctagaatgatgttcactgatggttattttgggtaatgagatgggttattattttttactcttaaacttttcggtgttacttaaattctttataatgacagactccaagcaggtcactttttttggcagaagttttacataacacattctcatttcagaaattcattccaggccaggcgcgtggctcacgcctgtaatcccagcactttggcaggccgaggagggcagatcacctgaggtcaggagtttgagaccagcctggccaacatggtgaaaccccatctctactacaaatacaaaaattagccaggcatggtggtacgcctgtaatcccagctactcgggaggctgaggcaggagaatcacttgaacccgggaggcgaagggtgcagtgagctgagattgcctcactgcactttagcctgggtgacagagcgagaatccatatcaaaaaacaaacaaaaaaagaaattcattccagaaaaaacttaaaggaccctcttcctcagtcatcaccaccattgttaactacacctttccagacaaaaccacttaggaagaggttcagatctttttctgtgcattgaccgttatcccttttttttttttttgagacagagtcttgctctgttgcccaggctggagtgcagtggcgcgatcttggctcactacaagctctgcctcccgggttcacgccattctcctgcctcagcctcctgagtagctgggactacaggcgcccgacaccacgcctggctcattttgtttttgtatttttagtagagacggggtttcaccatgttagccaggatggtctcaatctcctgacctcgtgatctgcccgcctcagcctcccaaagtgctgggattacaggcgtgagccaccgcgcccggccaacagttatctctttatacatacacacaatattgtcatcttattcttcttggttcataccctccaccctcctgaacacctcacaatatagcttagagatctatctatgttggtaaaaacagttcttcttccta

SEQ ID NO: 11541 - DNA, 6000 bp, Homo sapiens
tttctttttttttgagacagagtctcgctgtcacccaggctggagtgcagtggcatgatctcggctcactgcaacctccgcctcctgggttcaagcgattctcctgcctcagcctcccgagtaggtgggattacaggcacccaccatcatgcctggctaatttttgtatttttagtagagaccgggtttcaccatgttttccaggctggtcttgaattcctgatctcaggtgatctgcctgtctcggcttcccaaagtgctgggattacaggcatgagccaccacacccagccatgcctggacttttaaaatactcaaggaccctctgaaagtccttctatcatcatcgtgaataaagtcatacgctgggcagagaatttccataattacagttgtgacttctacccctttgatttaaccacaccagaaagcttaaggaataagaaaaatagtgaaaatatttcagtagtttggcaagatcagtcagtgaggaaaaacagcagtgaggaagtggaaggagcttatcaattatcagtattgtcaatcctggcggaaagcagggttgatttggtatcccagatctggagcaggacaagcttgtccaggagaaacctctgtatgtagattcatagaaaattgaagagggaagaataaacctggagagacaaggtgatgaaaattcaaagaggtagaggtgtccaggttacccagcttgtcacactggcagtgccttgcctcttaaaggttgcttaagtttctgtgatttatgccaggagtcctcaacccctgggccactgactggtactggttcatagcctgttaggaaccaggccacccaggaggagatgagccgtgggtgagcaagtgaagcttcattgtatttatagctgctccccatcactcacattactgcccaagctccacctcctgtcagataactggcagcattcaattctcataggagcatgagccctattgtgaactgtgcatctgagggatctaggttgcatgctccttatgaaaatctaatgcctgatgatctgtcactgtctcccatcacccccagataggaccatctagttgcaggaaaacaagctcagggctcctactgattctgcattatgacgagttgtataattatttcattgtatattatagtaataacagaagtaaagtgcacaatgattgcaatgtgcttgaatcatcccgaaaccatccatccaccctgctggtctgtggaaaaattgtcttctatgaaaccgatcactggtgtcaaaaaggctgggaccactgggttatgcagttgccaagctgttgttctattttgggccgacatgccccactccccactcatcttaggctgctttgtggtaaagaaagcaagagtgtttcctctgagctcctggtgggcagtgggtcgtgatggaagcttgccatttctcttccagatcctctggaccttctccatctacctggagtccgtggctatccttccgcagctatttatgatcagcaagactggggaggccgagaccatcaccacccactacctgttcttcctgggcctctatcgtgctttgtatcttgtcaactggatctggcgcttctactttgagggcttctttgacctcattgctgtggtggccggcgtagtccagaccatcctatactgtgacttcttctacttgtacattacaaaaggtatgttgggtgcgacctgcgttgtttctagagtgacgtgttcttttaggagtgcccttgcccagcactcttctaatctggcactctctcataaactggctccagagaaacactttcatgattggccaataacattctggatcaggatgttgtctttttaaatataagaaccctttttcttttgcaatagcttttcctaaagtgacacattttcactgtaaaagattcatctggtgtttcagtgaacattaacaccagatacctctctatgcatacacagacacatgacttaaactgtacattgctgttctatacactgcttttatcccctcacatttttcatgtcactagaaatctacataattttcagtagccacagagtgtttcattatgtgcatgtaccataatttatttacccagcccccattcatgggtggtcaggccgttactggtttgctgttaaaatccagtcattaaatcagcatccttgtgtatatgtgtttttgcatttgtatgaacataggacgtgtgaactttacaaatatttgatgaaagctatcatccttgttcagaaaaaaaaaaacatttatgccaggtgcagtggctcacgcctgtaatcgagcactttgggaggccgaggcgggcggatcatgaggtcaggagatcgagaccatcctggctaacacgtgaaaccccgtctctactaaaaatacaaaaaacttagccaggcgtggtggtgggcgcctgtagtcccagttactcgggaggctgaggcaggagaatggtgtgaacctgggaggcggagcttgcagtgagcccagatcgcgccactgcactccagcctgggtgacagtgcgagactctctctctcaaaaaaaaaaaaaaaaaagatatttacgcaaatgcacccaaatgcatgtatatagttttgaggggttcaggagcccctgaaacccaaccacagatcccaggctaaaaatccagctatacaataaaattcctaatggtggaattgctaggtaaaaagcatatataggtcgggtgcgatggctcacgcctataatctcagcactttgggaggccgagatgggtggatcgtctgaggtcaggagttcaagactagcctgaccaacatggcgaaaccccatctctactaaaaatacaaaattagccgggtgtggtggcacatggcctgtaatcccagctacttggggggctgaggcaggaaaatctcttgaacccgggaggcagaggttgcagtgagctgatatcacgccattgcactccagcctagggaacaagagcaaaactctgtctcaaaaaaaaaaaaaaaaaagaaaaaaaagagcatatatgtcttatctctttccttttgttttttttgagaccgagtctctctcacccaggctagaatgcagtggcttgctctcagctcactgcaacctctgcctcccaagttcaagcgagtctgctgtctcagcctcccgagtagctgagattacagtcgcgcactaccatgcctggctaattttgttttgttttgttttgttttgagactgagtcttgctctgtcacacaggctggagtgcagtggcgcaatctcggctcactgcaacctccaccttgcagcttcaagtgattctcgtgccttgaccaccctagtaactgggattacaggtgcgcaccaccacgcccggctaatttttgtatttttaatagagacggggtttcaccttgttggccaggctggtcttgaactcccaacctcgtgatccgcacacctcagcctcccaaagtattgggattacaggcgtgagccaccacgcctagcttttttttttttttttttttttttttttttttttttttttttgagacagagttttgctcttgttgcccaggctggagtgcaatggtacaatcttggctcaccgcaacctccacctcctgtgttcaagcgattctcctgcctcagcctcctgagtagctgggattacaggcatgcaccaccacgcccagctaatttttgtatttttagtagagatggagtttctctatgttggtcaggctggtctcgaactcccgacctcaggtgatcctcctgcctcagcctccccaagtgctgggattacaagcatgagccactgtgcccagcctaatttttgtatttttattagagatggtgtttcaccatgttggctaggctggtcttgaactcctgacctcaggagatccgcccacctctgcctcccacagtgccggaagtataggcgtgagctacctcaccctgccatcctttgtgtttttttttttttttatctttttaaagagacagggtctcactctgttactcaggctgcaagaatgcagtggtgtgatccttcctcactgcagtcccaaactcctgggctcaagtgatcctccctgctcatcctcctgagtagctgggactacaggtgcatgccaccacacctggttctttttaaaattttttttttatagagatggggtcgctctcactttttttgcccaggctggtcttgaactcctagcttcaagggatcctcccaccctggcctgccaaagtactgggattacaggcatgagccactgcatccggcctttatgttatagtacccagaatttcataggcctccctacataagctatattttactatatattgattagggtgaaagtcataataacaaaaagccactatgaatttagtggcactttcaatcaaatttgtatttttaaaatacaattgcttatttcctataccttactatgtagaatcttgtgtgtgggagacttctaggaatgggaagaaggaagctaagtttgtcaatatcagtaaccttttgttttcttttcttctctttgaaattctagtactcaagggaaagaagctcagtttgccagcataagtgccaaagaccatcaccagcatctgtccttcagggtgctcggacagaattcttaccacagcaaaggcataagatgcttgatacggaaaatcagaaacttaactcttttgttgcagatagtcatcagtggctctgtaaaaacgcagaggaaaagagccagaaggtttctgtttaatgcatcttgccttatctttttttattactgtgtacaaagatttttttacacaaagaaacttaatgctgtattaataaattcagtgtgtagcttcaattgggatagttccaaaagtgaagattttgtgaggaataagtgcaaattttttttttattttaaaaaattctttgaaactcttaagtctttgtgtctgcaatgaaattgtactccttgacagttgatagattatatattcttccatccctcaaacttgcattccactatatttattttttggcaaaagatgagctgtatttgtttgaaatctgagacactatgttcaattggatgtatctgttcaaatttattcccacgtgacgtggaagtccttcgttggatgtcacaacactacatttaaggttggtaaggatgacttggaggtccatggttttcattaccaacattttaagattctgaatgtcgatggagtctcactgaagagtcaccaaaggtgcctgccctcctcccctgctgggaagtgtcagttggagactgtcccaagggtgctgaagaatccagtggcaggggttctggctgctttccatctgagtgtgggatgggaggggtgttcatgatcatttggatatagcaatctactctgagaaatggaacacaaggagttacctatcactttcacttataattccaaaagatgactacaaccatgtccatgctcagattcaaacagttttccatatcacttttgggtggtaagatgatttaattacagttttttttttaattggcagcaccactaaccattccttacattcttttttgtatgtgtggttttctttttatttaacccgcagccgacatcgtagtttcttgttttgttttgttttacagagctgttgcatgacttatgttaccatcctaaaaaacactatattaaacatggaataaattgtctttttatgaattaggctttttgaacatcctgtgttgggatttttttgtttttcaattggcaacaaaagctctgtagggctgcagacatttaaagttcacataatcatctgtaagacattatgtattttgtggaaatactagaatttttttcctgattttgccattatatggatttgctattttttgattaatgcaaaagtatatgactttgttttttatgtgatacaccataaatattaaagt

SEQ ID NO: 11542 - DNA, 6000 bp, Homo sapiens
ttatctgccaatgctaacttccaatatatttctgccttctctctttagtcaggtaatatactagcatagcatctgaaattattttaagtcattttattgacattttcactattttatattattaaagcaaatcacatattaaaacacacatgaagtattaaaaaatattacaattaaaacttttggaattggaaatttggattacactttattttcagaggatattttcaagaagtatggaagtgagttggggcgtatttatgtttaaagaaatttaacaaatcagtgtttttcaggttttaaaaaaacttatttggaaagttgctaacattttatgtttgactgtaattaaaatcttttttgaggtagagaacgcttcaagaatagatgctgtcagcaattgtttcatgtatttcatctaaaaatattgttagcattgtacatgattcttttcataattcaagtgtattgggtaatagtatatgactagatttagagtaacattatagaagtatttatattggtttgaatattagagatattgctggcttatttagtctatttctttgaaactgaggagatattggtaatggtgttgtagttaacagttgagtgctcttagaatgcatggtactatgctagaattccaaggtagagaagataaggaactaaacttttcaggggtttaaagtcctttgtttttagaaagaagaatatataatcaaaagataatgactgttaaaataatgttgcttagatgtatctgtttgtgttccatatgcctattaaactaaatcattatatgtcatatgtactgtttgaaatttcacctgcttaaaagggataggtactcaagtgtattcttatttattatttttctttctctttatttttctgtctgattatggcagttctatgctatactttcaacatttgttccctctccctttttccttcccctataaaaaccattccatagaaatgtaaaaaaaaaaaaaaaaaaaaaaagaggttgttattgttaactcacatgtgttgtgtaaagataccattgaaaaagtggctatctagtttgatttttagttatattttctgtggagtcagtcttgaagacctatgctttttataaaatgttgattattcttttggttatatgaacagaaaaggacttacagaatttcgttgttgaaagcaaattttgagctgccatatgcattacaggcaacctttgatttttttcttttctacaacaatggaaaaacaggtttagcctggataattgaaatcaaaggacaatcccaaatcttgtccatttaatcttctctcacatccaaatattttgactaggactagcagcaagaataatcttgatttatgtgatttttttttttctctagacaggcaagaaagtaagaggaactagaaccacttccctccagcctccttcatttgtttaatcaccctttaaataatggtttgttagtggcttgcaatcagaccttctcattcatcctcattcatttgttttaggacaacaaattttaaaaggaaagctctaagaagatgttattttctgtttactaaattagcaaatgaaaccattgttaaaagaagaaaatagtgattgttagtgctctgaaaaatcaaaccaaaccaaacaaacaataaataagtgatcttgaggttttgttcacatggcactcttgattagaaataccacattttccctactgggaatttttagaacattagaaaattttttcccacacattgattataatgtgtgaatatttttttcacacaatattatttagggtatgtaatcagtcccctaaagggattcctgtaggggcactaggtgaagagtgcaatttatttgaaatagaggcagaattttttcaatgctgagtatattacggtttaatttccacctttccaaagttccatttataatttggtcaacattttggttttatttttcctatgagaattatttatggtgtatctagtgtcccataacttccttctgggacattggctgagtatgtaaagggaagagtgccacctactgagtcaccaatagtcacctacctccttagcacctgggttttcctatggagcaagaacaagcctgccccatttgggcagcaatcactaaagagcataaagttgatatgagaacatttaatctcaaaatgaaatctatcgtacctccaagatattcttttctagaaataggaatatatgtaaattaagggactagaggtttacagagttttttgtatgggctaaataatatagatgaattaagatgtggtgttaggaaaattatttgcctattttaagtatataatgtcctgctttttcttgggaggagatcttttggcatggctgtccattgaaagtattttcatctcattactatataaggctcttgatactacgtacagtttttatagctacccaatccaaattatcattggttttcttcaaaaagaagaatctaaacatattaaaaaattagcattatatgaaaaatttgcaaatgggcttattgctcctgttaccagcattaaagtattactagaaagaaggtagacacaacagagtaggaaaagctgctggtgatttgaaacacagtttagttgtctcataaatttcagattaagtgtcatatatgggtgataaaagtggcataggctagattttatatactcatgattcacttagtttgtctttttcaattaaagctaagtctctttttcattccactgaatttacatttctttttcaatcacattctgaacacattacaatagatgctgcctaaaactgaatatagtgtaaatctcagactaatgtgttattcactgtggcttctttgaaaatatgtagtaaaaagattttgattattgtaaggtgctatttatcaagagtcatcttttagggttgaaagatgttcagccctacctttaaacagcccagctttctatcaaaatacatcatttagcttcccaaagtcaattttggaaattttgtccaatgattggattgtaagactctggtattttttacccattgtaccatgagagctcttgtgccagttcatgtcaccttttccatgtttgaaaagtccacagttcatctgtaacctgtaaaagtgctaagtaatcagggaaagacatcagttagaacaatcaataacttttcaattagccattttccaactttgggcatttggctctgttgatttgcatgtgcccagtttaattgatttttatgtttatcagtacctgtttggtcagagccataccctgctttaacagagaagagcatgtcttttttttttttttttcctgatggtagcttacattctagggtaggatccctatcatattaagtttggtgacagcacatctcaatgaaagcagagagaaatctggcccaattcacaatgtagagagagatgtggaattaagttagaaaggccatgggggtgctgtgtgattggttttacctttattttattgatctgcggctaagcatatggtggtagattcagcccaattcttgcgccctccccctcccccatacaattcaggccatcacagaggctgagtgtgtgtatatgcatgggccaggaggtattgggtggttggaggactaggcaggaagaggaggtgttacctttgtgacttgtttttaacctccagtatgcaagccctattctaggctgtttgatagtcgggggtggtgaggacaagtggccaaactgcttttcaagagtgggaatctgtgctagatactacatccagaagctgagagttactttatcatttgcaaaaaaatttaaactgttctgacctggtgtagttccaccttttcactatgtgatctgtgtagaagttggcagaaagcagttagtgtgtgtgtgttagatacttgtcccaaccacttgcgactccagggaaaggtggggtggctgttttttaggaggtctatatgttaaaaggggggaaaaaggaagattggagtactattcagtgatttggtgtgtttgcctcttaggggtctccatggcaattgagagatttctaacttaaactgctcaagattgctgagccagtatacgtcaacttttaattttgttttcagaccttaacatttatcgacagagcagttgtaaatctgatcttttcagaggccttctcccccagatccttacagctgtaccgtgagataaggtttactcttgacagtgttaaggtgtattaggagctaaaatcccatcacgtttactttcaccaggataactttttcctgctgatgacttgggctggggtggaggctgatggagataggggtaattctggggttaaatgcaagcagtgtagactctgcagtctatttggctgccggcccggaggcaggagatgggggtgggtgggggtagttagacctggtagttaaaccctttcccgcgggcgcagagtgggcctcccacgcttctctcccgtggccagtatgcgtgagagtgtgagttgagcccctgcctccgaggaagaattctaaaaaccgggctaagggtcgagcgagggaggctgaccttttcttgttatcaaattactgcgtttccctgaattacgggcactcaggaatggtgaaatctacatattaaccgaggaacacgaccctcaaaggaaggtagaagaaggctaacgctcttgctagtttactgtgcttgctagtttaccgtttgcagggctatttagagcacaataagaagcttcaaatctcttctccaaccagccagaggaacacttgattcgcccaagactcttattgcttgcttttgaaatattaccctggctctgagctacaaagccacagatccagccccatttgtctagtgagggctctgccccagacccggctctccatgctcactgctccgcctgagaggaaccctggggtttaacgctgaagtgcgtttctcagagggcagagctggagcatctcgcagccctacaacttctttgcggcgcttggtctgtctttgcgttgcgagatcaggatcggtgtgttgctcagacaccggccgaacgccaccggcacgtctaggagtctcctgtgcctggaagaggctggtttcattcgattctaaaagaaacgggtaaagtgtagattttaagaaataacctagatttcaaaagcttaaaaaccaaccaagtttggttgtggacagtcaacaaactaaaattatttcgggaactgcttccagtttaaagtttttttttttttttttttttttttaagcaaagcagtttctactctctccacatcacctttgagaaataatcacgaaaaagtcactgtttattaaataattttagttgctttaaaccttttctgggaaaagcttaggaataagtatattaaaaaaggctactctaaaaaaaaaaaaaaaaagaccatacccaatctctgaatttctggcatccttgaaaaataccgattcttcctacagtcccacactctttcaaaaaaaactttgtcataaaatagtaacatggatcagtattttaaaaacatgtttgggggcgttagagggcactatgtagagtgtttattgcagccttttttttttttttctgaatttttataaaactgaaatgaccttttaaagaaaaaaactcttgggggcaattcattgttattacttccagtgatagaaaatagattgtttgtttaaacttggattgtataatgaaaatataaaataggcaattaaatactcatggaagaggaaatcaaaggcaaacattgagtgaaaataacattaagcagactattccccagtcattgggccagtgattcttcctattgagtctggttggaagacgaatcagcagtagggatgttgcttcttcccttattccactttcttgcaaaagttactgtaatgatctcaggggagccagtgatcttttccatttcagc

SEQ ID NO: 11543 - DNA, 6000 bp, Homo sapiens
ttgatgtctctttgctgtaagtagaggaatttgcagcttgtaaatggctgcagttttgctaaaatagcgactaaaacatgcagttatgtctctcttggcactcacccacccacccgtcacccacacccaccacccaccataagttggcttgggaaatgtttgctgaataaaaggacagtctctgggtgttcccgggtcccagcctctgcctggctgaagtgcctctccttcctctccaggtccatattcaagcctttcatctttgttgatgacgtaaaacttgtccccaaaacacagtctccctgttttggggatgacgaccctgccaaaaaggagcctcggttccaggagaaaccagaccgccggcatgagctgtacaaagcccacgagtgggcacgtgccatcatcgaaagtgaccaggtgagcttgcatgagggccacagaggcggaggcggaggcgggcgggcgaggtcagcgaggaaggaggcagggaagcagatgtcaagctagaccctacccccacccatccagtgtgaccgggcttctcccagagaccaggttcctggggcctttcctagaaggctggtgtccattttcctgcccaggctcttgaaaccaaataagacaaagcttctgcttctcatgttattttggaattcagcaggctgagtatcttacttacatttactgtttacgtaggaataataggaatatgcagtacgttagggataactgttatatattgtgtaaaattccttatgtacttttgggggtaaaaagttgttatttgctggcaacattttattaaagatacaatcatatgttgtttcaaaaaagttctggagttggctggtggtgctggttgcacaacattgtgaatgagcttaatgcactgaactatacattttaaagtttttaaatggtcaatcttatgttataatacatatgttttaccatagtacaaacatagttttagaaaatattctcatattcctagggttttttttttttttttttgtatttttagtagagacggggtttcaccctgttggccaggctggtcttgaactcctgagctcaagcaatccacctgcttctgcctcccaaagtgctgggattacaagcaggagccaccgcgcccagactcatattcctagttttaaaaaagaagtcgtaatccttcaaagtgcagctctccccagtcccacacctttggttaataaagtgataagtcatcaattcaaacaagaaaaccacccaaagcacgttccacagcacccagtgtgtccacagcagccaccccgatggactttatataaattcaagcctatattttgctgaagagaggaagaaggaacgtgcttgttagacactcatcagttttccccaactatttatgtaacaacttttaataggtccaaactggcctgaagggcccaaaagggggaccttttgtgtaaattggtgctgtggactgtgtgagcctcttgcatttgacatggtggactatagaaaaaggatatcaagagaaaaatccaagcaataaatccagatgaattcagaaagcatctctgagaagggctgtctcacttttctgagagcttgcccttctcttccatagaagtgaccatttgacacgtaaaggtcgcacagttattttacatctctcctccctgccagcctaaaaaggctggcagataatcggaagcatgcatgctgccactgcattcaactgtgttttctccagggctgtccacattagttcctgatagtgcttatgttcttggtggatgaccataagccccaagtagatgaaaactgtcgctgtgtggtgtatggtgttttgggtatttggttcattagaatgaagaggtagaaagggctgtgtgttcaagatgaggctgctgaggctggtgggttttgaaatttacaaatgactctcaggtggagtcacatgatgctgcatgaagcagtggtgggcgggtggtgagagcagcttctcagttctgggactcatggggcaaatgaaagctttcactgtcatctgccataaatgagtgagtcccatggaagaagtgaactcaccatctcagaaaaagagtgaacaggggagagacatggcacctgtttattcattgatccattttttttttcattcaatgaacattttttgagagtgccctcccagtcactggaggatagaaatgagcccagttcccatccaaggggccacagctgcagaggcaagccagcacaaggtgggagacagcgcccatggcagggggaacggtgtggcactgtgcggggaagaggaaaggctttgcaaggaagctgaagatgggtgcacgtcgaccaagcgctgagaaaggggatggccctccagagggcagggccacctgtgcaggggcgagacagcagcagaggctggagggctacagtgaattcagtccagctgaggagtggggagatgcaggggaagtggtcttggatgtcagaagggccttccctcagtgtcactctggggtctgggctttgtcctgaaggcagcagaaagctgtgcaggtgttctaagccgggcagtgacataatcatactggcattctagaacaatccctgcggcagtcgtgtgtgaaacggagtgtggggaggacaggaccttgagcaggaagccagctggccccctagagggtttcagtgtccgctgcaatgtcccctgctattttgctgacacctaaagcagtcgtgtccttcctcaggagcaaggtcgcaagctgaggagcaccatgctggagctggagaagcaaggcctggaagccatggaagaaatcctgaccagctccgagccactggaccctgcggaagtgggggaccttttctatgactgtgttgacacggagattaagttctttaagtgaagtaagcgttccctttccccttcttatttaagacttcccaccttactaaattaccagcaaaacaaaccactctcctgtttgagtaaaatgagaaagttaatatgtggcctccttttctgaagccagatcaaactgttaccttgtgttccaccttgaatctcacagcgtccccttctgcaatgtaggtctccttcctgtgcagtgtaacatgtatcccgttgcctgttgttcggttgtgtgactaattgtggattttaagctgctattattgtatttcagtggcaatggacacattagccttttacaagaggactagagttcatcaagccttgaaaggcaggcttcacagtgccgagttggcgggaaaagcaaattcttttgaagtcttagtctttccctcagtagcggtttctttcaggttaacaagaggcatttgtgcacacacacagggctcttgtgtgtgttgtcaaggggaccctccgtggcctcccgtgagtgcatgcctgtagtgcacagtgtctctacaggtgtcttctggggggcagaaccaattggaaggaagaaagggacccctctccagtcctggctccttcctacatcctgggctcctgaagaagctgtcttcccattttccatgcgctgtgcttatgtgtggtggactgcagagctgcttccacttacaggagagctgataatttgttagctggaacctattcacttccgagattcagacatagccatgctggtggccttctgaatcactgcatggatgtcccaggaggcagctctccccacacagcagcacagccatcacaggattccttgtgtagaaatgattcccagtctagttaccaacagctagtctaggagtaattgaatggccctatggcacagttccacccacagagtagtgaatctctcagccaaggagggaaagaaaaggaagaactcttgactatttagattctagttaaatatctggaatcctagcagtcactacattatctcagcagagagactttaattaaactgatttgtttccaatgtcgggttcacttaaaggatttgacttaccaccagagcatagaaaagcatgcaaggaagaccagatgggcttagcattgggaagacagagggcaaggaggtgatagatggatatagaagcatttctctgcaggataccagttcaggccccaccattcctgccaaggccattacatcccacaaacccaaatacaaagcagctgacttccctggatcttccccccactcctcacacctcacatgtcccaggagctgccttcattcaggcgggtagctgcactgggcatggggtggtggtgggagcttaccgccacctattcaagctctcagctactcctgaaacgggcagagatgatgaacagaagtgtatgtaaatacagcagctagtgggagagcaccagttgggcctaatcctgcctcatcattcttggcaggaatctgcaaatggaaacattgtgagtatcagcaatctgggaagtgacagggttaataactccttcccagaagctgtatcatgagattttgaggggaccgagccctgttacatggatgtgaacagtgaggatcagaggttttatcagaacacattctttttttctaccaactctccagagcgtgagtataggagtgccatgagctttttagtcagcagttttgtaaactctgtatataaaatcattaaccacacattgtgggtgatgggaagacgatttcagctgacagagttaatggcaaccaataatggtggcctgtagctgctaagagcttcacgcaggtttggcctgggctttcactgttggtgaatttagagtgtccttttaggtggggcggctattctaaaagtgtctttctatcactgttaagggggggggaaagtgaggttcgaggatgacgtaggtaactctcccctcccaagtccatgttccaagtggctatgtaaagcaagatgatacagaaagctgctctaaaatctcactgagtgatttcaccttcgcctactatgaaatgtctcatcagacctgacatgtctgagataaccaaggtgattcaggatttgatcaaaagaagtctagtaagaattaattacacagaagcctcctttcatttctatgggccaaacaaaggccatggataaccctacccgctttatgtcattacccattgggaaacacaatggctacttctgttagggtacattgaccttggtcaagcatcttaaagaaggcaaccctaattgagagctgtcttggctaatactctgcaccacaattgtgatgtcctagtcctaccactagagggcatggtacagcctggcaaaagttaaaaggggtgtggcagctcccatcaggtctggaggtggtctataagcacagttgacagttgtgcattgggatgggtggagaaagacgacaagagagcagagaatctgctgatgtggctgcgcttacttttagtgactttatgtacttatattaacagctggaaataggttgttgggttttgagcaggctgttatagtgaggaatgttcatttttaaatgttcctaacagattttgcttttgaaaaatgcttgttacatgaataatttgtggaccagggattgcttttctgaaggcagtatagggaacatgaatattcaagatgaaatacaaaaattatgtttaagggtcatagtgtataagtagcttcctaggaaaccctttgtgtatcttttcagactggggtgggggctgagcatgcttgtgcagaaagaagccatagccagaaaggacagaatctctcccccactcccttgccccataaccaaacataagctagctagtcttgtctaatagatgggatttactataggtgaagatagccctcatattcaaggacagaagctctggcaggagtaaattagcaaagcagaaatagtaccctttcattcttggaggtgctttgaaattttaggtagaatataatcgaaattatggaggttccttagtgctcaataatataagacctggtgttattagaacgagtctttcttataaacta

SEQ ID NO: 11544 - DNA, 6000 bp, Homo sapiens
tcatatacatttgggaagttagcatagaggtgtattaatggtcgccatggatgtagataactaacccttgcaaagcacgtcatgagaagagaaaaaggccaagaacaaggccctgggagataatatttaagagatgtggagaggaagagcagaagagctacagtgaaggctatttccaggaattttcagtgctaaatgctgcagaaaggccatatgggagaaggcctgaaaaatatccattagattcagctataagtcttcactggaactttcatgggagaatactcatggactagtacatgtaaaccagactttcagtgagttgaggcaaatgtgggaggtaaggaagtggatacaatctgtatggacttttctacagaaattttgactttagaaatgttatcagtatgttctcagctataagcatgagaatatccaaattaaaagtgacttatacaatagagatctccactcaaaatacacacacacacacacacacaccacacataagaagaagccagaggtgggtggttcacaggtttagactctggttggcttctttgggatacttttggtcacccttaatagtcataagatgttggaaacttctccaaataccatgtcctcaacaaaaaatgtctaagaaggtaactctcctcataggcctctctcttaccagggaggaaaccttcttgaaagcctccagtggacttgccctaatgactcattagcctaaacactcatatcccttcccacagctgcaagggagtctcagaaagtgactatatggtgtatttttcctttacattcgcaggtaggctttgcttttagggaagagggaggagaaggatggctgtatagccaattaggagttccacaaagggtgtgatgagagtgtggtagccagagagagacatgggctcaatggtggtttgtttttttttttttttttttttttttgcttgttttaacatggttagaactgatcatgtttaaatgtctttgaaagaaaaaatataatcagaatagtgagacctctgtgatcatgggatgcaatgggacataaaatatgagagatgggcaagaatctcttccatcctaattggaaaggaggagaaatggaacaggttggatataggtaaatgtgcagttttgttggggagttgaggaaattcccatctgatagcttctttttcttccctgtgaagtaggcagctgagttatctgctgagagtaagggaggagcagagagaggccaggagactgaataaaataggcaacataaggagagttgcccaggcaacgcgggatttccagatgattttaagggtacagttgagattggctgctttcaatttaagattactgcaatcagggacatttatgatttctttcccccttcagctgcactagacacctagtaagttacacgtgttaagaacacagaaggattaatatctcaggggactttctgcccaggggtgataaaataaatgaggcaaaagaattgaagatattatcaaaagagcaatcagagtgataaaacacggaatctaaattagaagaaagtgaaaataggggagtagatctaccaggagaaagtcaagggaccaaaggatcagagacactaaggtggccaaataaatgatatattgaccgtgagtgagagaactggaagataaagctcaccaaatggtctggatttatttcaggcttggtacagttctaaatgttgacaaagtccagaatgtgaaacgggaatgagtggctgaagcagaatgaagagaaataattgataagtcatggtattgggagagtaaactctacagccttggtccaatttgtaaatataaaggtgtatgaaataaggactttccaagtttaaatgtgcatatgaatctcccgggtatttattaaaaagtagattgccattcagtaggtttggggtgaggcttgaaattctgcattcctaacaaggggatgaccatgttgctggtctggagatccacactttgagcacaaggcactggaaaatcttaccattgacttccacatatattgtcttcttttaaataatcttctatcccacttggctaaaggaggcagaccttagaagctaggtgccactttgtccctcctattggctgggggtgaagagcttgatgcagctataaatccgttcataatccggactgagacaataaaaaccccttgtgagaaaccgaactgagaaatagagactgggcctgccaagcagtgttggacactggagctgtaaggtccattttccttgagtttagcaccaagacaaactaaagccatatgcaagttgaagttttgggaaagtagtgatcatgaggaagcagaggaagctggtttttaggaaaacaaatggagcagaggcatagaaaattgatgagaagggaataagcagctctcgagtgctaaggtcatgataccttactcaaccatccacctccaacatagcctccacggatatctggcctctctggactggcattttgcttctcctcctcatcttggctaactcacactctccttttgggtcctgatttagaagccttcctcgagaaaacttttcctgccacctgaagctagtgggtttcctcccatgtatctccatagcattccattgtgtccagttcacagcacttgtcaccatttatgacagccaccatttggatacttactatttgttggtgtcttatatattctttattacttttaaaaaaacagttaaacgtatatactatagttccacttattattatgatcttcactttttacatatgaaggagatcaagagaggttagataacttgtctaagatcacatagcttgtcaatggtggcatcagggtttgaaggcagaaacgatcaacctcaaagcttgtgctcttagccaccgtatctcttttctctagattctaattatgcatctctgttttccactctagcttcaagactatgactatgcctgtgtcttcaccactatattaccatgtctggtagttgtctggtacatagcagattctcaaaagtattttgttgaatgtggctgaatgtgagtgaataaagttatttgtaccgccattcaatcttctaagataactgggtgcaggattgcgtagcattgctgttttatcagaaagtcctgagcaaacaaacatgatttgtaaaatatataacttgtaggtcagatatgcaccgtactaatcctgctcagtgttgcaaattccagatctatgtatctacatggtttgtagtccatcccgtgtcctaaactgttgagtggacgccgggaatcatggcttggattctaaatgttgtgtgggtacaacgttccaacccagatcctccctgcacacaaacgttttcagagctctcttcagtctcggcgctatagtgccctgagaatccagcgtggctgtatatttatccatgattcgaaatgcagagtgacgttgttacttttaacgacctgtccacctccagttgtctatgccctagagcctggaagacgagattggtatgcgaagcgctggctccacagctgcaaacttgcttagtcagcaccatcactggcggcatgagtggacaagtcaaataagtatctagcactgtcgcctcctgactttctataaacacataagatccctgtcacagaacaaatcaaggcaaacatgcgaacaaccctaaaccaaaattaccagtgactgccattctgtcctcgttaagcgaagactgaggtggttaaagcaggttgattgtttttaagatgctttcagccaggtgcaaggctatctgcagaaatgtgctttgcccacgtggatcgcatggacactaattactaagggctaaggagctgagaaacgtgcagccgcggagattggccgccccacggggaataagctggcacctctagaaataaagctccgcagccaatgcggcgccttggcccgcgggattggcggcctcggtcgtgacgcgacctgggcgggccgacttgcgacggaggcagcgggtccgggtcgggggacctgagaaggagccgggaggtgatccgcagcgctgcgacgggaccgcgcgattcctctcccacgcatctggcccgcgttcctgggcctcggcaccggatcccggcgggggtgtggacccagggcccactctccccggcgcggccagggccccccagcgtgcgagcgcctaggggatgccgaggtttggcgggcgcgggaccaatatgggcagggccgaggcgggattctccctctcgctgtgcctagaccgtactcctgctgcagttccggcagagagcgcggggagagcagcggcgggagctgcggcgagcacgccggccctggggtagatgcaacacatgagagggaatccaagttgcttgggtcggccccggcagcgacctgaacccgccgccctgcgggaggggtgtgcggagcgctgggctgtgctccggcaacttcactcctcccgccgccactggggaacgtagtgggggagacgcagaaggctaggcgaggggttctcaatgcgttcttccaagaaaactttttctcccttgaacatgaaggaatacgtgcttaccgtagaaaattgggaaaacatgggaaattattgtgtaaaaatggggggcgacgtgtgggagtctctcccggggcgaggggactgcgatttgctgtgctagccgggggcgagcggcgggcggcgctaccctggcggcccagaggggcggagagccacgcggcgccaagggctgagatttgaggaagtgggagctgcccgggcgggggcgtcccgctgagagtctgccacgcagtgtttgtttcctttcacttcctgcggcagctgctcaagatgaggaggtgcgcggggccggggcggagcagtcgcgttccccgcgtgtgagcccccacccatccctggcgccagcgcttccccgaccactcgggttcggctatgcgggagccgtgaggaggaggcttgcagtcgtggacctgagacctcgggaggtcatgctgtcttgcttttaagtggcttggggaaagtgaagaaaccccaaaatggaggactttgctaccaggacctacggcaccagtggcctggacaacagacctctgtttggggagacgtccgccaaggtgagtgcggattgtgactccagactgggatggggggtgtgtctgctgcctgccctctggcggagtccgggctgcgtctttctgcggctcctaaaagcacttttagggaggaagctggttctgcaatcccacttccctctcaagatgtttgcccggccaatcgtcgcctgctttgggacatggttggctaagagccttgaaggctggagtggagaaaagttcagaaagttcggggttgttggaagcccttctggggagtgcgggaaccccctccggaggggaggttgatttagtggttgtacagctgcacctccagcaggagtactgaccctccagagacttcaggtgtgcgcccagagcttcctgagagagccgagaaggggtgcttctgattcctgtttacatagaactcataagggttcattgctgagcagtgaagcagccaagcaaggaaaggggagaggcttgaggtgagggattcttgaatgatggcctccattccaggaagtgatcaaggggtccctgaacctgaacaggctaccatacgttattctaggctttaaaatgtttaacaccttttaaaaaggattaattatgtgatgtcttgggccaacaattgaggagagatctttttctatcgtcagcattaactttctgagtagtttgggcaagatctgcctggtttattttttcatctaaaagtggcattggttggctggtcccagtgcagtggtgttgacaactaattgatcatagcccgttacagatttctttgctccttctccaatctccctgcttcacttgactggcctaaaagaaggaaaa

SEQ ID NO: 11545 - DNA, 6000 bp, Homo sapiens
aaaggacagaggcagagagacaattaacaagctattatagaaaatcaggtggagatgatagtggcttgcatgatggtggtagagctggaggtgcagggcaaaggtcagattctgaatatattttgaaagtaaaggcaacaagatttcctgacagattgattatggtgtgtcaaagaaagagaggaatgcaggatgattccagtgtttttgttgacaactataagtctggagctgccaactggatgcagaagttcactggagggcccagcctggggaaaggatcaggagcaggttaggcatgttaagcttgagatgtctgttaaacatccagataggaatgtcaaagatgcacttgtgtttaagagtcaggaatgcaagagggaattttaggctagaaacaaaaagttagaaattattcgatacagatggtatttaaagctgtgtgactgactgacatgacagaagtggcgagaatagactgagaagtccaaggaatgagccttggaccactccagtgttaggtaagtagttgaaaaaaagagagagagagaaggcatcaaaggagactgaggaagagtgatcaggaaagcataggaaaatccgagaaacatatggtgtcctggaatctatatgaaaaagatatattcagaaagacagagtgataaatctgtcaaattattgaatttgtcaggtaaaataagaacagagaattgatctttggacttagcaaagcagagattatcagtgacttttataaaaatagtttcggtagtgtggaaagatcaaacttctgtttagagtgggtttcagagagaacaacaggaattgaagaaagtaataaactttgccaaccagtttagctccaaaggaaaagagggaaatatgatggtagctggcaggggaagtgtggtcaagagaggttttttgtttgtttttcaagatggaagaaataacagtatgtatgtaagctcacaggagggatccagcaggcatggggaaattgatgatataggacagaaagggaagaatggctccttgtgaaagtgaaaggggatgggatctacaggatgaacatgcaaacaaagactggctgcaaagagaggcatgaatagttcatttacagaaacagcaaaggcagagtgttggtacagatgctggtaagtggaaaaatatcatggtaggaggttatggagttccattctaaacacttcaacttcatcagtgaaataagcacggtaatttagcagaatgtgaagatgtaaaagaacagaatttgagaaaacagacgatatgaaataattattagaaaagcaggtgagtgaatgaactaagaaaacatcttatgactattggtcagtaaacgttgggatacatagtgaattttacaaaatctttgccctcataagtcttgcatcccacagagtgggcaataaataataaacataataagtacattatgtatacagtatagggccatgtaagttcatggcgaggcaagcccgatgactttgtatttttcttcagacatgttctgctgcatggtgtaggttcacagtagctcagtaacttgaattatccaggattgtggttttactaagcaagcctgataaagagagagggctagagggttgtgggtgttttcaggctgagttaagagagaagacatgaaggaggtgaggaacagtaaaaaggtggtaagatcagtggactgaaggatgcattaaagaatgactgtgtttaactctctgatacatctgacgtatgttctccatctccacttccctgctagtcatagcggataaggatactccctggattcgaattctagttccatcagttataagatattgattctgttttactttgtctgtctcattccaaaacacatgtctctaattaccatagtttgataatgagttttgatatttatttagtaaggcaaacccataaataactgataatttttcaagataaaagtgaaataaattttcaggaaaaaaaagctgagaaaatttgtcacaaactaaagaaaacaagaaagagacagtagatgaaagagtgctcattaggtgaaaggaaaatgatccaagagggtagctttgagatgtaggaagaaacaaaaagcaagaaaatgataaatgttttgataaagctaaataagtatcaactcataaagaaataatattcccagaagagtcatgaatatacagagaaaattaaagtacatgacaatggcaatgtaaaagttaggggtgaataaaaaagagacttaagagttctaaaatcattgcattgtcctggaagaggaaaaagtacaatgattagtcaaagatacatgtcataatccctagaaaggagatcattattaaatagaaaataaaagaatacatcttatagaaaggaaatctaaatgataatattaaacagatctaaaataaggcaaaagtgaggataaaaaagaaagatggaaccaatggggcaaatagaaaaagtaagatagcgtggtagggcattaattccagccttacatcaatgcataagtatctcaatattctactgtaaagggaaagtaaagatttcttacagcctgagtgtaatggagaaatctagtttatcatagtgctttaaatattgtaagtcttcaacttctagttgatgaataaatgatggaattctcagtgatactgcactgttatcaaataaatataaaaggagctcctggaattggatgtaatacaggtaaagaagtaaacacagccatataggcatggcttcttgcagggacaactttgtgaatcggctcagacagacagacaggcaaatacacctcattgcctcatacatgttatttgctttagtttttgttctgaaccttcctactccttcaagtatctgcatttactttatcaaattctcttttattagagactgaagaaactgtcatctccttatgtgctaatgagtttaataatgtcctccagtcaccacaagccttctttcaaactacacaattccaactgcttccgtctcagagtatcttgaaataatgatctgaccgcctgttagaccagtgaagggaaggaatttgggttgatttaagaagagaatcctcatggtcatggtagactgatatggagagaaaacattttgaggaaaaatactcaactaaattcatttctactccagcatgcagtttcaagtcaagttccaccttagctccaggtggcaggcagagcaggatgcagaggcacagcacaagtaaggggtgagtgccgaagctgctggctcctgttccagtctttcttccttggcctcgcctgaacttttactataataatagtcaccatttattaggtgtctcctacgtgcaggacactttacacacagtatccctaatcctaataacacccttattttatagatccaatgactgagtcaagaattacataacctggccagacagctggtacatgggaaaggtgagattcacaccagggtccacccagcatctctacttataccatgctctgctttaaggttctctgagaactcagacaagccttgggctaacaattgtgttaacaggacatagcaggtgcaaggacccactggtcatcctgctacctgatcagaaggaaggaaagttgtatttgttgctcacctactatgttttaggcatagtactaggtgcttttacctagtacttaattcccttatcctcaactcatttattcctcgcaataacctgataagggagatgtttttatcctcattttacatataaggaaacaggcctagagaaatgagcacagtgtccaaagtcacatagttaataagatgtgaagctctgagtttgaaagtctccggtttcaaagccatgaaacttatggctccccgttttagacacttccttttgggaagagtgtggaggaattaatcagaaagaagaaagtcatactcaaataggtggtaggagcagagacaattcaatacagacagaagtcttagatgagagcagtgagccagggcactggactgggactcaggaggcttcccctagactctggttccaccgatgcagcctcaggcaggacttcacctctctgggcatccgtttcttcatatgttaaacatacggggttttaattagatgatcgctgaagacccctctagccctaaaactctgtgtctcttaagtgctaagagggcaccaacagcgttcctcctccccaaggagcataatgtgatggttcctgccggccctggctgactctcgccgtccttggagataattgggttcagtgccacctggaccagaactggggatgcggaagcaagaggcgagtctattgctctctctcggtcctgggccgccctgtgattgttgggcgtccggaaactgtctcccctatgggtttaaaaacaaaactgagcgcccatggggtgtgacagtcatctgcaggggcttgggtggcccatcaggcgaggctttctcggcacccgaggctccagcctgatctcggtcttatcctgcgaccgggctggttctggcgggtcgccagggtgggcggcggccccagccgggcgccccggcggcaagagcggcaggctgcgcccctggcccgcgcctagcctggggagagagctgggcgggcggcgggagctgctctcgcgggccgcggccctcgccctggctgcaacggtaggcgtttcccgggccggacgcgcgtggggggcgggggcgggggcgggggcgaggccgcggcgagcaaagtccaggcccctctgctgcagcgcccgcgcgtccagaggccctgccagacacgcgcgaggttcgaggtgagagaggtccgggcgcgtctggcctcgaagggagacccgggacgtggggcgcggggcgggagtggccggacctccacccagtgcccccgggccccgcgactcgtgcgccgggccgccggagagggtgtacttggttctgaggctgtggtttctcctcaggctgagatggatcttgaggcggcaaagaacggaacagcctggcgccccacgagcgcggagggcgactttgaactgggcatcagcaggtacatccccagcagccactggcttttccgttacacgccaatcagcaggactaagttcacccttggaaagaagttgtaaaaatcggttgatgcctttgaagacctttgttttggaggcttctttgaagggtcttgcatccggttctgaccttggagcaaacgtgttgtgtggcctcaaagaatgtcactgaggctccttttggaacagattcaggaagaaaaggctgtcttgaaaagtgctcccttccctttgtgcaggggggattcaatgaatatctgcattgtataacattcattgtattacgtaactcttgaaacttttacaaatgactttcatatacatcatctgattgttcagacttaaagggtgtcagacatctgctgttgatggctgtgctttttgaacaagggcagtgaagcaaaaactccctcccctcctgcccatcccctgttatgtctcttcctccttgtcttacccctccccctcctctcatcgccaggcttatttgtatttctcctttctgggaggataggtggggagggggaacttctgtacatccgaatcagttttgttcaagtggtagggggaagcagcgcttcctttgccttcatgtctttctcggttcccctggcccttgttaaactcacttcacaggctttatgagcggggcagaagttcccagtcaatggcgtgtgtctttgtttcctctttcactgtgggaatagtgaatcattttcgcctttagcctgaaatagtttatgaggctattacggtctctgagttcataccaggctacccagaaaaaattgacctgtgtcaagtgatcacccagagggacaaatttatcagtctctgtagtttgtcctcaagctgctaggggcttgattagctaactgaaaacatgcctacctg

SEQ ID NO: 11546 - DNA, 6000 bp, Homo sapiens
agggaattaagcacagcccatatgattccacagggaaaggactcctagaaactttcatacttgtttttcactggacattgccgcatatgccttttccctttacttatatgctttgcatccttttactgtaatatatgatagccatgaataagactatgagtcctcctagcaaatcatcaaaccagaagattcatatggtttttatatcaatgaatttcctaatattgtatcaatatcatattcccagaataaatcacacttgatcaaaatgtatcagtttcttaatgatgtgttatattgttactaatatttttacatttcaatcaatattaataactgatatttgtctataattttcttttctaactgtattaggtttaggtataaatgtcatacttactttacaaaaagtattagattttccttaattttttgaaattttcttttttataaggtgcaaaaattttcaaaatcattgggactatccaggctttgaaattttgatacaagtcttccttgaaatcatctgggcttaatgattgattttgaggaagtgtcttgataaatttttcttttcctgatagagaaattagcttatttaaattttttacatatagtagggcctatttgggcaaattatatttctgtaggaaattatcattatatctttcaaatatataacagagagattgtaggattttttaaatgcatcatatgtcatgtcaatggttacttcctccttgtccttttattatacatatacctcagttaaggtagctagtaattggtctctcttgaaaattttttaccaaaaaatattatttttatttagtaattatgtgtttctcaatttagataaattgataaagcaaatattgtttattttttgctttattgttcctttattttttctgtttgtttttcttatcttgtttaacatgaaaatttcattcatttataatttgtatttttattaataaaagggtttagggctataaaactttttctggctacattcttgaatgtattacaggtgtcctgatatagaatacctccattatccatgatttttattaaaaaacacttttggattgtattttacctttaacccaagagtttaatttaaaaagggaaagaaaaatgatagaagtaggccaggcacagtggctcacacctggaattccagcactttggaagctgaggcaagaggatacttgagcacaggagttacaaactgccctgggcaacatagtgagactctgtttccacaaaccagttttaaaagttagccaactaatttggaaagatggcttgagcctgagaggtcaaggctatagtgagccatgactgtgccactgcactgcagcctagaagacagagtgagaccctatcttaaaaaatcatagaagtaataatatcataattatacacaattaaactacattgcaaataccaaaaattttacttgttttaaatttctacactaatcatgtacagctgtaacagttgtacagtaaacagctgtatatagccttcacttctcactagacatcttatcaaaaaagaacttaaaatttatgggaaaaccttgcactttgtgttagaaacttagtttcttggctttcttattcctatctgatggagggcaaagaacttcactagtttgcaggctacgcagagacaaattagaaaagaaacataaaacagaaatattttgtgtatagcacattgcccaaagatgagataaattggtctaaaaatgatatggtgcaatggagacatttaagagcttgttagcaattcctacaggtcccaagaggttcaaacagttcagaaacagaacagaacatgattcagtatattttcagagaattcaaaagtttttgtaaagctcactcaggaaatcttcagggaaaaacaaactttgctcctctttttatttggtaactttctatattctcagaataagcttgaaaaccattttacgttggctccaatatcccacaaatctggcaacagtgacaggagtcatgtcattctgacagttggacctgactaaactaagttagtggccaccagtgtctgtcaattttaatgatggtaggcagatttcccaaagtggtaatcactctgaacgtggtttattttttatttttttaaaaattaattaattaatcaattaatttttgcctgtttttggcacttctagcaagtattctcttagtattctttgtattcctactcttcctctttgcaaattgcctatatgcaatcatcaagtattttaatgataattcctgtctttatttccgttactctattctctccttgtcagtgactttccttccaatatcacgcacttactccatacagaccgtttcaaaacttttccattctccattccctccagcttcccttcagtaattggtcagttaataagcctttctgatcaagtcaccatctctcactggaattgttgcaatagtctcttgactggcctttctgatttttgcccttgccctctacagtttattcctaacaagacaactagtgtgacaaagcaatcaatcaatcagtcaatattgtccttcctatgatgaaatgcttctattccaatggcttctgttgtctctaagagttaaagagaaattattaaaatagctattaatgcccacattctagtcctttaatatattatattaatatattatatattaaatgttatatatataattaattatatataatataattatatgtattatttatatattaatataaattaatataatataattatatattatattaatataattatatattaaatatattatattaaatattaaatatattatattatattgattatataattattataaattaattatatataattattataaattaattatatataattattataaattaattatatataattattataaattaattatatataattattataaattaattatatataatataattatatatataaagtccttatatattaaatattatatatttataatattatatatataatatttatatttccctcatcctttatagcatttcacactacctgtggcttcactggagttattgcattgaatttgctgccttttacttaagtcaaactttttgctcacagtgaaaggaatagagaaagatgtagggagaccccctgaaactattgctacagaataaaagatgaaatgctcctaattattgtaaatacaaaattgcatgcagtattgtgtaaagacaatgccaggttggactgccagaatgagccaacagcgcgtgacgtgcttccccctgcagagagcctatgaatggacgtgcggtcagggaggtttcacatcaccaagattcctatcccagaaaagcagatgttcatagctctaggaatggaatgcgacccttgtggagagcctataaacggatgcatggggcgggggggtgcctgtccatatggataagatagggctataaacgtcctcatcttgccatggctcttctacacctctttagggttaaggcatactcctttctgagaatttctcgtctaaccagttgtctatcttcacgtcctatttccatggattgtttgtaaccagcttttgttgcaactgttactgctgattaatatcttgctaatcataggttatggaaagattgtgtttctgttttaaggctctgttagaaattactaacacacacactatattgtaaattcttatctctgtatactgtacttctccatacaaatgtactgtacttctatatacaaatgttatgttaaagaattacttcatccccatgtgaccatctcacctcataatcaaatgaccctaaatccctcactaacctacccctgccctcactaaacttaataataaatgctggtatatccagtgcattgttggcaccgtgggaccagaaggtagtgacccccctggacccagctttcactatcttgtgtgtgtctattatttctcaacctgccgatccgcctaagaacaaagagagagccccgttgcattgcaggctgctggccagatcccacaatacatacacagattccaaaatgcattcttaactcttaaaagattttggttacttatcactattctgtctacttttctgtaattgagaaaagtatttgtcaactcattttttctctctgtgacagctcagtcatttacaaagttttattttatactttactccttccttcaatttgtgctaaaacattgtgaaaattaacatttctttggaacacaactttttcattataaattaaatactgatataattgcaaagtaaacaaatgaatttccataaagctaatttatctttatattttccatacttattacttcaaattcttgttacattttcaattttgtttgaaatatcatatggtattttaaattgaaatttactaattattttttagccagtggataaagagaaattaaaaatttgaacaaattaattcaatttttacttcacttctcatttgaaggtcttcccagtaacctaccaaaagaagtctctctcttttttttttttttttttagcttagattctaatcttcattctgcctattctggctaaacttctcaactctggctatttttcaattataccccaatccctaagccatgtaactcttcgaggtttttgtttgttttttcaactgctcattaagacgtcctacaccttagcaaaaagatcacacatatttcttcaatgctttggagccatagtcatgtactcaaaatttattttatctctactcccacccttcctccacccaaacttatccttgggttttcactgattagtgctttcaagcctgcctgccttagttcatgtagctcctcctctggtactgggataaacacttgtattaccattttaaaggctatcattactctttacctgtgaagagtagaacatgaagaaatctactttattcagatattctccagattcctaaagattagagatcatttctcattctcctaggagtactcacttcaggaagcaaccagataaaaggtaaggtacaaatactctttctaattgtttgtattttacaaatctaatcttatgaatatatttgtcttgactagaagtttgcaatcaaatttaattagaattaagaatttctttggtttcatctcagtaaaaaaaattagtgtaaatagggggagaaaaataagatttttttgccgcattttttagttaacttctaagataaaaactttgaaataactccctacttacttcctttcttaagagttccaaagccattatattcacatttaaatcctattattcgataaatgtgtatgtgtaaatattatatgtatgtgtgcatatatctatgtatcagatacatatatatgacattgtacgccaagccatgtttctgtttgaagactgtatgtttatgtatggttacaggaatatttttacttcatgtacttttttagagctgaatcatttcctttctatgaaaaagcatggttaacacttaagaacaaggcagaaagcatttcctttaaatatttaaactacttgttctaaaaataatctattgaagaattatttctaccccacccaatcatttaaactaagaaacaagactaacaatttagagagattattaattatttaatttctatttggaaaagactatcataactttgattcaatattctacttgcataggaaatgattactatgcaaacttgattttgatttaattaatgtaggatttttagatttgagctactcgattctgatacgattctttgttttcattttcaaagccttagtatcctcaatgcttatcaagtttcataatgaaacttagtaatgataaatgtttcattttataaagttcatttcaaatgtctaaggttttatcatcatctcactgtttatctttagaaatatctcgagtgt

SEQ ID NO: 11547 - DNA, 6000 bp, Homo sapiens
atgcttaccatccctggtcatcagagaaatgcaaatcaaaaccacaatgagataccatctcacaccagttagaatggcagtcattcaggaaacaacaggtgctggagaggatgtggagaaataggaacacttttacactgctggtgggactgtaaactagttcaaccattgtggaagtcagtgtggcgattcctcagggatctagaactagaaatacaatttgacccagccatcccattactggctgtatacccaaaggactataaatcatgctgctataaagacacatgcacacgtatgtttattgtggcactattcacaatagcaaagacttggaaccaacccaaatgtccaacaatgatagactggattaagaaaatgtggcacatatacaccatggaatagtatgcagccataaaaaaggatgagttcatgtcctttgtagggacatggatgaaattggaaatcatcattctcagtaaactatcgcaaggagaaaaaaccaaacaccgcatgttctcactcataggtgggaattgaacaatgagaacacatggacacaggaaggggaacatcacactctggggactgttgtggggtggggggaagggggagagatagcattaggagatatacctaatgctaaatgacgagttaatgggtgcagcacaccagcatggcacatgtatacatatgtaactaacctgcacattgtgcacatgtaccctaaaacttaaagtataataataataaaataaaataaaagaacataatcttacttacagtagccataaacaaaaataaaatacctaggaatgtatctaatcaaagaggtgaaagatcactagaaggagaactataaaacacggctgaaggaaatcatagatgatgtaaacaaatgggaaaacattccatgctcatggattggaagaatcaatattgttaaaatggccacactgcccaaagcactcgacagacaatactttttttttttttgagttggagttttgctctgtcacccaggctggagtgcagtggcacaatctcagctcactgcaacctccgcctcctgggttcaagtaattcccctgcctcagcctcccgagtagctgtgattacaggcccatgccaccacactcagctaatttttgtatttttaatagaaacggggtttcaccatgtgggccaggctgatctcaaactcctgacctcaggtgagccatccaccttggcctcccaaagtgctgggattacaggtgtgacccaccatgcctggcccagattgaacactatttctatcaagctactaatatggtttttcacaggactagaaaaaaacattctaaaatttatatgcaaccaaaaaagagccctaatagccaaagcagttttaatcaaaaagaacaaagctagaggatcacactacctgaattcaaattataaggctacagtaaccaaaagagcatggtactggtacaaaagcagacacatagacggatggaattgaatagagaacccagaaataaatccacacacctacagctatcaaatcttcaacaaagttgacaaaaataagcattgggacaagaactccctactcaataaatggtgctgtgatagttgactagccatatgtagaagaatgatacttgatccgtactagcagcatatacaaaaattaattcaacatggattaaagatttaaatataagacctcaaactgtaagagtcctagaagaaaacctaggaaacacaattctggacgtcagcctttggaaataatttatgactaggtcctcaaaagcaattgaaacaaaactaaaaattgacaagtggaacctagttaaactaaaaaactacacagcaaaagaaactatcaacagagtaaacagcttacagaatgggagaaaatatttgcaaactatgcatctgacaaaagtctaaaattctaaagaatctatacagaacttaattgagcaagcaaaaaaaaaaaccctattaaaaatgagcaaaagacatgaacagatcttatcaaaagaaaacacacaagcggccaacaaacatgaaaaaatgttcaacatcaataataatcagagaaacgcaaatcaaaaacacaatgagataccacctcacaccagtcagaatgactattactaaaaagtgaaaaaatagatgctggcaaagctttggagaaaaggaaatgcttatacactgtgagtgggactgtaaattagttcagccacagtagaaagcagtttggagacttctcaaagaacttagaactaccttttcatcattaatcccatcacttggtatatatccaaaagaaaataaattattctcccaaaagacaaatactcctgtatgttcatcacagtactattcacaatagcaaagacatgaaatcaacctaggtgcccatcaacggtggatttgataaaggaaatgtggtatatacacactatagaatactacacagccacaaaaaagaatgaaacgatgtcctttgcaacaacgtgcatgcaactggaggccactatcctaagtgaattagttcaggaacagaaaaccaaataccgcaagccctcacttataagtgagagctaaacactgggtacttatggacataaagatggcaaaaacagacgctggggactactggaggtgggagggagggatgggggtaagggttgaaaaacgtttgggtactatgctcagtacctggatgatgggatcaatcataccccaaacctcagcatcatgcaatatgcccatgtaacaaatgtgcacatgtccctgaattaaaaataaaatttgtaattatttttaaaattaaaaaaacccaaggcaattgtttttaaaacatgtctcccctagagcataccaaatgctttgccacagaattatgtaattatgccatgaactcaattttatgagcaaataagtataatttcaatccagtaaccagcaaatccgttgttgacttttggaatatgctatgttatgtttcatagcgtgccttcctagttatattttacagatgttggtatttttgtttgtatttactgattatataccagttggacagtggaagggaaagaacctaaaatgataaatcacctgcagatagaaaaatgagtaaataattttcacctaaatcaaatgtgtgccattttccctttctgggttttttgctttcaattaatactaaatttagttttgtacacataaccattaggaggaagaaaagccaacctgtatctttattttagccagttctctaacaattaattatatatatttaaaagttggattttatctgagctttggtttacctgttatttactttttaaaaatacatgggtgttcgtacaccatatatattcttttatataacagtttgaaagagttttcctgattgcagtgaagttaatgttcccccttttttagtcattaacagtcaaatgaatagttaaatatattaaagatacagaaatagaaaatttacaagatggattaaataaacacttataggagttactatgacaaaatattttgaaacttactttcgagttataaataaaattattaaagataaaattccaacctgttctctcatgtggagtttaaatcgcaagtcggaaacttaggatttaggctaaagaacgaatgtaaaggggaagaaaactgtattccaaaaacaaaaggttatataaattgccaaattaagaaggttttttcacctctaccttatgctgagtgaagaaggtaagtatactaagcagctgcttttaatgccttttatttaaacaaaacaacgaaatccatagacttctggaataccagcaaattgtatgtgttttcagttagtcatcatgttatattaacagttcattaaacaaatgacaatttgtaaattcagtccacagaatagcatactgaaaggctacacatgtagaattattagataaaaaggaacatcactgcccttcataaattctagaaagttcattgcattcattattcacctttaaattcaaaactggaatttgatgatgattgcaactgcagctgagggccataaactaaaacaatttactgggtgtggaaaagggggctgggaagagccgtgggctaaccatcctgttaacaaggagtgtctcctcatgaaggtggcagccaccagaacgaggtgctgcctcctaccctacaaatagcaagggcccatgcaaatgaaaagtgagcctttgagatgagtctagataataatgcattggagatttcctgttaaactagcactcttaagaacatagtggcattttatttcaatcatagtataaaactcactggtttattcaattttattatattttagatgttggtattaatataccaagcaagattctttttaagttttctatttcccctttctaaaagctctatatcgggttcttcaattacattctcaaattatacaaatactacatgttttctgacaaataccgtattttggtaatgttaggctggaagtaaactagagtctttctgtaactttgacttatcctgcaatgtttggatgatgggacacatcaccctgggaactgtctcaaagcacaaccacatcttagggccctacgctcactccccaaaggcagatccgcctccaaaactccaaatcctcatggtctcaggcatcccttttaaacacgggcacaatcgtcacctctttgaaatgagagcgtgcttgattattcctggcctccagttgctggccttcatccggtgttggggtgggggagcctgtcggttcctgaaaaatagctcggggataactaagacaaaagaccctgaggagctctgcctcaactgtggcaagctgggtcttccacgtcaccaagtgtcattttcaccgtgcctgtatggtccgctgttcatcctgttagcggaccccgaaatcaggcaggaaaataaagctcagtgggagggcctcggagcaagacaatcccaccaagatggactcgggttgattaacgtgagtgaacctctgaggaccagaatccagactagtaattctccatcccggctgctcgttagatgcccggaccgacccccccagaccaattcaatcagaacattcggaggggcttgtaaaatctcccggggagattccggtacgaaagccaaagactcagacgcccgttctccacccgcctgcagcggccagcgcgggtccctcttagggaattgaatgcaggccccaggcctcctcctcgagtatcccagtgtgaccgatggccagctcacaaacgcgcagtgggtgcggccgcgccagggcgcagcggagcagagggcccggccgctttcggcctgggaaagaggagccacggcccggagaggcgtcagtgctgggctgcgcctgcggaggtcctcgcaattgctggactcaaccgcgcgcgccccctaccggtcctgcgaaggagccgcagccgccgcgggaggccacaggtgaagcgaagggtgtgtcttacttcagcagccctgtaagccacgcccagattctctctcattttcccacttctcatggctttgcatgctgtcccacgttacgttagcctgtactgaatgtctctttttccacatttagaaaacaatttgttgatgctgcaagacatgaaaaagtactgtaactccctgaatgtgcatgtctttcagataggtaacaaattacattgggccattgttcaactttattaatatttgttaaaacataatttgcatatatttttgcctatcaaattggcaatatttgtatgtatgtatgtatgtatttatttattttttgcgacagagtttcgcgcttgttgcccaggctggagtgcagtggtgcaatctcggctcattgcaacctctgcctcctgggttcaagtaattctcctgtctcagcctcccgagtaattaggattacaggcgcgcgccgccacgaccggctaattttgtatt

SEQ ID NO: 11548 - DNA, 6000 bp, Homo sapiens
ggtgctgattttaattttccatatctttctccactcagcatctttggggcctacagcatggatgtgattactggcacatcatttggagtgaacatcgactctctcaacaatccacaagacccctttgtggagagcactaagaagttcctaaaatttggtttcttagatccattatttctctcaataagtatgtgggctattatttctttctctctttttaaaaataactgctttcttgacatataattcacatatcgtataattcatccacttaaaaggtacaattccattgtttttaagataatcaaaaatatgtatgaccattactattgtaaactaaaatgtttttgtcaatctagagccctcacacactttagctgtcaacaccccaccacaaaccccactgccctaagcatccaataatcaactttctgcctctatagatttgcctattctggacacttcatagaaataatatcattgatttttctctgttgttttttattctctatttcatgagtttattttagtctgttattttctttcttttgctggctttaggtttcatttgctcttcttcttttagtgttttgtggtgtaaataattataatcaatttgagatattttcttcttttaaatttagatattacagctataaatttccctctgagcactggtttggctacatcctgtgttttggtacatcatgccttctttttgttcatctcaaaacaatttcttgttgcccttttgatttctgctttgactcactggtcacttaaaactgtattgtttaacttccacaaatgtatgagtttcccaaatttctttcccttattgatttctagttttattccatggaagttgatgtacatatgctgtgttaattctatcttgactatcatttcctgaacagcatgattaagttaagcagcagattatggtctacattaatccaaaaactctagtccaatagataaaggctaagaggtcagggaatttaattctattactttggtcactccaaagactcagaaggtgccattgatctcactgctgtagtggtgtttcctatgtatagacctgcccttgctcagtcgccggcctgaaagaagggcaaacatgataaaaggaatgggttccagttgagaatcatgatgttcttattcttattactggtagagaaaattataattgctccaggtaaagtttgcattttcaatgatttccttttgtttgttttgtttttcccacagtactctttccattccttaccccagtttttgaagcattaaatgtctctctgtttccaaaagataccataaattttttaagtaaatctgtaaacagaatgaagaaaagtcgcctcaacgacaaacaaaaggtaaaatctgatggtggttaaatgacgatgtttaggttttgataaatttagattttatacacatgatagagcatgtatctgtatttttaaaaataaagacagagaacttatgtttagaacaagagaagccatttggtagaaataaagaaggagattggggaaggagatgagaatgagtcagagagatagcatttaaaacttgaaatcaggcacaacaattagtatgtcatgatataaacagtattgagataaaattttaccacttctcttccctttaataaattgtcaaaggataaagtttcctgtttgaaaatatattttactggtattgtgctttcctcatatcacagattggtaaagaatcattttaagtccaagactcttattttacatattctgcaattaaaggtcctatgaggctacctgccgactgctgacatgtagtgtgtggtaaatgtgagtgtttcacagcctggagtgaacaggggtcttctctgagaattgaggttgcaaggctggctaactcagctttgccttcacgagccctagaggccagccgaaggatgtctgcaggtcagggagacaggaccaggtaacccagctgtcactgaagattatatagagtttgagaatgttggaatatttgaaaatgctcccccaaaaaagctgctgatgagttctggaaatgtcaggagattaatctatacggacactgctgaagaaaaaggtagaagaataaaagatccagtacttcttcctgggtaagcagttatgaccagagatggaaccggcaactctttggccagaaagctgtatccaaaagacagagaagatgagaaacagggagggcaaaggcgaaaaagcaattggacatgatagctagatttgtttcaggaaaacatcctgctttccaaggatttagatgaatgtttttgttcactggtgactcaggtaacacgtcttcaagaagccatagggaggttgagggagggaagtcaagaagggaggttgaggactgcacttttgatttacttctgacttcacgagtcactttctgccaaagaaatctctccttttgcttctagcaccgactagatttccttcagctgatgattgactcccagaattcgaaagaaactgagtcccacaaaggtaaccaaggagtgcttctgagggctactggcggggacactaagagggagggccttgttctgaaaatgtgcaggaagtattccaggaagatgagaatttttgccacatagcagaacaacacacatttagatgttataaatggtagctggaggcactttccagaagcccacaggtatagccatgttccaggctgaaagggcaaccctaagcaaacctagaatgcttggaggacagtcagtggtttgtggatcacctacatgagatcaaatgccagttctcagcctcctccagatccaccaagtgagaacctctacttggaaatttatatcaaacataccgatcaggaagcacactatcccagtaagggtgattttaactggcagtacttgaaagtgtgttcgcaaggttaatctactgcaaagttttatttttccctttgaaatgcataagtaactaatgggggacacctctgataccatgtaaatctacttcaatcttcagtcttgtatctactagttttatgacccatggatggttttaaccaaaaccattattactaagacagtggcaaaatgataaccatggtcaatttcaagctaccaagatttggcaaccatctcacaaaatttttgaatatttaacaattggttctagagagcaggactcagcagactccagtataccactttaaacatgtccatgtctacatctacttctgtctgtctatctatctgtcaatcatctatctgcctataatttatcaattaatcatctatctatctcaacaaaacttgctgtgataaagaaaatagtctatcatttcactgtttcatatagaaatcactagacacatatggctattgagtactggacatgtggccaatgccactgaagaacaatttttaagagtatttatttttaattgaataaaatttgaatttaaatagccacatgtggatagtggctaccagattggacagcagagctcccaactttaaaattacagttcaatttcaactcagtataatggggttcaatgtaactgagtaaaataattggatggttgaatttacccacagcagcatacagaaatattcactgataaatcagaactctgtagacctttctcacactcattttatattgtgtttggttgtgagttacatgattgctgcaggcaccatatttatttctgtgctccaggtctctaaaggtcctaatccagtcctgaccaaacagactagtgatggaccatcgtgagcttctctcaggagaaatatcaagagggaggccaacctgtaatcataagaacttctgctattttaatgccattcatcagactacagtcaatcaccatgcttctggctttttgtctatctctgctgtcttgtacatcctgagatagtccattctgagaactgtaccctagatcttgtattgcctgatgcctgtcaaagatgtaatccatgctgcttaagtgaggttgtgcacacaaatcaccatatctcctgcaagtttggattttgattcagtagttcgatggtggggtttgagattctgcatttctaataagctcccagatgtggctggtgctgctggtccatgaaacacactttgagtagcaagaggtgatctgtagctcagtattggtcctttaagttccctcaaacatatatagagaaaaggtcctaaatattgcaaattctctcaaagtttgtcaagctatattggaattctctcaaagtctgtcaagctctattgtagaaaatcaaatttttattgggaaaaagcctaccccatatttacttacagataaagtacttttaggatcattcaaggcacacacccataacactgagtatgtaagacagaaatgctctctctggaaattacagcagtgctggtgctgggatgccatgatgaggagtgtgtggcccacaatcatgtagaccttgggaaaacctggattaaaatgattttgcgtcatcctggccctgtataagatacatatcagaatgaaaaccactcccagtgtgactttgaattgcttttccattttttcttcttgggattagagagcttcacttagatttcatctaagctgtgatgttgtacgttgacctgatttacctaaaatgtctttcctctcctttcagctctgtctgatctggagctcgcagcccagtcaataatcttcatttttgctggctatgaaaccaccagcagtgttctttccttcactttatatgaactggccactcaccctgatgtccagcagaaactgcaaaaggagattgatgcagttttgcccaataaggtgaggggatgacccctggagatgaagggaagaggtgaagccttagcaaaaatgcctcctcaccactccccaggagaatttttataaaaagcataatcactgattccttcactgacataatgtaggaagcctctgaggagaaaaacaaagggagaaacatagagaacggttgctactggcagaagcataagatctttgtacaatattgctggccctggttcacctgtttactgttatcacaataatgctaagtaaaaaaaaaaaaaaaaaaaaaaaaaaaaaaaggagtgtggcgagaagatggccaaacaggaacagctccagtctacagctcccagcgtgagcaacacagaagacgaatgatttctgcatttccaactgaggtaccgggtgcatctcaatggggattgttggagagtgggtgcaggacagtgggtgcagtgcacccagcctgagccaaagcagggcgaggcatcacctcacctgggaagtgcaaggggtcagggaattccctttcctaggggtgacggacagcacctggaaaatcaggtcactcccaccctaatactgcgcttttctgatggtcttagcaaacggcacaccaggagattatatcccgcgcatggctcggagggtcctacgcccatggagcctcgctcattgctagcacagcagtctgagatcgaactgcaaggcagcagcaaggctgggggaggggcgcccgccattgctaaggcttgagtaggtaaacaaagctgccaggaagctcaaactgggtgaagcccaccgcagctcaaggaggtctgcctgcctctgtagactccacctctaggggcagagcatagccaaccaaaaggcagcagaaacctctgcagacttaaatgtccctgtctgacagctttgaagagagtagtggttctcccagcacacagctggagatctgagaacagacagactgcctcctcaagtgggtccctgacccccgagcagcctaactgggaggcaccccccagtaggggcagactgacacctcacacggccgggtactcctctgagacaaaacttccagaggaatgatcaggcagcagcatttgcgggtcaccaataccgctgttctgcagcctccactcctgatacccaggcaaa

SEQ ID NO: 11549 - DNA, 6000 bp, Homo sapiens
aagtaaagggttcttttacttcatagcatttatcccaatttgtaattcagtattatttgtgtggctgtttggtgtctctttctcctatatgagtgctagcttcataagggcaaggattttgattctttaatatttagtgcttgccacatgccctgaacacagcaggcatacaggctaaccaacatacagtggcatgaaagtcatgaaagtgagacacctacctcctccagtgccaagagagcataaccatgcacctgtcactctcctcaacaccacccccaagcatgaggcccaaaagcattagctaatcccctcctccagccactaaaacttaaaggccaggtgtggtggctcccatctgaaatcccagaacttcaggagacagcagcaggaggatcacttgaggccaggagtttgagatcagcctgggcaacatagctaggtcccatctgtactaaaaattagctgggcgttgttgcatgcctgtagtcccagctactaaggaggctgaggtgggaggatcacttgagcccaggaggtggaaacaacagtaagctataatcacagcactgaactctagcctgggcaacagagtgacaccctgcctcaaaacaattttaaaaataaataagagcaaaacttagataccacgtggtcaccccaacatgcaaaatcaagttttcccctactgagaagaatggggacttgacagctgagttacagagagataatcttcttcttcttttttttttttggtttacatcctcaagatcatgacttgtgaaatttgaatcgaatacacatgtaattccagagcaatgttgcctccgcataccatcagcaattcacttggctactggaagtcaggataagcttcccagaagagaggtaccacttgggctaccagtataaaaggatgaaaatatcagagtgatggtgttctttacaacgttgagtccctggacagcctgtccactgatgctgatatctgagcctaatgcttctctgaatgttgagattgaactttgatccaatgaaactagaacgagaaagaagataagtctttcattgttgataaggacattatgtttctcatacttgtatgattatttttccttagctgtactataattatctgcttatttgtctctgctctatgtgcttagggtacaaagttgaccaagaccaactttggttggaagcatagtactaagagcacagtactgagagcacagctttaaaaaacatgatgaaggctttaatacaggaaatgagcaggggagaggcatgtggtggttggatgtatcttccttgacacagtcagtgcagctctcagtagtcaagtccctacatgttagaagatgttaccttctgtggaattaagtggcagaacttgccttcaattattttcctttgcagaacaacaccaactgcattagttaggacacagtgctggctgcatttaagtcccaagcgatgattagtctctcactgttggtatagattcaaaccaatcagaccacctcctaaagtttgtagggcaggtaaatcctcatcttagaataaaaatcatcttaccaagtatgtgttttagaggcaagaagaaaacatatttgtttctgtaagagttttgtttaaaaaaaatataagaaaggctctcggtttaggtgaggtaatgaagttgttgatagttatcagatgacactggaatctttacttctctgaatgtgttctgtgcatctctcagtgtgggaacatagagagggagatcctccagcaatgccactgatatggtcagaaactgcatctttctttctccctgctgagatgagatggagtcctttgttctagaagacccatggtggtgccgctgggagtaacccttgagacaggaacacaaatcccaaccaatttgtggttgcagccttgagtctcactatttcccatagtgatgcgtagcagggaatggcaggtgcaccagagcaggagaggacctaatatctcccttcctgttagctttttataaagttttattgtgatcagtagcagttgggaagctacttgcagtcactgagcctcagtttctacatctgtaaactggggatagtagcatggcccctacttaatgtgctcagcaaagccactgaaaggagacagaaatgtatctaaattccctggacttttatcctacctctcttggggattgtcaccaccttcccatgtttgtcctttttggtttgatgcttgctgtcacttctttccttaggtgcctctctgtacggctcttttatcccagggattccagagttacagcacatgcataccaccatccaagcatgtttatttgtctcctgcttcactaggctgtccccaaggaacatgtggctcccggcacacacctggcacaacactgcacatgacattcacccacttggccttgaatctgacaaggaatctggcatgatgttcacccactcaggccaggtgccgagcagccctggaggcttaggggccagagggatgggaaaaggtgtctttctggggtgagtatcagtttctgcaggagggctgaatgtgagaaagaataaagagagaaggaagcgaacaagcacagcttaaacatcgcctatttctattgagttttaagaacgctgtgattttgtttgtcatgcaatccattcatcaggccaggcagacacagaacttgggtgtgagtgacgataatgagctgatataattttcacaccctcatcactgagatctctcccatcaggaatgggtcagggagctcacaggtggcagcaactgctattacaggcctcatctctaccagctcctggggcctgccctcctcccattagaaaatcctccacttgtcaaaaaggaagccatttgctttgaactccaattccacccccaagaggctgggaccatcttattggagtccttgatgctgtgtgacctgcagtgaccactgccccatcattgctggctgaggtggttggggtccatctggctatctgggcagctgttctcttctctcctttctctcctgtttccagacatgcagtatttccagagagaaggggccactctttggcaaagaacctgtctaacttgctatctatggcaggacctttgaagggttcacaggaagcagcacaaattgatactattccaccaagccatcagctccatctcatccatgccctgtctctcctttaggggtccccttgccaacagaatcacagaggaccagcctgaaagtgcagagacagcagctgaggcacagccaagagctctggctgtattaatgacctaagaagtcaccagaaagtcagaagggatgacatgcagaggcccagcaatctcagctaagtcaactccaccagcctttctagttgcccactgtgtgtacagcaccctggtagggaccagagccatgacagggaataagactagactatgcccttgaggagctcacctctgttcagggaaacaggcgtggaaacacaatggtggtaaagaggaaagaggacaataggattgcatgaaggggatggaaagtgcccaggggaggaaatggttacatctgtgtgaggagtttggtgaggaaagactctaagagaaggctctgtctgtctgggtttggaaggatgtgtaggagtcttctagggggcacaggcacactccaggcataggtaaagatctgtaggtgtggcttgttgggatgaatttcaagtattttggaatgaggacagccatagagacaagggcaggagagaggcgatttaatagattttatgccaatggctccacttgagtttctgataagaacccagaacccttggactccccagtaacattgattgagttgtttatgatacctcatagaatatgaactcaaaggaggtcagtgagtggtgtgtgtgtgattctttgccaacttccaaggtggagaagcctcttccaactgcaggcagagcacaggtggccctgctactggctgcagctccagccctgcctccttctctagcatataaacaatccaacagcctcactgaatcactgctgtgcagggcaggaaagctccatgcacatagcccagcaaagagcaacacagagctgaaaggaagactcagaggagagagataagtaaggaaagtagtgatggctctcatcccagacttggccatggaaacctggcttctcctggctgtcagcctggtgctcctctatctgtgagtaactgtccaggctcctcttctctgtttccttggacttggggtgctaatcaggcctctctttcccttatctgttttgaagatcaaaaaagatgttcaggccgggcgtggtggcttacacctgtaatcccagcactttgggaggctaaggcaagtggactgcctgaggtcaggagttcaagaccagcctggctaacatggtgaaactctgtctctactaaaaatacaaaaattagctgggcatggtggtgcacgcctgtattcccagctacttgggaggctgaggcaggagaattgcttgaacccggcaggcggaggttgcagtgagctgagatcatgccagtgcacttcagcctgggtgacagagtgaggctgtctcaaaaaaaaaaaaaaaaaaaaaagatgttcaaggagcagtagcttaagtgttggatgctacaaacatatagaggttattgtagatcttatgcagctctataaaggaataaataagcatcttccccatccatctttagtggcaagaagggttttgggatagcattgattgaggatgatctacttgacaatagtttggacccaaggaggataaggaaggaaagtagtgacggatctcattccaaacttggctgtggaaacctggcttctccttactaaactagaatttggattttacattttcccctttatgttgcagtagaagaggatgaatcctctcactggtgggatcctgccatcctagagcaggtagagagaagagtcactccccactgtgggtagtggaggcttctcacatgtcacatttcacttctacctcaatttcactcttactaagatttgggaatcataatgacaggaaaatagaaaatataaacctcattttaattctttcacagaaaggttagaaattcagtgagttgtggcaacatattttccatcttctgaccttttaacactaattgatatggcttaaattcattctattttaaaccagatttttttggagatagtctatttccaacatgttccttctaggtgacaaatgagggctgttagttcagtatttgttacaataaatgtgtgtaaaataacctcacctttccagaatcatgtcaggaatatgaatctaatgcacaaatgtataactctatgacaagattgcatatatcttttaaaatataccttcccaacgttcattttaatacccctatttcaaacaaacctgcttagcaggttatgttaaacgctcagggcagaggagtaagcaagactgtgagccagtgatgacagcaaaagcatccaggtaggatcaaaatggagtaagaaaatattcctcatccctcagggtagaactccaaagagatattcatgggtcctggccccgtagtggaggtcactcaaaggacaaacatgtttgcatctcatctgcttgaagcctggacacagaggcaccatctgtgtcactctgtgtgtggtctgccatgttgtggggtggtcactacagactcaggcagctgggcagacaataccttagccttagatgatgctgatgcagcccaggagtcagaaactgtagtgcagacaatgccctccttaggccaacacaattaagtgcaatagatgactggcttttctgttagcctcttcattggaaccaaaagcagcattactctaccaaacagaggggagctggaaagaaactacacagtttgcccagcctagcctctgccttgacacggaaccatgtgagtctagacat

SEQ ID NO: 11550 - DNA, 6000 bp, Homo sapiens
ctgaggactcctctctcggcctctctcccctgttgtgaatgcttctgctgaaagccactgggtgagtgcagggacagagagccactgagctggctcagggcctcgtggtggtggtggtggtggtaggggggctgctctgggttctcgagaggcttctccaactctgacatgatcatacctgaggatattatcgaaattcagatatgacttaggaggcctgggatacggcccgagattctgcatgcctggtgatgccagtgttgctgctctgttgccacactggataaaagcatctagaaggtattccaggccagatggggtgggcattccctccctcataccttaactctttgacatggattctgccaccaacagaatcctggacgttttctcccaagagatgataagaaaaattcacaccaaaatcatgatggaatttcaaaatctgtttggatattagaaaatttctccaaaccctggcctttccttcctctcccaactcttgagctcacaggtgttgcttcactgactaaaatcctgacagagctccaattctactacctcccagacaactttatttgcaagctgtttctctactcagaaacaggggtgtcccttcagccgagcttttccaacaatgctgagctgggggctttggtacatctccccctccttctcagcctcagctctctaggtcctgaagtttgacctgggggccctgtccaccgtggggcaaagctgcagacttgttgatgagaggaggatgtgggtcttagggaaagagaaaggtgagctggggacagctggaccagattggagagaccacagggtccctgaaaagcagggggtaagggggtaggaggctatcatatagggaggtccctttggtatgcagactttgggacagaaagcacagttttgtctgaaccctccagaaggccctgaaagcatgggacataagcattgtgttggcgataacagctgcaggtgaaggcaggtgaatgacaaggaagggtgcttagggttagatatgagagctccaaaccaaggggccctgggcaggtccttttgttctactgttgcccctctctcctttccaaaaccccaaagctctgtggtgagctctggagacctcagctttgttctgagagcctctgagaggatttaggtgtctcttcatgggcctggggtgggaatgggagagacagaaagaaaggggacactaggtacggcctctggaaatgatttgaatccctgacccttgaaatatgtcagacccaccctgtgtgaaattccacgtctgctggaaatgtgacggaaatgtgtttagagggtgctggacctgcacttcgaaataaaacaaggctgacagcaagacttgagaatttacctaatgatcatctagtctgataactctcaagagaggaaggacagaaaccctcagagccctggggatgcttcccataaatccagggacaccccccctagacttacaagatggggcagggctgcaggtatcctcacagatggggctggttgagggaggatgcgtgaccaacctagatgaactcaaactctgactcttaatggctcaaaatatagtgtcttgcagttggtgaatgatgacatatttctctggtcaattgagacccttagaattgtccctgggactcatctcaacccatccttctgactgagaccacaggggaagtccaaattacagggaagataatttggggaacaaatccttgaagaagcaggaaagatgagacccaaggacacagatttggaaggcagagtaaacttggataactgtaggtccacttctttctctacaatgttagaaaaggaagtaaatattaagataagagaaagtagtatctgtggggtttcacatcagtgtctctattttctctttggagtaagaggttttcgtggtgtcttagtctgtttgggctactataacaaaataccttagagagggtaattcataaataagagatatttatttctcaaagttctggaggctgagaagtccacgatccaggcaccagcagattcagtgtctggcaagggcttgttcctcttagatggcacctcttgtgtatcctcacacagtgggaagggatggaggggctccctggagcatcttttataagagcactaatctcattcatgaaggttctttcctcaaggcttaatcacctctggtttgatacagtttgtttgttcccaccaaatctcatgttgtaatttaatccctatagtttgatggtgttgggaggtggggtctagggggaggtgtttgggtcctgggggcagattcctcatgaataacttggtgccattcttgtggcagtgagtgggttatcgcttctgtgaaactggattcattcttgagggaatggattagttccctcaagagtgggttgttgtaaagccaggatgccccttgggtttggtccctcttcccctttgaccttccctgccatgttttgacacagtatggaaaccctcaacagaagctaagcagatgtgcaggctgcagagctgtgagtcaaataaacctctttataaatcacccagcctcaggttctcctttgtggcaacacaaaatggactaagacacttggtaagggctccacctcttagtactatcacactgagtacagcacttccacctttccacctcttaatactatcacattgagtacagcacttccaccttatctgtgggagatatgttccaagacctccagtggatgcctgaaattgtggatagtaccaaactccatatatactatgttttttttccccatatgtacatccctatgataaagtttaattacaaattagcacagtaagagattaacaacaataactactaagaaaatagaacaattgtggctgggcatggtggctcatgcctgtaatcccagcactttgggaggccgaggcaggtggatcacaaggtcaggagactgagaccatcccggccaacatagtgaccctgtttctactaaaatacaaaaaattagcccggcgtggtggtgcgcccctatagtcccagctactcagcaggctgaggcaggggaattgcttgaacctgggaggcagagattgcagcgagccaagatcgtgccagtgcactccagcctggtgacagagcgagagtccgtctcaaaaaaaaaaaaaaaaaaaaagaaatagaacaactggaacaattgtaacaatatgctggcatcactactcttgctttttggggctattcttaagtaaaataagagttacttgaacgagtattgatagttgatctgataaccaaaatggcgattaagtcacaaaccagcaaggagcgtctacagcgttggataccctggacaaagggatgattcacatcctgggtgggatggtgtgagatttcatagtgctactcagaacagcacacaatttaaaacattaattttgtatttctggaattttccatttaatatttttggacctctgttgactgtgggtaactgaaactgtagaaagtgaaatcgcagataagaggggggactactgtattaggttctagcatatgcatcttgatcatcattcagaccataccacatggtcttctgagtgtgagggtaaccagatgagtgagaatttaggctaaatggggacggtttgaaacagctgctgggcattggggaaggcagctgattaggacaaatatagagatggtgaacttgggcttgtagcattgtggtattttggctggggaacagagggatttctgaaacttatccttgatcatggtcgcctgtcaccatgagggagataatatgcccaaggaacaatggcaagtgggggtcaaaaatctgaatttctatctagtcagttctggctctggccccaaatcctatagtatgtaattctggtaaattctgctgggttaccttccaaatgttctcttcttcctcagcttgtaaggcctaagagcatcagactaaagcaagcctcgatgcttgctctgttcatttcatccatcacatctagccccataacctaactacctctcaactttaccactgtgatgggagaagaggacatccagacacacctgtgatcatccaagggcatggaggaagagaaaagaagaccgcaagagaatgcacattccctctcagcatcagcactaatttgcttaagatgatgctgtaggagcaccaggcctggcagccatcagctggggaagcaatacctttcaaaggaaaattaacaaaacatcccagtctactctcttacgttcagcctttgggaaagagagacggagggaaggagggaaagagagagatgaagatgtatcctggtctctccaacctgagagttcctctccactccagcagtacagaaggggagggcagaagagagagccacaccacacacactcactgttattattttacatagatgatttcattaagtagtaaagaggtgcaatcagagtcttggtatttaatcagtcagatacttggagaggaataaaaaagcttgccttcagtgatccttggattaggagtgacaaggtggactggagctccctctgaaggacagtgaacaacactgatctcttgtcctctgctccaaaacaggatgtgtggcaggttcctgcggcggctgctggcggaggagagccggcgctccacccccgtggggcgcctcttgcttcccgtgctcctgggattccgccttgtgctgctggctgccagtgggcctggagtctatggtgatgagcagagtgaattcgtgtgtcacacccagcagccgggctgcaaggctgcctgcttcgatgccttccaccccctctccccgctgcgtttctgggtcttccaggtcatcttggtggctgtacccagcgccctctatatgggtttcactctgtatcacgtgatctggcactgggaattatcaggaaaggggaaggaggaggagaccctgatccagggacgggagggcaacacagatgtcccaggggctggaagcctcaggctgctctgggcttatgtggctcagctgggggctcggcttgtcctggagggggcagccctggggttgcagtaccacctgtatgggttccagatgcccagctcctttgcatgtcgccgagaaccttgccttggtagtataacctgcaatctgtcccgcccctctgagaagaccattttcctaaagaccatgtttggagtcagcggtttctgtctcttgtttacttttttggagcttgtgcttctgggtttggggagatggtggaggacctggaagcacaaatcttcctcttctaaatacttcctaacttcagagagcaccagaagacacaagaaagcaaccgatagcctcccagtggtggaaaccaaagagcaatttcaagaagcaggtgagaaggacacgctctcttcctgtcactgatgtttgtgtcctgatgatctcctcccggggcaggtccctcacctttctgggaagtacaacttctgcatgttacaaagtaggtaaccaggttctaggcagatgtgttctgaccgccactcccaacccttttctttgttctctcttgctctcaaaatctatcccaatgtccatccccatcaacttgatggttccttccagcgaacaaggacaagagtgctagtccgttgtccctcctgaacttccatttaggtctctctccacttaggaaaaatctcagcttcttcttgattctctactttgcagagttataaagacacctgacttgcctgaaggaaactctgtgattgaatcttctttccaacatccagtgagtggggattcatgtctgtgacaaattagaggctgttgaaggatctctaagggccccttgggccatgtagtctaaagcatttcctgactgtgccttttcactggaattttctggtgtcagcatcacaatttttatgggcttggttcaagagtcagccgggagaagcctcccta

SEQ ID NO: 11551 - DNA, 6000 bp, Homo sapiens
tgatgtacctgcaggaaaacagtgcgaaggtgtccgcccaggtacaggggagagaagggtggaggtgaggcccggggcggggacggtgtgggtgtcagagaggcagtataggggatctgggaagagactctggggtcagagtggggacgcagtgtggtttccccccagggtgactgtgtgaggtctcttcccggtgccgcaggtgtttcaggagtgcggcccccccgacccggtgcctgcccgcaaccgtcgagccccgccgccccgggaagaggcgggccggctgtggtcgatggtgaccgaggaggagcggcccacgacggccgcaggcaccaacctgcaccggctggtgcgtgggatgaccaagagttgggggcgggggggcccggggccggggatggttgtgggggtcgcgctccagctcgccccgccccctctcgcccgcccaggtgtgggagctccgcgagcgtctggcccggatgcggggcttctgggcccggctgtccctgacggtgtgcggagactctcgcatggcagcggacgcctcgctggaggcggcgccctgctggaccggagccgggcggggccggtgagcctcgggggcgtcggggggcagcagggggcgggaccgcggccgggaggggcggggccgcgcgcgctagctggcgcttcggggctgctctgctcgcaggtacttgccgccagtggtcgggggctccccggccgagcaggtcaacaaccccgagctcaaggtggacgcctcgggccccgatgtcccgacacggcggcgtcggctacagctccgggcggccacggccagaatgaaaacggccgcactgggacacgacctggacgggcaggacgcgggtgagacccctgcatccctgagcctgagccccgcccactgccctgaagcctctcccctctcctggtagttcccgcccgtgcctctgctcttagcgttcattgattaattcactaattcattcaacgagcatttattgagcgttgccctgaaagactgggggtaacagatcaatgagggggtctgtatcctttcaggccagtaggggagacacgaaaacattcttaaagaacagtgggaagccccttataatgggcaaagggcagtgggaaaatgggggagggggcaatttgggggaggctgggaagccagggtggtgggtgacattgagctggctccgcagggtggagtttgccaaacagagaagcaaggcacagacactcattgttttcttctctccttctatctgtctgtctctgtctctctttgtcactcttcccgcacccctcttcctggctgctttctgcttctgtgtacttctgatttttctgttttttcctgttatcctctctccccatctgcctgttttgtttttttttctctctgtctcactgtctcccatcatgatctctccccccatgtctgctgtcggatctctctccttccttctctccctgccttcctgtcactcatggtctttctcccttccccaacccggcatccacctgtgtctccctccctttcctctctctttctgtttttatctcaatttcttttcctccctctgtctccctctgcttctccctcccatcctgctctgtccctcttcttccttgcagatgaggatgccagcggctctggagggggacagcagtatgcagatgactggatggctggggctgtggctcccccagcccggcctcctcggcctccataccctcctagaagggatggttctgggggcaaaggaggaggtggcagtgcccgctacaaccagggccggagcaggagtgggggggcatctattggttttcacacccaaaccatcctcattctctccctctcagccctggccctgcttggacctcgataacgggggaggggtgccctagcatcagaagggttcatggccctttcccctcctcccccctcagctgggcctggggaggagtcgaagggggctgcagagagggtagagaagggactttgcaggtgaatggctggggccccaaatccaggagattttcatcagaggtgggtgggtgttcacaatatttattttttcatttggtaatgggaggggggcctgggggtatttatttaggagggagtgtggtttccttagaaggtatagtctctagccctctaaggctggggctggtgatcagccccaacagagaaaatgaggagtttagagttgcagctggggaaggggtttgaaggaagttggaagtggggaggggtgggggcatctggtctcagaaatggaccagctggatgcagggcaggggactgagggtgcttgagtaggatgtgagacttcatgggcctgggttctgttgagttttttcagtatcaatttcttaaaccaaattttaaaaaaaacaaggtgggggggtgctcatctcgtgacctctgccacccacatccttcacaaactccatgtttcagtgtttgagtccatgtttattctgcaaataaatggtaatgtattggaccccatgtgtggcttctgtgctgtcaccatcagtgcctgagccctggctcctagcagaggtctcagagcctctgtgactggctcattttctgccggcttttcacttcccttggcacctgtcccccaggaggcgggcctagacaataacctctgatctccaaattgcccaccctctgggcctctgagcatcttcgtttgtacaacagggagaattgtggggaccaaatagaatctgtgtgaaaaagcaccttgtcacctgcaaaatgctctttgaacatgaggcttttttttttttttttttgagatagagtctcgctgttgtcgcgaggctggagtgcaatggcgcgatctcagttcactgcaacctccgcctccccagttcaaatgattctcctgcctcagcctcctgagtagctgggattacaggcgcctgccaccacagtcagctaatttttgtatttttagtagagacggggtttcaccatgttggccaggctgatcgcaaactcctgacctcaagcgatccaccagccttagcctcccaaagtgctgggattacaggcgtgagccaccgcacccggccacgaagcattattaaggtgaccacaccactgccccctgccttcaggatgggaggccttgttctctgagtgtcagtctctggctaccttgccacgtccttgacaatgtctgctttcaaatatcactttctccttccttccttctttctttccaccgcctgaatgaatcttttgttctgcggcaagccaagagaaaatggtaggattgattcccaagtgtgaaagcgggggcggaagtggtgtcttccaagaggagtctgggtgccctgccgaagaggggaagatgcagcgagggagagacctagaaccgcgatcaaagctgcagcagctgctggggctggcggcacaaagggaggagggaggagcctgggcgctgagaaagttcttggggaaagttgagctgagccaagagtcgggcggtggctgggatgggcgggagggcccggcccgatttcccttgctgctccccttgtggcctggtgagtgggaagtgaaaccaaggataggaccagtggagggaccctctaatttatgggaggagacatgaggggttcatggaaccccagcgggggcaactgggcagtcaccaaagctggaggggacagagggctgggatctccaatcatgggaagggagagatggatggaaggaaatgaagaactctggataggggagacgcggctagaccccaggggctgtgatcagggagggaattggggagtgatgccagagagggcaggtctccgggagtaaaagtgtggcttctctctgcttggggttacccctggctcatcggagcagggagctgtcggggcttgttggaggggccgtggtccctgatcgcgagttgtaatctgaaggggcggggctggactcccggttgattaggaagctcgggcttcagaaggaactctgcagttagtgtttgcgcctttctccttatctttgtgtcatagtctctctgtccctctgtctctctctctctgtttctctgtgtgtgtgtgtgtgtgtgtgtgtgtctctctctctttctgtctccctctccagccccaccctttcagtctcctccgggtgcactgataaggttggaaagtggaatggtgggtaagtccagggatctgggctttataagtagccacacgtctcccccagcccctgtcatacatgggggtctgccccgtgctgagacagagaaaaaagaggcgcgggaatttataacccaatggctcttacccattgcaatgccactcctggaagtccaacctcccttcctcctgcctgggttcatacacctgtgtcctgtctgatcctcattcccactgtatggcttcccttcctggtcctgggatagggctctttatccccatctgtgacagccagaggggctctggaggaaaccaggttcccgaccatggtctgacctgactgtgttaatgagctgattgatctgatctctctctctcttgctggctgtttcattcacgagctggggctttttctctccttcccttataaatccccaaggctcagggacaactgtaggtggggagcgggaggaactggagataagaaagtgatagagcagagacagtagttgtggggccacctaggagagtctgggtatagacaacatccccagccactccccttccctgaaggaggtctcagctgcagcaggagagaaggctgcctctgcctctctccttagacttcccttcttcccccctcatttcccttctagacgctgacagaggcaaaaatctgctaactcagggggcagactcaaccaagactgtgagcaggcctggggaatgaccccccgatctccaaccagtgccttccgcagctgcacggctgtctccagctgtctctgcccctcttcctggccctggctccatctctctgtcacctcacccttccctgtgccacatgggccctctctctcctgccaggacgctgcggctctggggacctcggagcctgggggtggctctgggagtcttcatgaccattggctttgcactccagctcttgggagggcccttccagaggaggtgagttcccactttgccccaactccttctagacgccccgtacttgctcttccccatcccacctggggctggtgactcctgaggactcagaagcctccatgccctctgtcccttctacccatttgctgctgaggaacaggacactccccctccatctcttcccaggctacctgggctacagctccgacagccctcggccccatccctacgaccagcccttccgtcctgcccaccccggcagcgactggtgttcctgaagacacataaatccgggagcagctctgtgctgagcctgcttcaccgctatggggaccagcacgggctgcgcttcgccctccctgcccgctaccagtttggctacccaaagctcttccaggcctctagggtaaaaggctaccgcccacagggtggaggcacccagctccccttccacatcctctgtcaccacatgaggttcaacctgaaagaggtaaggagtgtcgcagtggtgggagggaccagaaacagatgggctcaggctgacaccaccaagggagggggcccagacctgggggctccccaggcatcatctcaccctaaagttggacataggggccacaaagttgggctccctgccatcctctctacaggtgtcccttccccagtagtttctgggagcccaagtcctcctcccttctctctctggcgcttactccagtctctctctttcaccaatgtatttccctggcatcagtgccttgccaactctgagcccccaactctccctccaggtgccccttactcttctgtttttaaattattttttggaagacagggtcttactctgtcgcccaggctggagtg

SEQ ID NO: 11552 - DNA, 6000 bp, Homo sapiens
ccagagccctggacacccgtcctggctcagctgtccaggactgagtcccttcatccttcccatgtccttccttctgttctggccaccagagcagaacccctgcccctgtggcttcccaagtcttcccctctcccccaagccctgtcccttcccagaacctaggtgtctgcttcccccagcccctttttacccccagagcatgcgactgaaactcattgccagcaacagcaccatggagcgcaagttcagcccctggatcgggggttccatcctggcctcactggtgagaggaaagggacctggcctagcactgactgtgggggagaggggagacccagacagtgcccgccactttgactgcctcttcgttcattcattcattcaacaaacatttagttttgagaaatgtcagtcaatgaatgttcccagaagggtgaacaggacacaaatcggggggcaggggcccggtatggtggcccacacctgtcatcccagcactttgggtggctgaagtggggggatggcttgaggctaggagttgaaaacccagcaggggaacatagcaagacccatctctacttttacaaactggggagaagaggctgcgcacagtggctcatgccggtaatccctgcagtttgggaggccgagacgggtggatcacttgagctcaggagttcgagaccagcctggccaacatgacgaaaccttgtctctactaaaaatccaaaaattagccaggcatggtggtgcatgcctgtaatcccagctattcaggaggctgaggcaggagaatctcttgaacccaggagacggagactgcagtgagctgagatcgtgccactgcactccagcctgggtgacgcagtaagactctcaaaaaaaaaaaaaaattgggagtagagggacaggtagttggagagattggtcaggatgagattttggtgatacacccactgtgctcagtcagcagaggggagaccctgatgttttggggcaagggagtgatgtggcaatgcaggcatgattggaaagactgccaggcatgagtctttggggtcggggtatgagctggggtcaaggggaccttacaaggaggctgttttgattgtcccggagtcatagcatgggtagcagtggggatggggtggacagcaaggggcaactagtaaaggaggcaggcaggttggttctggggcaggaggtggtaagttcagtctggacctgctgctgggttcgaaggaaggtactgagcagggagctggagttgcaacccgcatctggagggtatcagtcacacagaggggacagtggggccatgacagacaaggaggacatccacgagaaaggaagtcccccagggagacagaaaccagggtcagaaagacagaggctggcagtctgaacttagctcagggctgaagcatgtcagccacacagttcttgtttttttcctttttttgtttttgtttttgttttcgagacagtctcactgtcgcccaggctggagtgcagtggagcaatcttggctcactgcaacctccatctcctgggttcaagcgattcttctgcctcagcctcccgagtagctgggattacatgcgtgagccaccacgcctggctaatttttggattgttaatagagatggggtttcaccgtgttggctaagcttgtctcaaactcctgacctcaagtgatctgcccatcttggcctcccaaagtgctgggattacaggtgtgagccaccatgcccggcctgaaattaagtattaataatatatcctggacaagtggagtggctcacacctgtaatcccagcactttgagaggccaaggcgggaggatcatttgagcccaaaatttctagaccagcctgggcaacaaagcgagacctcatctctacaaaaaatttaaaaagcaactggcaatgtggcgcatacctgtagtcccacctacttgggaggccaaggttggaggatcactggaacctggaaggttgaggctgcagtgagctgtgccactgcattccaacctgggtgacagagcaagatcctgtctcaaaaaaaacccaaaaaaattgggtgtgtattttccacttagagcacgtctcaatttggaccagggctggtgagctacaggaagctagtggccactgcattggacagcacatgtgtgtaggctgagaaagatcaaagaagcccagccgtggtagctcacgcctgtaatcccaacattatgggaggctgaggtggaacgattacttgagcccaggagtttgagaccaggctgggcaacatagtgagacaccatctctacaaaaaataaaaattaggctgggcgcggtggctcacgcttgtaatcccagcactttgggaggccgaggcgggcggatcatctgaggtcaggagtttgagaccagcttggccaacatggcgaaaccctgtctctactaaaaatacaaaaattagccgggcgtgttggcacgcgcctgtaatcccagctacccagcaggctgaagcaggagaatcgctggaacctgggaggcggaggctgcagtgagccaagatcgcaccactgcattccagcctgggcgacagagcaagactccatctcaaaaaaataaaataaaaataaaaataattaaaattaaaattttaaaaaaatagagagaagggacactctgagatgctcattgcaggaaccctcaaggggcaagttgtaatgccgaaggctgcagatggggtgccacagtgttggaatggtgaggtggagggaatatcttccttgggaaagagggagactggcggtgttccaaagccctgatggagtgagaagaggacacctggtggggaaggactgtgtgtgtgtagggggtgttgagtgccaggtgcaggttgcctggcctggggctgtgcgtgccatccccccagctcaggaacagggcctagctcagggcagagactgctgttcaataatacttgttgaatgaatgaattattgattgaatgatatgaagaggatactctccctctgaatatgaaaggggacagaccgaggaggggaggatgaggtggggaggggcttcagagggatgtgaacccaaggggtggttggggcctgttggaggattcccaggggctgcacctgcctgtccacacctccctccaaggccaccctgaccctgatattaccccctccacccagggcactttccagcagatgtggatctccaagcaggaatatgaggagggcgggaagcagtgcgtggagcgaaagtgcccctgatggcactcctccccacacacctgctcccaagctcagatggaagtcccttaacccccatgccacattgcccccctcctcctttccctcttgtcctcattaatggtgatgtttctgggttgaaagaagtaaaaatgttttaagaaaaaaaagtttggcctccgtggggtggggagtgggcacaggggtctggagggaggtgaggggagggagtctcacttctacacccatgccgatcccacagtgggtgctgggacacagccccaggggccatggattcctcaggtttcctaggggttgtgacccagggagggccacatgacgaggaccgggggttgggggagttgctgggggctaacagttgtggtgggaggtgggaggggctgcagggtgcagtggaggggcacggcctggggtgagtgtggcaggaggtgggtggagcaggaggtgaagcctggatgggcggaacaggaggtggggcctggtgggcggggcctcagcgtaggccttaggtctcaggggagcagcacgcctgagcaccccaggacctgcgctcaggtgagatgcgctatgccttccttcctggggctcttggtggtgacagacatggggcggggactagggcgctggtgcatcccagcagctcggaacttctctggacctgagtaggagctgatgtttcccaggggaaacccgaaagggaaacttggtgggaccctgagccctcctcttcagagctacttgtcttggggccctcggaagggtttggggacctgcgccccctgcctgtttagcagtttatgcctgtgacatgtttctggggtgaggctaactggcctttcatcagcctcagaacccaaagaggtagaaacccatgtgatccaagtccttcggtgaccaaacgggccggtgcccagggaggaccatgacttgtccagggtcacccagctctgcccacaccttggcggggactctgatcactcctccccactgacccacatatccctgaccccaggacccctatctgggagctctcgctggtctcatctgaccatgtgctcccacctgtgcccctccttctccagcagccagcaggagtctgagaacgacctttcaaaagagacacacatgcacaccaccagaccagacccccaagtcacaccactgtggtgcctccagcttagaatgccactggggcaagtgtcaggacagggaggacagctgatatgtcacaggaccggggcactgggggactctgaaggccagatgaggaaggggcagatgtcttaggggtgaatcttccacctgggcatggcggggcttaggaaggggtccccaggatccagggaggggtaaaagcaggagaggggagggggcacccatgtctctgccctcccccactatcggcccccttcccccacccctgatgggaactaggaggccaaagtccgccccaaggtcaaaaaattgattgttttgcagggaggaggcaggcgtggggctgtggagagattggcaggggagagcacagccccttgtgctctggcctggacccgggggccacgtctggaaggctggactgaggccaggactgtgcccccacccttgggggtggtgaggagcagccttggttcaggctgcctgccaggactgataaggggccctcctagggctcccacaaacggtttatcggtttatcgctgggggacagcctgcaggcttcaggaggggacacaagcatggagcggctttggggtctattccagagagcggtaagactagtgggattgggaagaccccttaggccttctctctaagtccctcagccccctcccaagcccctgaggctggcccctcctggaccgtgtcctgacctcgcttcttcccacccctgcccctcccccacgcccccaccaccatgctcatttgacacccccaagtcactgacctcattattgccagatgcctccccaccccccaggcctcttgccccaatctcatgcccacctcgcctgcacagcaacaactgtccccaagatcctctcagaccgtctaccagcgtgtggaaggcccccggaaagggcacctggaggaggaagaggaagacggggaggagggggcggagacattggcccacttctgccccatggagctgaggggccctgagcccctgggctctagacccaggcagccaaacctcattccctgggcggcagcaggacggagggctgccccctacctggtcctgacggccctgctgatcttcactgggggtgagagccgtccccctccccagaagtgaagggcttgggctgggggagatttctggggtccagaggtgggcataaagagaatccccatcttgccacccgccagccttcctactgggctacgtcgccttccgagggtcctgccaggcgtgcggagactctgtgttggtggtcagtgaggatgtcaactatgagcctgacctggatttccaccagggcagactctactggagcgacctccaggccatgttcctgcagttcctgggggaggggcgcctggaggacaccatcaggtagggatggccctgccccatcctgttctcgagtgtccctcccctcatccgctcagactgggcctccctgcctcctggcccaggcctctggtgtctgggtccccctcctgagtcctcccatctgccttcctggcccccctgttcagcggtcctg

SEQ ID NO: 11553 - DNA, 6000 bp, Homo sapiens
tgccctcctggttctttttgagacagtctcactctgtcacccaggctggagtgcagtggtgcgatcttgactcactgcaacctccatctcctgggttcaagtgattttcttgccttggcctcctgagtagctgggattacaggtgtccaccaccatgcctggctaattttgtttttgtatttttagtagagatggggtttcaccatgttggccaggctggtcttgaactcctgacctcaagtgatccgcccacctcagcctcccaaatgctgggattacaggcgtgagccaccacacctggccctgccctcctggctctaagtcggcccctcgctaccagcctctgccctccaccccaattctccaatcccagctgacagtcacctccatgcccccaagcctaaggcttcgtgtcagagcttatccagtctctcttgtttatttcacatacacgagaggaaactgaggcacagaaagggggtgtggttgctcacagccatgggagccagtcactggcagaggcaccaggagctcctgggtcctcccacagcctgagttgggcggactctcccgccctcctctcagtcccatcccccgcttcctcctccatccgcctcaccagtgtccgcatcgtcatcaaactgaggcagtctcttgccgagctgagggagtcccgcgtgggggtcatcctggaagttgtcattctccagggcctccagctgccggttgatgcgacgctgccgggcagcccggtccagcacccgccgctgcccggggtcctgggagcgaactggatggagcagggcacgcaaagttacagggcttccaagaaagagcagtgtggccgccgctctgggcagggcgaggaaggcacccggggtggaagctgcagctctctgatctcatccccattgccaagcccttggtccccttgtctcctcccgggccaagccctgggcccacacttcctgtcccgccagctgagaccctttcagtttctcctgcctgttttctccgccttcctctcaatcccagtcccagccagtgagccccggcctggagacagctcactgctgactggggaggtcacagcgccctggggcttccaggctgtcctgggccctcaatacacatggccctcacactcagcatctcacctcctacctcaaaggaaccaggggccacccatgcttggatacgctcatcttccaggccacctacccacaaacgtgatgccaagtgggcacacccctgccctggagcgccccaagtcccaccactgaccccgagccttcacctccagcccattccctccctctcccatcttcaacccctcctcctcaaccggcactttccatcaaagagctggcgacgctcatgtgtctactcggcttcacagctccttctccttcacagcaactcacgtgatgtgtcactttttcacctcccatcctctccttgaaccccaaaatctgacacctgcctggtcatcctgggggaccacccacccacgctctgggccccagagcggctccagtgtgccttcctcctcctccttggacctgagccctgtccaccctgtggcggtgccgactaccttcatcgagtagaaagagaccctttgcttgcttccttgacaaaactgcaggccttctccatgtccaggaatcctccggctccagctcggctgctctccctgcctctatggaggtggctggccctcttctctgctcagtctatgcactcttcctgggattttgactccaaacaaagggctctgatgatcacccacaagcaaatgactcccagagtgactccctcaacacagaacctgctcccgggctccagaactggccatgcagccagcgcctggtgaggccgggtgtggtggcgcacgcctgtaatctcagcactttgggaggccaaaggatcgcttgatgccaggagttagaaaccagcctgggcagcatagccaaaccccatctctacaaaaaattaaaaaataagccaggcgtggttgcacatgcctgtagtcccagttacttgggaggctgcggtgggaggactacatgggcccgggaggttgaggctgcagtgtgcagcaagccgtgatcgcgccaccactccagcctgagtgacaaagcaagactgtctccaaaaaaaaaaaaaaagaaagaaggaaaaaagaaatcacccactggccctgtggacactgcaactcaaaaaaaaaaaaaaattcccatccaagtctgcttctcctgcagattctctctacgcaaatggaaccgtctatgcagacatccaaaccagaaacctagaagttattttaaacctctttcctcggctggacatagtggctcacccctgcaatcccagcactttgggaggctgaggtgggctcatcacttcaggtcaggagttcgagaccagcctgaccaacgtggtgaaaccatgtctctactaaaaatacaaaaattagcagggtgtggtggcacatgcctgtaatcccagctacgcgggaggctgaggcacaagaatcgcttgaacccgggaggtggaggttgcagcgagctgagatcgcgccattgcattccagcctgggcaacagagagagaccctgtctcaaaaacaaaaaacaaaaaacctctttcctcattgccttatcagctgtttgccagattctgataattttgcataatatatctctttattcattaaccacctgttaagcataataataacagcagcagccccagtagctatcacttgttggacacttactatgagccaggcacgtgctcagctctttgcaacacttgaaccatttaacccttacaacagctgtatgggacagtatcatcatccccaatttaccaacattcagagattaagaaatgtgtccaaagttcacatagctaacaagtggccaggtcaggagtcaaagaactacccagcatcaaaaagcatgaccttgccaggcgcagtggctcatgcctgttatctcagcactttgggaggccaaggtgggtggattgtttgagcgcgggagttcgaggccagcctgggcaacatggcaaaaccatgtttctacaaaaaaaatacaaaaattagccaggtgtagtgggacacacctgtagtcccagctattcaggaggctgaggcgcaaggattgcttgagcccaggagctcaaggctgcagtgagctgtgtttgtgccactgcactccagcctgggtgacagagcaagaccctgtttcaaaaaaaaaaaaaaaaaaaaaaaaacccaaaaccaaccaaacaaaaaaaaatatgattatgatcactgtactactctgtctcccctccaaatgccaggcagtgctctaggttttagggatgccaaagcttacagtccagtggcaaacacaaatgattaatgaaacaaacacagtaagtacagcatggagtaggctaggatacggaagtataaagtgctgcagagcccaggacagaaacacccaacctggccttggagtagtcagggaagacttcccagaagaaggtaagtctaggttaaggcctaactggtgaatgacctggctaggggagacagcggggtatttcagaccttgaggccaacatgaaaaaactgatggctgggagactgcgatgcctttgaaaaactgagagggccaagcgcagtggctcatgcctgtaattctagcattttggggggccgaggcgggtggatcacgaggtcaggagatcaagaccatcctggctaacatggtgaaaccctgtctctactaaaaatacaaaagataagctgggtgtggtggcgggcgcctgtagtcccagctactccagaagctgaggccagagaatggtgtgaacccgggaggcagagcttgcagtgaaccgagattgcgccactgcactccagcctgggggacagagcaagactccgtctcaaaaagaaaaaaaaagaaagaaagaaaaactaaaagggccaagcgcagtggctcatacttgtaatcctagcattttggaaggccgaggcaggaggatcacatgagctcaggagttcaagaccagcctgggcaacatagtgagacacccatctcaacaaaaaatataaaaactagcccagcatggtggcctgcacccacctgtagttccacctactcaggtggctgaggtggaagaatcacttgagcatgggaggttgaggctgcagtgagttatatagaaccactgcattccagcctgggtgacagagcaagactctgtctaaaaaaaaaaagtctttgctggctctccagtgtttccctacagagttcaaactcctgggcagtgtgtataatgcctttcaaaatgtaacctttccccagccttcgatcctttcttattactctgtaagatccaaactgtgaacttggcttcctaagcgacttgctttttcttgcttcactgcctttgcacgtgaggttcccactgagagaaaccctaactagactttcaagactcaattcaagctttttcatttttccttcaagctttcacagtcccctgcctcccagaacctgggctagatgccacgtctccctgttcccaggcgctgtgcttccctctgccatagcacaaatcacaaatcacagtaaaatacagtgttaggtctgcgtttctgccccccttccagaaaaagccaatgcttggataagaggggtctttctcctcttcatccccagcgcccggcttggagcaggcaccaataaaacgtgaatgaagggtcaacgccaggacccgagggctgaggaagggatttacgaggaatagctggggccgggcgcggcagctcacgcctgtaatcccagcactttggaaggcccacgcaggaggatcgctttgaggccaagagttggagaccaacctgggcaacatagcgagagcccgtcaccacataacaaattaaaaattaaccaggcgtggggcctcatgcttgcagttccagccactccggaggctgaggtgggaggatggtttgatcccaggaaatcgaggctgcagtgagctatgactatgccactgcactccagcctaggcgaaagagcgagaccaaaaaagaggaatgactaggtaagaaaattctaggactgacttgggaaggggaagggggcgaaccgcgggggctcacatacccgaagttttcttctccaccattggcacaacacaactgtcggaagaaactgctgcgcacgcgtactaaccccaaggctttagtaggggcgccatcacttccggtagcttgtacttctgcgcgtgcgccacagctttgactcattacgtggcgtttccttggagacaagaaagcttttcgccatgttttataggggcaaaaccacttccggcctcagtgtggaggtgtaaatcttgtgggagccacgaaatgggtcattttaaagatgtggtcacggtgttcttacaagaaatcttattttcctttggtccttgtgaagatgctgtgatcacaaaggcagcccctggagcttctccgggcagaagaggaggtgggctggactgtcaaagaaagtggctggcttccgtgggcaatccgaggttcctagtggccctctgcagaaagctgaactcccagttcccccaggcctccgtcccgcggcggactcctaggcttcctccctccctgtcgccgccagcctctcgctctccccgtcttccgcccgcactctctgggcagggctgcggccaggacccgcccccgcgtcccgcccgaccctccgccaggggtcacttcccctgtccaggtttcagcttccacatgtgtcaagcggctggctcagcccagagtccctgtctcccgcccgccggcccgagccgccgcccctcccccgcctcccgtgcgcccgggacaatcctcgccttgtctgtggcgccggcatctggagctttctgtagcctccggatacgcctttttttcagggcgtagccccagccaagctgctcc

SEQ ID NO: 11554 - DNA, 6000 bp, Homo sapiens
acggatcccatctttagctctcgtgcttcaccatcgcagtacatgggtccaaagcgatttcgtcgttccccgtgcacaataagtgaactccctccaatagatgcggtccttatcagtcacaaccactatgaccatctggactacaattctgtcattgctttgaatgagcgatttggtaatgagttgagatggtttgtgcctttgggtctccttgactggatgcaaaaatgtggctgtgagaatgtgattgagttggactggtgggaggagaattgtgtccccggacatgataaggtcacttttgtctttacaccttcccagcactggtgtaaaaggactctaatggatgacaacaaggtgctatggggcagctggtctgtcttggggccttggaatcgattttttttcgcaggagatactggttattgccctgcttttgaagagataggaaaaagatttggaccttttgaccttgcagctattcccatcggagcttatgaaccgaggtatgtagacttccaaagaaaacattcctgctatgtgataaattaactgaatttaaaagtaaagcaattatgatttttgtgacactgtaatttatgattttaatggtggactttgttatacatgattgggggttggtaggtcagattcaattagattttatttttaaatattttaaattaaatattttttaaattgacaagtaaaaattgtgtatatggtgtgcaacatgatgttttgatatatgtatgcattgtggaataactaaatcaaactattttacatgtgcattatctcacatacttatgtttttgtggtgagaattaaaatattttaattatagtcatatgagttaaaaaaattactcaaaatcagggatgatgttaccataagaaagggatcaaggtttaaagaattactatacctagccagaagttcacataccattcaactaaactggtcagccagtaataaaacctactcttattctttcacatggagaatactttctttatataaccaccttttgctccataacttgagtgccccaatcccctgtcctacagctctcctacgtttagcaaagagaaaaagcaaggaattggcctatagcattagtccctggtgagggttttatttcagtcagcactgaagttaatctggtcatggtggtgttgtactactcaccactcatcctccaaccttgacatactattgacctatttcagagcagcgaaaggtcacactctcattggacacctaggagactcatccactgtctttgttttccttaatattctctgtttagggaaaagagaagtgatttcaaagaattaagttagatttcagtcaactctggtttatatgtgcaaataaagagaaaacaaaacactaatagtaacaaagcaatggataattttaaaaatattgtattctatagtgcatggacagatacatacaacaacattttgtttaggtaattccataagtggaagaacaagtatttctctaatacatagatgaattgaatgaatctaaacttttgttttcatctgattttgttatttgctaaatttttacattcactaaaacgattttgtccctatttttatttactaatgcttatttatccctttttgttttttgctagtttccttatttggaggggctagatatttttacccttttttggttcttgataattattaaaatgattacaaatcaatattggtgcttgaattttacttttctaattaaatagttataattctaatgaaacctctcaaaacctgtcaacttatatatttttagaactgttacaaatcagttatgtatttgtaacataaaattggtctttactcgatgtatgttccttttttggttggttgtttgagatggagtctcactctgttgcccaggttggagtgcagtggcacgatctcggctcactgcaacctccgtctctgggttcaagtgattctcctgcctcaacctcccaagtagctgggactacaggcgcctgccaccatgcctggctagtttttttatgtgtgtttttagtagagacagggtttcaccatgttggctagactggttttgaactcctgacctcaagtgatctgcctgtgtcggcctcccaacgtggtaggattataggcgttagccaccatgcccagcctgatgtatgttcttaatagattagaacatcttttatttgttatgaaaataagttttcatatgtagtaatatataaatttgtcacatatatttgtgatgataaaatatgtacaaccaaatttactcacataatccccctttcctgcttgcattgcaggcaaacaggaaacaactaagatgggaaaaagacaaggaggctattatttgccctaagagagttaaattgtggtagcctctaatgtgtagtctgtttctttggttactgttaacggctttagaaataagatattgaataacacttgagagtgctctataaatttaagatgtttagaccgaaaacaactttcaataatatgcttggaatgtttcattcttactttagggaatctcctgtcaccaggtattctatccaagtcagttaagattttaagtttttattttaattgttatatcacagtaaaaaatttaaatctatttcaggtggaaaggaatatatctatccctttgatttgcactaggatttaaaaaaaatcaagagagaaacaccaaaaaccattttcatctttccctgaatcccaagagtcaggagatatggcagaacagtgctgctctcatttgctgttgaggagaacacagtggctttgttttcagccttctgtaggacccagcaactcctaacagtaaatatctgttgcagatggataaacttctccatgatgtcttctgtaaagtgtggaagctcctgtgctgaatccatgtctgttggtcttcactgtagtgttagttgtcactggcagactaggatgtaaataatgtgaatacagtgttgtttttcctccttgaaactgatggcttggaaggcaaaggatttgcttgtagacagtacactttctcctttatatcaggaataatacgtctttcttctgaaagtgttggttttgtttactgttttgggagaattctatgaaagtagatgatgttctctatgctttcctaagccttgtcttgtttaatcctcacaataccctcacataatggggtaaaatttatatttcacagacaaagaaatagcagctcagagaatttgaacagactttccaaaggcattctaagaactgcaagagctaggattcacacccaagccttctgcctcctgagccctcgctcttcccaaggcattaggcaccctttcattatttccttaatcatttacccattagtctgatcttcttgccaaaccaaacacctcattgttcagttttatgattaaataaaatttcttgaatagtaattggatatttggctcctggtctttaaattttatgtactagtttttgtttatttttgctttagcaggtttttacaaatttgtatcagcaggacatacaaattcttttgtaattggagctttggtttttatttctttaccaattattcagtttctttgatacatatccaggactgtaaaatatctacttttaaaagtaacagtgaggcaggacttatttcccagtctcaattgataaagtgaaaaaactggcagctgggcgcggtggctcacgtctgtgatcccagcactttgggatgtggaggcaggcagatcacaaggtcaggagatcagtaccatcctggctaacatggtgaaaccctggttctactaaaaatacaaaaaattagccgggagaggtggtacgtgcctatagtcccagctacccaggaggttgaagcagaagaatcacttgaacccaggaggcggaggttgcagtgagctgggatcgcggcactgcactctagcctgggcgacagagtgagactcaatctcagaaaaaaaaaaaaagaaaaaaagaaaaaactggcaaaaaccagcagatggtgacagaagtgatccctagctgccctcattgctcattagcctaagactctcccaccatcaccatgacagtttataaatggccatggcaacaacctagaagttactgcccctttccatggcaatgaccaagaagttaccaccccattcctagaaagttctaaataatctgccctttaatttgcattaacccattccctaatttacatataattaaaagtgggtataagtgagtgtaaatacagttaccaacccctcatatgttgccaactctgagtgcacttactgcctataacttagcactgctcctcaaggagcagtatcgtttaaaaaaaattgctggccagcaccactggcttgccgttgaattatatttcgtttgtgaggccaaaaaccctcctgggctaagcctcaattttggggctcgcctcccctgcatcatcagtaagttgtatcttcagatagatccagtaaaatcaaaatatacgtgaaacaaaaatctcactattcagaggggagtttgcttgagacttacttattttatagcaatttgtacaagaaagacttttgcttgttttatttttcagcagaaagtgtaccaaagggagatggttttgcctcctgtgacttaattcctgtgcagaatttgttttgtttttacaatctagccttgacctggccttcagacttggtttctagctcatcctccccaaaactgcatgttttatcccagtggttcttaattctcaacatccatagtcctgcgcagaatcttaaagtttggttaagtgaaacagattttagaatttagtgtatatctcaaaggtcagaattaagaaattgccatgtttcttcaggtggtttatgaaataccagcatgtagacccagaagaagctgtaaggattcacactgatgtccaaacaaagaaatctatggcaattcactggggaacttttgccttagcaaatgaggtaagtttgattgcgataaaaataactttgtgtgtttgaccaatgataggattcaggcatcactgttccttagttttcagacccaagactctggaatcagatactgcacagtcatcacagtcactgcatgaattagggtggtaaatcatactaattagtagaacaatacacacatatacagtcagaaaaaaaaaacaacacaacctcattgtgttttcttttggcttatttctgaagttagtaaagcttgtatttgtataaccaaaaatctgtatgtggtctggagactagaaaagcaagccatcatgtctcacccctcaagcaggctctcatgctagcagaagacagaagtcatgtatgtgatacagatgttagaaggggaaagtgctgtaatgtggaacagatgagatggtctcagaatcaggatgtttgctgatggcagggatcagagagggcgtgatggaataagtgacatttgaacttggctctgagagggcagggaggaaggcattttcagaggaggaaagggcagagcataggctcggaggcagctagtgtggggagtacttgaatcagttcagcaggagagtggagggcaatagggagaagtaaggctagtgtggaactttctagaaatatattcagtaaacattgactcggtgtctgctatgtgccaggcatagggataaatgtgattttattcctagattaaaacagaagagataatttttccttaaggcagatggaccctagaactctgccactagcctgggtcctgggatcaagcagaggatagtataaagctttctctcctttcctggatccaaggtcttctctaaacaaaacttagaaatgtatggttaggcccagtgcagtggctcacacctgtaatcccagcactttgggaggctgaggcaggtggatcacttgaggtcaggagttcgagaccagcctggccaacatggcgaaaccccgtc

SEQ ID NO: 11555 - DNA, 6000 bp, Homo sapiens
ggagggaagaaaattccctgagtatacgttttcagatctttttaatattctttaattttttcttttatccgcttttaagttctggagtacatgtccaggatgtgcagatttattacacaggtaaacgtgtgtcatggtggtttgctgcacaggtcaaccccatcacctaggtattaaggtctagcatccactagctgttcttcctgatactctccctaatattctaataccaaataaatgtaattaagccagcaaggatgggaagggggtagggggtggggaagactcatattaaaagcaaactcatctctaaaccagaaataatagcaatatctatacaagtaaatacatgtactcagaacagtgcctactacatgtaaacactgaacaggtgttagcaacattgccattattgtgttagtatattaggtacctggtgctaccggcaaaaccagtttatcatccaactgtctccagtgttgctactcaaagtttggtcctccagtagcctatcaggatcacccaggggcctgttagaaaggcacatctcagaccccaccccagacctactgaatcagaatctgcgtttttaacgggatccgcaggtgattcctatgcacattaaagtgtaagaagtactgggctacagacaggtatgtgacaaaataatttcataggatggcaaaggccaagtggcaaatgaaggacaccagaaatgcacgtcccaggagcccaactcctccttagtaaattaccctattaagatttgtttagagatgttcaaaagcgtggagaaaagcaaatttggtttcctcagctagggacgcggagagtggtctggtgcccttgaagagatcgccctcgtgtggagtagggagggaatctctagcctttcctctcggatgaagaacagcaccagcgctcccagccaaaggcctggcccaggttctggaggtggggtctccttggcagaagcctctggtgtctgcaggcgtgcatttacagctttaagaccaaacagctagtccgccacgtgtcactacagtgtgcacgcgcagaaatgcacaaagcaaaaaaaaaaaaaaagatgctcttaatgaaccaactataatccttgctaaggcataaagccagagggaagtatgtatctgaaatcattttctacccctcaccctcttggagcccggcactctggctgcggtgctctcttgtatcccagttgctagatgcaaaacaagctatttcctatctaatttttttttttaagagacggagtctcgctttgttgcccaggctggtctcaaactcctggactcaagcaattctcccagcttggggtaacgtgttacattattctacttaataaaaagcaaaagttgttttataaattctaacttaaatgcccagaaaataacttatcatgcattgccttgtcgtgcaatagtcaatatttgcaaaccaagtgttaaccaaaggcagttcatcaaagatttttgaaaattaaaaaaaaaaaaaaactcatactcacattgtcctcaggatttcctgttttcgaaatgttcctgtacgaatcggagtctctataatgattgtaattgaaaagataagtcaggttttttgtgtttttttttcattttaaaatcataatacgcaatgttttccacttgaacgctataccttgtgtattgtgcttgcttcagcctcgagcctctactgatgttccacctcaaggcgacaggaatgccacctggagaaactcctgggcggtatgggaagaaagccggtctcatcagagtatatttgcggggatcgacgaccaaggtgttaaattccaagcacgctttggaaagttctaggtgcttgggaagagatccgtaggcggcagggatgcccgcgccccggcgtcccagcgcggagggtggcggcggggcctggccctagcggggcggggcgggctcgggttaccgggagtcgcggggcgcggccggcactgcccgcggcgcctcctcctagagccgcacctggaggcagcgcgcgcgtcgaagaggcagcggctgtggagcgcggcggggcggctccgcccagggcagcccgggctggtgagtgcgcgcgggcggccgcggggccgggggtcgcggtccctcgggaggggactgagctgaggcccgcgggcccacccgagcaggggccctcgctgtcaccgcctctgcccctgtctcccaggccccatgtcgcgctttttccctaaacgaaccggtgacagggctgacctgcccgcactctgctggtccctacgccgggaaggagaaagtctcacgaagctctttcctttgcaacccctgtccccttgccctctgcagctccacacagcatttttacttcccgtttgcctcctcgaatcccttcggtgctaatccagcccttcgccgtttccagtttgggtctggcctgtttgtatccaaatcgaattacacaaaaccaggccctcagttctgcctctggccctctttccggagacgggccctgcctcctcctgtgccgggctgggcttgcccggcattggccgcccggagctcccagggagcaaggctgtggtcccgaaactgggccctccgctcagcgccgggcaaggctcaaaccccgggtctctgacttatccggtcacgaagggactgctcagagcctaacagccctaaaatttggtattggccccctcccgggaaatccttctccctaccaatcaggcatcgcggcaggtgctctgccatcatagaggctctgacacgctgaactctcgaagctcgcggcagtgtttatttttaggagagatttagttgatcgggaaccaattgacttggttgactgcctcatctagtgcgcacctgggccgggccccgccgggaaggcgtgctggacgttctcagtgagctccgagacctacagaagaaacagctgcaaggatccgatcagctagctgtgaagaaagcctcagatacgctgtggggtgggcaaaattcttttcctagcttcgatgagtactgtggattctagaatttaaacaacattcatggagactcttaaaacaacaaaaaatatcaactttttgcgggcacagactgagatttagctttttcctatctgaaaactgaacaatgtgcactagatataaatgtattatctaaagtttaggaatttacagcatagaaatgcaggggaattcggagtatgcaatacgaagtatcaacctttttgaaaatgaaatttaaaatgtatttttgtcaggcattccttctaattacggtagtattgctttgtatcagaagactttcaggcaaaggacaggagggaagagagagaaattcaaactaatttgcattagaaagaaacttagggtgaagaattgcctaggtaaggttgctatagctcatatcttaagtgcactcttggaaagctttctagtctattaggtaacacctgaagccccaattctcttatgtagcatttctttttttctctctttaactactctgaaactatacagagttacacgttcctcattaatttatgagtgaaaccaaaagaattgactcaatccaacaagtatttgagtgcttttcgcatagaggcgctttgctaagaacagaagaatggaagactgaggaagtttctaacaatcaatggattgccttgtgaggtgtagatgcaggtgtgcactgcctatttaattgacgatcaaagtcagttgagttttcatctcattctaaatatcatgtgttgccccctggtatcttaatttttctaccgttgcaggtagtctgcattttagtaacccaagtgaaacagttttctagggaaatcatgataaataggaagcacgtccgtattcccaggtgttctcattatcattaagttaataaagttaagaaaaataagatgatgattttcctttcttttggtttcaaactagtgaaatcttgcacaaaagacacagcatggataaatttaatcattttgtgactcagagtacattttatgtaagtccattctgttggaggatagatccaatttcatgaactcttttaatccttcttttgaagactagttccaggaccaacttcataaaatgttttattgtaggtaccaacaactatcaacatcattatcttctccccaccttcacccttgaaaacaattgtattctagaggattatgaaggaggggacaggactctttcaaaatctggaggacactagggacttaccccagaaaaaaaataaaaaagctcacccattcaaaatcttgtacacctttcagaggattcctggtgcccaggttatgaaagctcacttcagaacgggtcagcgaattagtcagaggataggtagatggagggaaagggaaatgaagcaatgtgggtaaattcacaaactgagtggatatgacttaatttactttcaaatagaataaatacatggccccttgagtaagtattctgtgaatgggaaggaataattgtattctttgtaaaagactgaagacagattagcctaattaagtttttaattgatcaagatcaactcttatcttgaacattatgagtctctcatttttctacttttcttgctcttttcaaggcaactgctctaagaggatttgctcccactactgatgatgccccattctggacacaatttctcatatgcaaacttgtattcatgaattgctacatatgggaatggctgagttcaaaaattgaactatatctttctcacatcctagcagttcacccttaggaagaagatataattatatataattagtctatcgcatgtaagccactgtgatagcagtagctgtgccttggaagggagtgggttggtattaggaatgaaaggagagcgttaagaaatattttggacatagcttctttcaaaaaacaaaccaacaactgctgaattaacttccttttcttcttctatacatagggccaaggagcgagctctcccttctcctgctctcagcctcagtgatcaaggcttcagtgaactgcactggagctcccagcgggggatcttgtcccctgtcccgacttttgtgctgcacattggatctgggtaagtagacggccccctggaactagtaaataggagagtgggtcagaggtagtaatggattttatccagatcaaaggattcctcaaaatttccagaggtctaaatcacacaccactatttggaagaaaagtataagacagaatgccagaaccatcacaccttacacttaccttttaacttggatcaggatcagcctaagatatccttagctatcaaccagctttgacttacagtattcttgagtggcaactaggtggtgggccaacaaccctagaatgtacttaatagatgcttactggatttgtaaattaatggagatcatggttttaagccaagctctgccactaaccaggcatatgatcttgggcaagtcacaggttagttaaattctttggaccttaatttttctacgtataaaatgagggtgttttatgggaccaatggttctcagcaaccaatgtataattccattgcatttgcattgcctgggagtttatttagaaaaaacccaacagagattctgattaattattaatcagatttattctgaggataaagtccttagtgttccctagattttgaaaaagacctgtcccctccctcatggccctccagaatacaatcgttttcaatagtgaaagtgtgggccaggctcagtggctcacacctgtaatcccagcactttgggagaccgaggagggtgtaccatttgaggccaggagttcgagaccagcttggccaacatagcaaaaccctgtctctactaaaaatataaaaattagccaggcgtggtggcacatgcctgtaatcccaactactcgggaggctgaaacagaagaatcaaacccaggaggtggaggttgcagtgagccgagattgcgccact

SEQ ID NO: 11556 - DNA, 6000 bp, Homo sapiens
gtgtgtgaccttgaacaaaacgaagcccctgacctcttcaagtttctattctagggaaagacagacaaattaagtactgtgtcaagcagtggtaattagaacagagcagaaatagagtagagggaataggtagtgcggggtaggagtgctgttatttgatatagtgtggtgaggggaaggtctctctgagaaggtcatactggaacaggaagctatggaagtgagggagtgaagcatgtattccaggcagaggaaatagccagtgcaaaggtcctgaaggaagagtttatcccgtgtcattaaaggtatcgcatggaaagcagtttgtgtatacagattaggtaaaggaaaaagtagcaacatgaggtcagaaatataagggaagaaaggatcttgcaggcctttatatgaactttggtttttattcatagagagctcaaaagccattggagggttttgagcaaaggataacattttctgccttacatttttaaaagattgtcttggctgttgtgttgataacagactgaagctggggcaagggcagaagcagagagatcatttagaaggctgttagtgcaaaattcaggcaaaaggtgatggtagttcagatcaggaggcagtacaagtggtcagattgcaaatgtattttgaaaatagagccatcaccacttgctgaaagattgagctcctggactttaacagcgcatctggaattttttgcttacttgtgttgttttgtagaaaattcacaagtacaaaaataaaaaggaattatttatcttcctttgagaggtgaccagtgttaaaattttgatgcataacctttctagtttttgttgtttaaatctactttgtatgtaatgaacactttctatgttgttaatctccaacattctatgttgttaatttccaacagctatataatgtttcattgcatgaatgaatgaatggatgaattatagtttgattccctgtcaacatttaggttgcttctaggttttttgtgttttagatggtatttgagagaacaccattcatttttttaagcatatacatgattaggaaaataagtttccaacaactttttgagacctggaaatacccacaagggaggtttaacaggctcatgaaatagtgtctcttctctgctgacaacctcttggctttacaaattactggtaacttgtgttccaaataaaaatacctccaattcaccccttttgattttatactaataaatgagtctccctctatatttcatactaatacttagtggatacactaaagtatgagcaaatgaattgtcatatgggctggtacatttatttctatattatactccggggaaaataaaatcacatttgtcgaggtttgcaaatgaatgttttaatgtctttcaccatcttagtttgtgtttaagaatttctagaatgtagccaggcatggtggcacactccttagtcccagctacttgggaggatcacttgagagttcagggctgcagtaagctatgattgtgccactacacttgagtctatacaacagagtgagactcatctctttaaaaaagggtagtgggggctgggcacagtgactcacacctgtaatcccagcattttgggaggccaagatgggaggattgcttgagttcaggagttcaagcccaatctgagcaacatagcgaggcctcatctctactaaaattcaaagaaaaattagccaggtgtggtgatgcacacctgtgatccagctgcttgggggactgaggtgggaggatcacttgagcctgggaggccaaggctgcagtgagccctgatcgtgccagtgtactccagtctgggcgacagaaaccctgtctcaaaaaaagaatttctagaatgttagccaatttttaataatcagtgtgcttacagttttagtgacccttgttttggttgtagtattgcttatcttttttttcttttgtcttttttcatcttactttgtgtagattgcttctatctttgcttttgccacctgtggaggttttaagggccaaacagaaattcaagtgaattgtcctcctgcagttactgagaataaaactgttacagctacttttggttatccattcaggtgagttatatttattttaatggtttcacaactctttttactttcacagtgagtcattaagatttccagcaatttattgattgtggggggtagaaaattttagactgtatgctcatttgtaagtgatcattacctcccaaactgtggtacacagacccatgcctgtctaaaaacatctcctgatctgtgacaaaatagtacagaaagtgagagtaagcatttagaaacttttataacaatgtgatgttgccttgataattttattctaacagaggattggaaatgtaaaaataaagcaaactagagattgttctatcaccttagtataagaagccctaatgtagaaggaaacataacttagaaaaatccagattctcagtgttttttgtaattgctgaatattaatgtctttatatagttttaagacatatgtatataaagagattccatatttcattcattagcataaagccacactttcttaaagtaaaatgagtatttcatctgtgaagtcttgtttgacatcagtatccattgaaaagtttattgaatatgtcctgtgtttaagccagggtgggaatcttctttcacttactaattttacttacttcacccaagactcaattttttggtccagtaattggaagtattatcttgtaaggctgttttgatgattaaataaaatccccatattaaagataagtcagataataagtggttaatcatcaaagcctctctatcttgtatcctttctcctagacacttctcacataagggactgttacagcatctttagtgacaagttttttacaatttatggttgggaaaaatgaaaggcaatatttattgttagcaactattgatccagggttaaaaatgtgaatcattgttgtgattggctctcttggggctagtcacacatactctgccacacagaatgaaatatgatgtctcaaagtataaaccatttggtataatctctcctacctaattgtttactgcaggaagatagtatctgggtatgaaagtatttaattcagtctatattcaatgtatcataaactaataccaggtataacatatacatttattatgaaaatttcagtttacttaaatataatatttgaattttacttttttccccaaaggaatgtttttaatatatttggggagtattttttgaagtgtcactcattgttttgcttaaatgtttctgtctctgttgggaaagtccaataattcatacatttattttaataggttgaatgaggcatcatttcagccacctccaggtgtaaacatatgtgatgtaaattggaaagattacgtcctcataggcgattactcttcttctgcacaattctatgttacctttgcagtctttgtgttcctgtactgcattgctgcccttctgctttatgttggctacacgagtctgtatctggatagtcgtaaacttcctatgatagtaagtaatcactttattttttaaatacaaaaataatttgtataagctaaatatagattttcttatactggaaataaaaattcttggtgtaagccagttcagcatattttagcctgtgtttgccacgaggttgagctttctcccattaagtttaactcaattttttttagcctatttgcactataaggaaagtttatttcttttttaaatctattttaacttggaaaaaactcagatatgtaataaagcacatcaggttacaaatagcaaaaaaattaagtcgaaattcttttaatttgaagaattacttatcacaacatagtctcataactctttctgcttcttactttttttctttctctaaaggcccactttatacttctacaaaacttattgagtttaattatatcatgggttcacaaactatgtcccagaggtcactgtcttattttttatttttacttctttatttatatatttactttttgagacaaggtctcgctttgtcgcccaggcaggagggcagtagcaccatcttggcttgctgcagcctcaacctcctgggctcaaatgatcctcctgagtagctgggactacagtcacaagccaccatactcagttactttttgtgtatttttgtaaagacgaagttttaccatgttgcccaggctggtctcaaactcctgggctcaagtgatctgcctgccttggcctcccaaagtgctgggggttataggtgtggccaggagcctggccttgtttttttaaataaaggttttttttggaactcagccatacacaatcatttacacattgcctatggctgctttcacactgcaatggtaaagttgagtagttgtaacagagataaaaaatagttgctatttggcccttttcaaaagaagtttgttgattcctggtctatgtccctaaactccttaatttaaaatcagacccaggtaattcttatactcagcattagtggcaaccatgaactaattttgaatctttgaggtatcaacaaaggacttagatttgaagtcctatacttttggcttcagagcctactgagctagaaatattctctgagatttagttagtagaatctgccctggattattggtggcaaatccagagagaaatcatggttttaagctacacctccactataaaagagtaactacaaagtcagttattagtgacttaaagggaaaacagaggtgttttttatgtgtgatactggtcattcatatgtatgagaaaacacatctgctaattatttgtgaagttactttaaagggaaggctatttaaatatgaaggattattaaataacattacaagttttatttacatatttatttttaattttgctgctggatcataagaatggaaatggtaagtaatacaacagtcttttatcattcatatttaattctgtttcttatgtcataggagacacaagaaaactagaggttttcataaaatacttctcggttgttaaaaagataagacgtcaactgttttaatttgcagtgcttatccaacatacttgttaggaatctgtgtcttctgcagacttttcaaatcttatttaaaagggaactggaataatcttatagataattatattttgttaaaattctttataactagaagctatttcttgccattttgtcatcccaacaaatttttttactaaatctatcagtgtgccctttatttctcatattttgtctagtaaacttttaaaaatactacccttcttaaagcagcattccaatctatttttgtaggtggtttttgtctgataaaactataaaactgacctagttgcatcattcagaaacgtaaaaagtaattttccacctcagaatgaccaattagtggtcatataaagagataatccaaaattccttaagtaggtttttattgttacataatgggtgcttcttgtctataaaagtctagcttctaaatttaattttcagttctatttttaatgtaaccataaaaatattaaaagattttctttgagagactgggtgcagtgggtcatgcctgtaatcccagcactttgggaggccgaggtgggtggatcactccaggaggtcaggagttcgagaccagcctggccaacatggtgaaaccccatctctgctaaaaatacaaaaattagctggacatggtggtgggcacctgtaatcccagctactgggaggctgaggcaggagaatcgcttgaacccaggaggtggaggttacagtgagccaagatcacaccactgtattccagcctaggtgacagagcaagactccatctcaggggaaaaaaaaaaaaaggttttttttgagatacccaaaatttaagatatagccaaatatgacattaatttttaggtactattaatgagga

SEQ ID NO: 11557 - DNA, 6000 bp, Homo sapiens
tcacaaagaagcaaagaattagcggagagatagcctttctttttttattattatttttgagacggagttttactcttgttgcccaggctggagtgcagtggtgcgatcttggctcactgcaaccttcacctcccaggttcaagcgattttcctgcctcagcctcccagcagctgggactattggcatgcgccaccacgctgactaatttttgtatttttagtagagatggggtttcaccatgttggccaggctggtctcgaactcctgacctcaaatgatctgcccacctcggcctcccaaagtgctgggattaggatttgatggcgtgagccactgtgcctggctgatagcctttcaaaaatgatgctggagtaattggacatccataggcaacctaacctaagcctcacacttacataaaagttaatgcaaaattgatcatggacttaaatgcaaaacataaaactataaaacttttagggaaaaaaacttaggagaaaatattcaggatctggagctacataaaggtttcttatacttgacatcgaaagcacaatttacaaaaggaaaaattgatgttagacttcattaaaatgaaacttttgttctgcaaaagatcctgttaggagcatgaaagacaagccatatacagggagaaaatacgtgcaaatcacacatctgacaaagcagaatatatatctagagtataatagaaaacaagaaaacaaacaaatggacaaaagcacttgaatagatacttctacaaagacaacatacaaatggccaataaacacacaaaaagatgttcagcatcattaatcattagggaaatgcaaattaaaactgcaatgagataccacttcacacccattaggatgattataataataaaataaaaactcccagaacataacaagtgttgatgaggatgtggagaaattaaaactcttgttcactgctggtggtaaggtaacatggtgcagctgctatggaaagcagtacagtagttgctcaaaaaattaaacatagaatcaccatatgatccagcaattctacatctgggtacatagtcaaaaagaattgaaagcagggtctcagagacctgttacgaaccatgggtatttgtatatgggtatttgtacacccatagttcatgacagtattatttgcagtagccaaaaggtggaagttatcttgtgttctatcaatatatgaatggatatcaacagatgaatgaacaaaatatacataaaatggaatattattcagccttaaaaaggaacaagtctgatatatgctacaacatgaatgaaccttgaggatgttatgctgcataaaatattagcaaaataaatccagttctgaacaaatacgtataagacttatatgaggtacctagagtagtgaagttcatagagggagaaagtagaataatggttgccaggggctgctgtgaggaacagtggaatggggagtcacagtttaatgtgatagaatttccatcttctaagatgaaaagagttttagagatcagatgcacaacaatgtgaatgtaattaacactgctgaactgtatacttaaaaatgatcgagaggtaaattttatgttacgtatattttataacaaacttctaaaaaaactcaatagtaaaagagcaaacaatccaattagaagatgagcaaaagatacgaagaaatatttcttcgaaaactgaacacacaactaccttaggacccataattgcactcctatttgtcccaagacttaagttcacataaaaatctatacatcaatacttatatctatttaatatccattatatacttataggtaggagttacaaccaccaccatttttatagatataaaaagtgcagctcagagaagttaattgtttactcaggatcacatatatactaggcaagtagtagcatcatgactcaattctaagtcatgattccaaagctaagagtttgaagttcccatatggtgggtggtcttacagtacttttaaaaagtcagagcataaaagggaaatttcatcttagttcattaatcattttgcaacacttactttgaatatcgaaccattggggcacagacttttaccagctgtccagaatgaaacatttctatgggatctttttttctttcctgacatattgtcgtttgcatgcagtcactcttcattaatacagatatgtttcaaatctgaaaaagacaataagcttgtatagagaaaatatgttttcactatattaattccattctaacaatttcaactgccaacaacatatattttttatcaggcttgtgggctcagaaatttttttattaatagcttattttcacagtatccaatatgatactatagaatgctgcctctatttgtaagataaatagatgtggaaaactacccaagatagttgtggaaacacaagatgcagaaaacgagattttttttttttccctagtttaccatgttgtaagttttcatgttatttaaaaattttttacatgttactttgttgggattggtaagccaagaaatttggtttgaattattttatatatgatactcgactggcatttggaaatatcttgttttattcaggaaagttaaatggcattaatagagcaactcttaagtagtcagtgtttcaaaagatatgctggtgcttttattgtaattcttgaatcctgttctgtctgtgaatcagaagataaacaaacgttaattatttttaaaaattttaatgtgatattatctagtgaaaatttcaattataattctacaattgcattgtaaatcacttttataccccaagaggtacaggtacgagtgatgaaattatggagtttgtaaatgttttacatttgctatacttaaaatcctactatttcacagtgttggctacttttcatattccagtccttggcctcagtaacttagaaacaggtatgtatgaaggaaaaatgaagcagaaaataacaacaacaaaaaaaagaatcagatatgggccaactttagaatggtctaattgctcaaactttagagtctttaacctttaggcaaggagttgaaattaaaaatagccaaggtacttaaggatgtcaggatcttgcaagaaaccgctggaagcaccaatatttaagtaacagaggaaaaggggagagcaaaagagactgaagatgaactttggagctgggaggaataaacctaaagagtgatactcagaaaacgagagagaccattatgaaggaaggaggggataggtatcttaaacatcaaagtaaggcaaaaataaagcgcaatggcaacaaggtcattagtgattttagcaagaattacttcatttttatccactcctgcagtcatagtaaatggcatacagaaggcctcaatatttatttgctgaaagaataaatcagtaggtttcaggggactgggctcacacctgtaaactcagcattttgggaggccaaggtgggaggcttgcttaaggccaggagtttgagaccagcttgggcaatatagtgagacccccatctctaaaaaaattataaaaatcagctgggcgtggtagcaagcgactgtgatcccaactactccagaagcttgggcaggaggatcccttgagcccaggaggttgaggctgcagtgagccacgatcctgccactgcactccagcctgggtaacagagctagaccccaactcaacaaaacaaaacaatcagtagctttctaccttagttgtacactacaatgacccgaggagcttttaagaattagcatgcccaagccataccctagaccaattaaatccaaacgtctgggctcaggatgcaggcatcagtgtttttattaaagctcttcaggtgatttcaatgtgcagctaagcttggaattactggaataagtaaatccaaagattccaaagcacctggtacaattgtttgtttaaatgggttcctaccttacctattaactccttttagaatatggattgagtcttatgtttgtaaactcatgagagcatgcagagtagaggggtcaaaactttcgctgtatgaatgaatattactcactcttctaaaatcttccactggggggaataaagccaaggaaggaaaaacaattcctaattcacaagtaatgaatgaatcacccctattcccatcatgactaagatcttacatactagggaaaatcctctgagacaaagagagcataatgcagtgtagcataagacttgcttacctgaggtgttatgagtatgaaatgcattgagttataaaatacttagaacagcgataagcacaggataagtaatagcacctttttgaaacagaatgtagaaaaccacgtagctctggaactggataaaattggtttcctggatacatacctactgtacaaaatgaaaaagtcatcttccagcttctttttgcgaagaagcttaagactgtcttgcatacttgtggttgcctgaccctgttaatttatcagtatttatcttagaagaaagaaatctaggtcaaaaacgcgaacgtattagtaaagaagatacaatgggaaccaacctgatgctcttacagcgtcaatactgttagttgagatgtggaccatctatcagtttgtaattaagaaaaagtctggcacgtgactgaaactgaggaagaagtagaaaaggcaaaaggtcaaaggtctcatgggaaggaaggagggtagagacagtgagttttattggtccttttatggttcagacttccttcttcatcgactctccctaattctcttcactgttcatccccagcaacttttcttcccaagcatttcctgcgggcttttattaccccaggagtgccaatcaaggcgtggaacagataaagctgtgtagcaactaacgcgtgactcttgtgagtgtggagggcaaacgaagctccctgaaacctccgctctgctctcctgccttacgccgcgcggcccctgttctgaggtttaatacttgcttcacagataagcgctgcggccacgttccggtgcccaccttctccttggctagggcacgacgccagcccagggggcgcggccctgagctgctgcgagagacagctgaaagcgccggcccgacggccttggctccctcggtgcgctgggcgcagagcactcggaccctgggcgcccactgctcgagtacctgcgcggctcctagccaggcttagcccaggcgcgggctgagagtcagttcgccaggtgggcctggagccatgggctgggtgggcgggcggcgccgggattctgcgtcaccacctgggcggagccgttctgctgctgacgacatcaacccggcacctgccaacatggaaggtggcggcggcagcgtcgctgtagctggcctcggagctcgaggctctggagcggctgcagctacagtccgggaacttctgcaggacggtaaggagacggggtctgaccaggtcgtggggttgggggtctgcgctgctccgcacctggacagcgaggtggacccaacccgttgctttgcagaaagttttccagtctggacgtgaccactcccctccgcccggccccctggcttgggtactgttctagccaacctatttactctgggactggctccctcttttctggagtcttggggacacttggtttctgtgtgttcctcatttcaactcgaccccccccccccccatgcctccagcttccctgaagtttcgggagcccaaaccctgtggaccgcgttggcagccaccggctgctgccgcagttcttgacgaaggggtgtagcgttcgagctcttcaaaagtgtaagctctagaacagacggcagacgcataatgaaatagggccttgttttaaagtagagctggaaacgcttactcctttaacaaatggactgtacaggtgacccctcttacaggctggttttttttttcctcctttatgaggcagttatctacagtgacacgtgggg

SEQ ID NO: 11558 - DNA, 6000 bp, Homo sapiens
agtgaggtacaagctagagatatgggaattagaggttgaggagagtccaagtgatgcacccctggatatggatgagtaaagggagcagaaaagagagacagaacctttggtagcaccaatgtttaagggatcagagaagggcaagataaatgggagaggaggggtcaaagtcttgtgggaaaattctggaattatgtcctggaagctaaggagaaaggagtctcaagaaggagggtgtgatcatctgaagcataagccacaaagagatcaaataagatcacaatgggaaaacgtccattgcattcagattagaaagtcaagggcacttaccaagaataaatgtgtgcgcaaagaattgcagggtgcacagagcttcccctccttcctaggaagacattgtagatgccacgcccattccaagctcttggatacgaggggcggagaggacgtgtcactttctaaagaacaaacacaacaggtggaccctgtttctaaagggttaacccgccttccccgagtgcagggcatgagagttttagccgtgggcaccgtttggtgattctccaaaggaaggagagggagtatagagtctttatccttcattccagccacattgcctagagcaggagtatggaacaaagctcaagctttgattgagcaaaccctagaatttgctcaatccttcctttggcttcatagctcaggttcttgaaagtatagtttgctcttatgctctgctttccccaagttcctcctccattccatggcagtgtggcttccatctccaccacggttcttggtaactgaccttgactttttttttttttttttttttttttttgagacgaagtcttgctctttttggccaggctggagtgcaatggctcaatcttggctcactgcaatctccacctcccggtttcaagcaattctcctgcctcagcctcccaagtagctgagattacaggcgcctgccaccacacctaatttttgtatttttagtagagacgggtttcaccatattggacagactggtctcgagctcctgacctcgtgatccacccgcctcacaccccttacaggcatgagccaccatgcctggccacccttggctttctaattgctgaatgcaatggacattttcccattgtgatcttatttgatctctgtggcttatgcttcaagatctccctcttgaaactcttttctccttagctcaatctttgattccatgagcaaatctccagagctcaagctttgattccatacaatgtagagtttgtgttgtttttacttaaaacaggaggaggctgagcaagtatatgagagcactgaacttagtagatgagaggagggcacacttctaggagagaagcacaaaagatacaggtgggaagggaggtaggcaaattcatagatgaagtggtcagaaggtgagtgttacacacactcctccccctgcacatatacaggcaaatttttaaaaacctaattttctcagtagtgttcaatttactactgcaagtgaggtgatcaggagagcaggtaggcttctgaacagtgctgaaagtaaatgaccttttgcaaggggagaggacgctgagcagggacaggtagcaaggagggctcagctgctgtgagagcagaggttaggctcaagaaagaaaaggagctgaaagatgcttgcagtgtgtgcacatgaaaatacgaaactctggcccagggtattaaaagctcaacaggaagaaaagacatttgccttttaatatttttcttttaattaagccctgaagaccctccattgcaattctacagcctcccaacagcaaggactttctcagcgctttcaggctacccagccggcgcagaggatcctaagcctcagcagaggcaaaacctccccaggctgtagcagggcaagtgctgatttggtgaataattaatgcctcactcacctagaccccaaggctcccgcctgcctcagactcgtgcaggcttacgaactcgtaaagcagctgactctatggtctaatgattaaacttctctgggccttatttcgttacagctaagttaaaaactgaccagctagccgcttaaactcttctcccggaaatgactggaaaacaagccaagtctcctgactggactgacaactaactatactccctgaattccagccacatttgcccagagcaggactccaagctttgactctgtccattgctaagggtagcagaatgggtggtggggtcccgtcaccaacctcttttccctctccaacccctagaaggtggtgagtttctatgtacccctaatttcaccaggcaggttacactgtgttgttagagacccttcattagaggccctctccccacctcagcatttgcacaccatggagaatcgtcgagatgagcgttgtggggaagtgcctctcatgagagatttccacttcctggctgtgtcaactcttccacggcgagatgggaaacggagtcagtaacaataatagtgtcatttgaggaattacctgagctaaagccatcatctggatataggtaggaagatttttttttttttttgagacgtagttttgctcttgttgcccaggctggagtgcaatggcacgatcccggttcacggcaacctccttctcccaggttcaagcgattttcgtgcctcggcctcccgagtagctgggattacaggcgcccgccaccacgcccagctaatttttgtatttttagtagagatggagttgcaccatgttggaagtagattttttaaaaacagaactggacgttcaattcaatgccgtgaccacctgggtaacagggattacagataggtcctgaataaatgtgtgcgcaaagaattgcagggcgcacagagcttctcctccttcctaggaagacactgtagatgtcgcgcccatcccaagctcttggatactaggggcggagaggaagtgtcactttctaaagaacaaacacgacaggtcgaccctgtttctaaagggttaacccgccttccccgagcgcaccgcacgagagttttagccgtgggcacgtttggtgattcacttcttgcgaacgtaaatgcgcgagtccgcggtaggtcccgccggccccctggctgggcaacctgaaaacccacctcggagacgcccccacgcatccgcccccctcgctggacggccccgccgcgcgccgttctgggacgcgcaccccggggcggacccgccctgggacctggaagcgccccagccccgcagcgatcgcagattcggctttcaaacaaaagaggcgccccggggggtgggaccgggacctcacccggtcctcgcagagttgcggccgcccgccccttcagccccggctctccgtatgcgcatgagcagaggcgcctccctctgttcctcccaaggctaaactttctaattcccttctttgggctcgggggctcccggagcagggcgagagctcgcgtcgccgggtgaggagaacaaagtggctgcacgattttccccactttccagcccaccccccgcttccgtgggagcgacaggaaatggaagggcgcctcttctctctttgaacatttgccttttttcccctcctttccacctctccagaaaggaagacgggaagaaagggcaggcggctcggcgggcgtcttctccactcctctgccgcgtccccgtggctgcagggagccggcatggggcttctccagttgctagctttcagtttcttaggtaattccgtggaaacggtgcggggaggcggacggacttgggcatggggaaggaaaacccaaaagctgcttgctcaccttcgtgggatcctgggggcttgggagagggactggatggaaatgacgcccctgggattaaacgccaccgcccttgcttcggtggtggctggagacagcgcacgcggagcgccgcggaccctcatcccccgggctctgcgcccaagccccggcccctgcggcctcccgcggcccccgctcagggttttgcaccctcggccggttcaccctgggtttccccaccgcagagggcaggttccctggggttggcggtgctgaccgaggagggctctccaaaaatccattgcccaggagagtgcctgagctgagcggaggcttcattctgggaacagatgggggccatgtggctttaattaaccatctctgtttgtctccggatggcaccagaaacagcaggacctggcgcttccctggaatggagaagccttgaaaccactccagagccccagggactgtccatgggctcccctagctccggaaagcggcgtccaccgcgagccccggcgcctcgtccccagcgaagcgccggtgaccctcgcgcgtgcacgcacacgcactctcgcttcccaagctcacagatctccacgcgcacactcacaccgaggatgcgcgggctgccgcgtgcacgcgggttcacgtgcgtgggtgtgtggccctttgggggtcagcctccctgcgccgggctccggacacgtcgaagtggagggtctacacatccaccctttgttgggggagctgctccccggggctgatcagggtgggcgcgagcgtcggtgggtttcccgggagggaggctctcgctgctggacagacctgatgacgtgtgtgggtttctttccgtgtccttctcctttcggagtccctgccttcccagcctctcctgcgctcatctctccattgtcttttctgtgcattttgctttcttccgaatggactgtcctctctccgcacccactcccccgcccccgcttgttcgtttttttcgggctccactccctgcttgtgtccccccaactctgttgcctgtccttcccgcagccctgtgcagagcccgagtgcgcgctcaggaacccgagttcagctacggctgcgcagaaggcagctgctatcccgccacgggcgaccttctcatcggccgagcacagaagctttcggtgacctcgacgtgcgggctgcacaagcccgaaccctactgtatcgtcagccacttgcaggtgagggctgagagcggggttcgaggctctgctagcgcctcctcccgtccagacctaaggggcaggccctggggactccgcatccttccagcaatccagataggaagcgcagccagccggggagtcccgggattaggcttgtagctcaacctttcgccccatctcagtttgcacagttgcatccgccacacatttcctgccggcgcggtgagtatggaaaggcaggactgccgacagccctggctgccctgacccagagcctccaaaaggcctgattgtgtgtgtgttttttaaaactttagttttggaagtgtgcattaaaggtgatttatcctctttttaaaacccttgggtttccccacccccctctaccgcatcttcacttgggtaaagaggattccagcaatgacaggcgtcttgcaaggtgattccaatcactgaacgaacccgttttcctctcctcatttggtgctgttcccaactagatatcaggatcagatgcttgcttttacgaaatgccctggttgccatggtaccctgatacaggaagaccacagtgaaatttcagggtgttacctgtttctaaaagagggcccaaattttagatttcaggggtcatatttatacaaagtcaaaagtaattttaaaagaagacacaaagtgtaaaatattcagaatcagaatacttttccttcatttttaaaaaggaggctggccgggagcaaaatggctccatgcctgtaatcccagcacttagggaggctgaggtgggaggatcactggagcccaagtgttcaagaccagcctggacaacatagactcagtctctacaaaaaatttttaaaacttagctgggcgtggtggtccacacctgtggtcccagctgtctgggaggctgaggtgggaggatcacttgagcccagtaggtcgaggctgcagtaagcgataatcagt

SEQ ID NO: 11559 - DNA, 6000 bp, Homo sapiens
gctaaagggcaatatggggaaggttaacatatttactatatttgagtcttctatccatggatgtagaacattcctccattcattcagatcttctttaataactctgaaagttttattttcttcggaggtcttacacatatttttgttggatttgtctttatatacttcatgtttatggtctcataaatggaataatattttgaattttatttcctaattttttgcaagaacataagtagaattgacttttatgctaatcttgtatcaagcaacattattaaaatctctttatattctaacatttacctgtagattcttctggattttttatatgcacaatcatatcagttatgaataatgatagcttcctttcatctatttctttttcttatcaagttgcttaggacttttaattcagttttgattagaagtggtgatagcagccatcattattattatttctgatttcaaacaaagttttcagtgttcaccattaaggatgatgtttactttaggtttcttgttgctacccttaatcaggttaatgaagatacattctattcctaatgttaggaataaaaatacattctattcctaatgtttttatcatgaatgggtgttgagttttttcatatacctctttctaaatttactgagattatcatatttttattttcttctgctaaaataatgaattatatgaattgatgttttaatgctaaaataagcctgcattcttggaataaacccaacctggatatgaaatattatctttttcatagattgctaaatttggtttggtcatggtttgtttggggttttttcatctatgttcatgaatgagattagcctgtagtttgactttcttaaagcattcttattggttttggatatcaatgttatactagcctcaaaaaatgattaaaggagtggttctcatgacatattcaaactttaatatctcaaaatggaaccattgattttcccctcccaacatgctccactccatagtaacagtacttccaagcttcctgttgctcaaaccaaaaatcctggcaccatctttttctctgttattccatgtctaacctatcagaaaatcctgttggctctaccttcaaaatatgttcataatctgagcattttataccacctccagtgttccactctggtccaagtcacagtcatctcactcctggattattgtaatattctcccctgactctatagagcagaggttggccaactaaatattttagactttacaggccgcgcggtctctgctgcaactctgcaattctgctattgtagtgctaaagcagccatagacattatgtgataaatgggcgtggcctaattttactgtagtttaccaaccccagccctctaaggtaggctattctcaacactgatggcagagtagtgcttttaaaatataagtcagagcatgtcacttattctttgaaaccctcccagggcttcctgtctcactcagagttaaaggcagcgtccttacaatgttccacaagccctgatttagccgtgccactccccttacttaactcctacttttctctctctctctctccctccccccagccacaccaagctccttagtgttcctagaacctgccaggcttcccctcaccccgagacatttatactgcttgttactcctgcaggaactgctctccctccaactattcaccttgctaactcaactcttttaaagttgttgaccagatattactgcttgatgaggtcttcctggacatcttattaaatgccagctctccatcccttctccaacaccttctgcagtctttactcagctctatactttgcatagtgctaatcctcttctgacataatatatatgtaattttttttattatgttgattgttaattgtattttcttccactagaaataaagccagtgaggtgagggttttagtctgttttgtttgctgctatattcccagtgccgagaacaatctatcttagagtagtcactcaataaacatttattggatgaaggcatgggtggatagatggctagaccaaagaaatgccacagatgacaaatttccagcagtgtattccttgggacactagttctacagagcagaataagactagtcattggaatccaggtgacaaattctgcctgttattgaactcttcagctgaattaactgtcacactgaaacatgaactatatttcacaagaaggatttaataattaaaccccagagatgttgtgtaggctattttcataacaggttagacactcaatgctatgtcctctgaaatgctcacaaacacagaccaccccaagatgatacctctccagttgtttattagcagtggtgaaaatatagtttattcagtttgcaataagaaattgtgtattactgaaacaggttgttttcagtggcatatgccagtgtcatattatgctagcattatttcccagtcttcagattttcttcttggagaaaaattgaaatccctagtaaaagttattgtcaaaagagccaggatacttgtgcatcttgaaatgtttgtatcttggcttgaaaaaaaaagtcactgtctgaaacagagggagcagtaaagtcttagcagaaattgctagattaaatactgcagccagtgataccttttgtatgttaaggctttttcatttttacattagtaaaaatgtatatgtttcctattttgccttgcatttttgttctttgaaagaaaacaaaatgttagatcctgtcattgcctttttctatttttttcccaaatgttacctattaaaaaataggtcaatatgcataactaggtatttgaccgtatgggtgaacattcaaaaacataatgattactctttgtcttccagaaattgtgcttacgggttcaacagagaaataagcaaaaattgtaataatggaatcttgtaaagtcgtattaaagtacactcctcagattcccatccagtatagtcaggctgcataacacacaaggaagaagggagctggggggttaacatgagtgtaggaagcatttgctattacatgtttggagtcattcacattctttagaatatattggcatgccattcatagtacaaatgtagagcttttaagttaaagtgcgtctctttccagattaataaatctttactcattaactaaaatttttaccaaaaaaacaaaaaaatactgtgtactatcagtataaggattttgcttttcttcttaggctgttttcatttgtttcttctgcatccttttaatggaattttgtaggtctcttgaaaggtaaggttgaagtttacagtctggcctgcattgataacaaaattatttgaaatgcaggattttgcttctccttctggctcagaaaaaaaaaatccacatttcacacttaaccaaaatcatgctccattcacaaccaaggaatcagagatattatgcagtttaacatactaacttctttacttgccataagcttttgcctttttgaattcaaaatagtgatgatttttctacttttctgaattctttcttatttaatgcttgtgattatttctggattgctttcaactcaggaatcagaatttgtcattgaaattaacaaacactattgggagccatccactctactgaagacttcatgattcaaccatttctgctcctgatttccattccaactcatcctcgtcattggagtcaacctgaaaattagatttggccagagaagcccaggactccaaatgctttctcataatttgcatgcatggtctttaaaaacagaaaatgttacctaaatgccaatcttgacaaaaatgttttctctttcttccagtgatgcagaagaccacaagcctttgaaaaaaggaagtcgaactccttcagacaggactgtgaaaaaagaagatagtgacgacagcctagttgactatggagaaggggttaatggccagttcaatgaggatggctcctttattggacaatacagtggtaagaaagagaaagagccggctgaaggaaacgaaagctcagaggcaccttctcctgtcaacgccatgaattcctttgtttaatttttaagctctttgccaatattccatttctctagaatgtttatcctaagcacttgtttgtcagccctctcatactatgaacatatgggtagagagtatattttctgctgtatgttagtattatgagaatagttacagcaaaaacataactcagtcaaatgatatgttaatatgaactggaatgcaaagtgcatactttttcattcaaaatgggtattcttgatttcctcagaactgataaaaaataatgcaacatcaccaacagatcctgttatttcctctgcaggatacagttcaatatgatgcatgaaaaatgctccacatttaaaggacatacccgtgtatgttatgaaaacatggtttgatactttgtttatactaccctcagctgaacccctatatatgaattccgttttcattgtcaagaatgttactgtagtattctctagaacttcaatgtctttgtggacattgttgtgaaattggtgactatgtatagctgtcgttagtctttttgggagactgttaggaacagtttgtacagtatatacttgctaaatgagttcattatgacagtcacattgctgatgcttactgagaactattacctactcttggctcctgttactccgtaggcttcttaatcttccaggcattacagcagcacagtgttctactttttacatcatttctatgttcggttgtttttaggcataaacaatgtgtattgcagtgcatttcggcatttgtgccatactgaaagaatcaaaaacaaatcatccaaattaaatttcaaacattatttcagagaacacagggcaagacacatacagtgccttcagatattaagcattccacaacatcgtgcattctgtatcagctggtccagtccattctgggtcctagattactgtcattgtctaaaagtaacttttaaaaagcagagttcatgaaaactgcaatgctgggaaaagaaggaaacatgaaaataaaaataagacagtttattagaaatagcatttcctcataagcataaaaagaaaatctttgttgccaactgaagcacatgatgattttgtggtcctttatggtttctattacattcagtaagaaagatgtcaacatgctagaaaattaattttaaaactaagttattccaacactaaaagcatacaacagcatgccaacagtaatatattattctccaagactttacctatgtaagtgttcaaaactctgcagcattaaacaacgtgtatgcaaattgttatggatacatttcagaatctaagaaatcaggcaagtgcttaaaaggccaacggtccaagggattacatctgcagtttaaaaagtaaatatatattctatcgtattcataaacaatatctatcaaatgggttacctccaaatatgaaaatctataacaacctatggttgaaggaatgctcagtttcatttgccaataaattggtttctcataacttgcatcaagtttaattttaagtaaagctttttatatgtagatattttgttgaatttgtaaatacacttaaaatgtagatgctatatgcttataggtgttacatacaaataaacatgcaatgtttatgttgtactgtataagaggtaagctaattaatgcagtgaatgggattggaaagcatctacttaaatatctattgggttcccccctccccccaccttttttgctgtgaaactgaaatagtgaacttttctacgtattgacagcagatttttcgatgaaatcttcagagctttgcctatggggcacagtaggcctagtaacctggcatgtttgatatatgtaggtaaagcataatttaaagtaatcccaggtaaagatggccctaaatactttcatgtctctatattcattttt

SEQ ID NO: 11560 - DNA, 6000 bp, Homo sapiens
acacaaaatttcaaacaaatatttttattttatttttgtaagtgcatatttctatgtgagctgacagttttcccatagatgttgcaaaactgattcttccatttgtcctaaaaaagattcctctttctgttgtacaataattttagttataactataccacaaaagataatagactgtccactttcaagacacttaagggatattttgagaatttttctctaacaacacatgagcatatattatcattattgtttaatttgttctcctgtctatttcatatgcattctcccagtgggtaaattattagcttttatgtattcagaataatgcataacctaaagtgggaaaccaaaaaatgtctgttctatgaaaaaaatgatttcatctatgagttgaaagagttaacatttactttgaggccaaatgcacaaactaattctcattcagaaaacagcccacctatgatattcaggtcacatacttgtttccttaaatattattgccaaaaccacattttatattccattttattactgtgcatccatctttccttagcataagagatgttccattaaaaagcagtataaattcaatttgtttttatgctcaccttgaaaaaagtaaaaacgaatcattgaataagtttaagtgtattgtgtgcatttatgctgtgtgcccaatatagccttatgttgggcctcatttaatcaatgattccagagcatcaaccaacgttataattacttgaaaagttaatatgtaaggtagaaacttggcaaaacattagcgcaagcacaaaattaaaaactttaaaattatttgggtacaattaactaatgatcagatcttcttttcaggttccttttcttcaaaccatcccttaattagaggagaggcaaggaagtttcattggccctcttctcactctgaacacataatttctagaccttatcatccatatgtgtactttaagctcctcaaagacctgatgtttctccaaacctacctgtcttctagaagatcatattatatctattattaatcaagttacactattctgacaagcatcttctatgcttgaccctctttgtcagcacctcatacatattctattaattcctttgtccatctcatcagctttcctcctcctcttgtcctctctcttaagttcaaggcccattgtttctctctcagacgtccctagtaatctcctctttatagcttgtctctggtttcattgcccttatattgctccagatggactcttaagagttatggatcacagtatgtcttaccttacttaaaacccttctgtatttccccattttcttcaggatatgtttaaattccaaagcatggcacacagacccaatcctgaatttgcctctgcttattctctagtctcattttccacatcttcatattacatacattcttcacttcaggcatgccactttacttgtaattctccaaagtggcaaacaatttcacatctttgcattacttcctatctacagtgtcctcatcttgacagctctaaattattcttcaagatatatgtcaagcatcctggaagacttctcttactgtattagtctgtttccacactgctattaaagacagtacctaagacagggtaatttataaacaacagaggtttacttgactcagagttccgcatggctggggaggcctcaggaaacttacagtcatggcagaaagcaaaggagaaccagacaccttcttcagaaggcagcaagagagagagagagagagagatggggaaactgccacttttaaaccataaacgtctcgtgagaatgccctcactatcatagaacagcaggggggaactgccccccatgatttaatcacctcccaccaagtccctccctccacatgtggggattacaattagagatgagatttgggtggggatatagagtcaaaccatatcacttactatcttctgaatgaagtgtttcttctctgtattgccattatcttccaggttattggaacactcatcagattgcaatccaaatattgattattttaaataaatgtttttttcatttgtcattccttaactgataaacttcttacggcctatatcttgttttcctaaatatatccagtatagctttagcatatgttagtttcttaatcaatgtatgtttaatgatgcttaaacattctctttgttgtcttttagatatttctttaatttatgcctcttaagtcatcttcatcttcatggagaaaacactgtatattctgctctaaaaattattagatgttttcctgtgggatcctcaaggcttggagatctttgacttaataaccacctttaatgggaaaagaataagtgatcacatcaagtaatattgattaataaaaggaactgaaaaatatacctattgttggcaagaaaagggcagtaaagttgctatatttaaatcatacatttatgtccctagaaatttttattagtttagtaaacctcatacatttattatactgtcttattatcaaggcaaattgcagtagaaaatgacactatttggaactagaaaactgttttgagtccttattccattaggtgctagttctgtaccctaaggaaaggattcttcaactctcaggttccttatttgaacaatggaacctaaaataaatgagataatgtatgtaaagagcttagtgcagtatctggttcaaagggcaatcaataataatactacctgcctcagaaagctattactttgatgagggtattaaacaatttcacagatctttgcaaagtgctagataagcatcagctattatgacaagattgctatttgtttgccttgccaaaaataaaacattgcctttaaatacataggtgtttgagattttctatttcttggcagtttgtgatcatcccacagccatgctcttactgaagaccttttattactagggggcctgttatggattaggcagaaaaataggtaagactcctcaggagtaaatgcctccttgtcttttacccatctagagagaatgtcagtaagtgcagaagtctctcttgtgtacctaactatatgaaagtggcctgaaaaagctaaaactgctgtttgaccatggtggtagaggagctcagagctggtagttaatttgccctgtgttatttccactgaacttcatcacctccctgcccacctggtcgctgcacactccacctggtgttgaatgcattgttttgcctatttccccctctgtcaggacttaggacataagatacagaattactataagaaactcctaggtggttccagcactaggactgagaaatctgcgcagataaggcaggcttcagcgcagctacaagacgccgacttgaggccagaaccaccagcgactgagtgtcatgtgccttagtcaccgcgggctccgcaaaaggctaacagtgctggacaccgggagggcgctcaaatctttgttgaataaatgtccacactacacaacctgttttgagtcaactgcatcccaacccagaaaataatcgagatatgtttgagctgaatcagtatcattttgcacatataaaatctctcttgccttgagtctgcaggactagaacagtttaaaaagtaagcctcgttggttttcttttttttttcattactccgacttttataatttgggcttcagcatgagtatcaaaacggcagcagagcagagtgagacttttcaaagtcttgtcgcaaagatacttcgtggtgaagggctccagtcccgcttttccgcgctggggttcaatcctaggcagccgattcgggttggggagatgtctcggccgctccccctaacctcttgctagggaacagtccctccccgctccccattccacctccacctgctggagaaaagatcacaggtggtagggtgagggtagtcggagcagccccggtggacgcttacacgggccatcgcgctcggccgctccccgcctttgcaaactgtgtgctagggctccaggcgggcccgggcagcagcggcggcgcgcgcacgcgcactccgcggccccgcgcggctcttcaacattcaattccacgtgttgcttgttgtaggcgccacaggttccccacctgcgtccgggcgctcgggcggctccgcctctgccggcgggctctggggaaccgctgggtcggcgcgcccggggctggcggagcaattcctgaggcgcccaagctcacccccaacgctaactccgcctattcagtcccggcggctccccctctcccccctcccaatcctcctcccggctcctgcccgcccctttcgccctggtggtaggaaacactcctgaatctaactcgacgtgtccggaaagccctggccagttttcctttcgttctgcggccgctgcagccagccccgcggctccctcagacccgcgggcgcagccgccgggggtgaggcgcttggggaccgcgggccgagcggcggggatccccgagcaccatgctggacccgtcttccagcgaagaggagtcggacgaggggctggaagaggaaagccgcgatgtgctggtggcagccggcagctcgcagcgagctcctccagccccgactcgggaagggcggcgggacgcgccggggcgcgcgggcggcggcggcgcggccagatctgtgagcccgagcccctctgtgctcagcgaggggcgagacgagccccagcggcagctggacgatgagcaggagcggaggatccgcctgcagctctacgtcttcgtcgtgaggtgcatcgcgtaccccttcaacgccaagcagcccaccgacatggcccggaggcagcagaaggtgagttgcgggaccgggcgcctcctaccaccacttctccctgggtttttctcccgggagagctctgggacgcctcccgtccttctgcgaaacgcaggacaccgtatttttgttagtctctgagggcagaggaatctttggggacaagacggtgctttcacccgccgggtatgcggctgcagcggacacctcttctcctcctccccgcctgggctggcaggagctgtcagctcaccatccgtgagacagagaccgacagcgccggccgcgccgcggttgcacccggcaggcgcagctctggccggattagaatgcaactcccatcaactttaatttccaacagcactggtgcattcctgtccacctagcctggcgtgatattgctagagctgggtttgccgagggtctgaatgagtgttgtagctaggcgaaacaggtggagcccgagtacttctcttagctagagtgaagtcttcacttaagaggggtagaaattttcctcagtgaataaaaaagttaaattaatacgtttcctatattgtcatacaaccaggacatcaaatccaaacaccgagaaggcatgcagctttgtaaagtgtttgtgggtaagtaatttctggtctgggcaggcctgattaatgaaatatactattactgatgaaagataaaggattggtgcatgatcacttcataacaaatgctttccaaatgcttttttggggaacaaaatgcttattctcccccaaaaggtaagaagtttgtttcaggtgaaaggctggccaacttgagtttcaaaacaagaccccaggggcctgatgttctgtaccagacacgagtaatgactcaaattgtcctaagtggttaaatgtttacaatacaaactctaggaaatctttttaatagaatgctgaacctggaaggttctgtagaaatcggtaacagttccctcagtttgtgacaagacctagagatccagagagattgtagtctgctcaaggcatacctacatgcacagacatttattagttttctgaaatattaacttcagtgtgtgaggcatttttagaaatttggagaggttttgagttgacttcaactataactgtagttcagagtaaattcagtctccctacattctcctaccccca

SEQ ID NO: 11561 - DNA, 6000 bp, Homo sapiens
ctacttacatattctctggtatctgagtctatgtagactatgtaaaataacagttgtagcattcactgtagtcaggatgttgatttaggttggtgcaaaagtaatatttgaggtgccaattacatctctttcccttaccggttctgaagcagttagtaaacacatgcaaaaatctggtaagttcagaatatcagctttctgctagaagttggtttggagactggctggggcctgaacatacattgggcttcctaaaacatccccctgaactggaaagatttacccagccactgataaatgataggcctctcctcaagaaagcaagagcttcatgtgtcaccagcaggctgtttaagaaagaaagagtgggccgggcacagtggctcacgcctataataccaggactttgggaggccgagggcagatcacgaggtcaggagatcgagaccatcctggctaacacggtgaaaccctacctctactaaaaaaatacaaaaaattagccaggcgtggtagtgggtgcctgtagtcccagctacttgggaggctgagacaggagaatggtgtgaacccaggaggtggagcttgcagtgagccgagatcatgccactgcactccagcctgggtgacacagcaagactccatcaaaaaaaaaaaaaaaaaaaaaaaaaggaaagaaagaaggaaggaaagaaggaaggaaggaaggagagaaaggaaagaaggaaggaagagtggctaggtatagtagctcatgcctgtaatcccagcactttgggaggctgagagaggaagattgtttgaggccaggatttcaagaccagcctgggcaacacagtgagaccatgtctctttaaaaaaaaaaaaaaaaaagctgggcatggtggtgcatgcctgtagtcccagctactcaggaggctgaggtgggtgggtgcctgagcccaggagtttgaagctgcagtgacctatgatgatgccactgcacttcagcctgggtaacagaatgagaccctgtctgaaaatgcaagaaagaaagacagaaagaaagagagagagagagagagagagagagagagagagagaaggaaagaaagaaagaaagaaagaaagaaagaaggaaagaaagaaagaaagaaagaaagaaagaaagaaagaaagaaagaagaagaaagaaagaaagaaaaagaaagaatgaaagaagacaaaaatggggcaaactacccttgcttggcattctgtgccactaccttttttcatgaagggtagatgcttctttccacacttccttactttccataccaatacttccataaaggtagccgtttctattttataaacagttagaaatgagaaaagaggacaaaactgttcaaaaaaacagttcctcccatcttgtgcccttcctcctgctctttgctcctgaggtcacatctctcagaatgcactgtgccaccccagcaccctgtcctccctgcccagctgttacctggggtgtgaagtctccatctgaatgtggaaagttatgtaggtgaagggataagggggagctgttcttaggccctgtcatagatcaacacccaaggagtagtaggcagggaggatcgccctgagttttgatcaatgcagcccctgtatctctgaaaaaagaagacaaacaatggggattcacattctcttttaccagatggtctctgtttcttcaagcaaatcctggcatttccatgaacccaagccttgtaggtttttttcagtctagatttatctgccttataagtggcagcattggattgcttattaagcttttggtcatttttgcaagttttaatctttttctataccttcaaaacttgctgcttgaagctaaaaaatttgtttcctttttcataatagcatcccttccaatgatatcatcccacctgtggccacttcctcctagttctctttcaatctctggccactccttttccatgttctttacaaaattcatttatgatgctcttttttggatgtttacatagtctggggcatggttctatgctttagtctcttgttagtccaccatttttcctacttgatcttatctagtccaatggcttcaattagcacataatgcttgaggctgacttccaaatgcataattctacccaaatggcttagtctgttcaggctgctataacaaaataccataaactgggtggattataaacaacaggaatttatttctcacagttccagaggccgggaagtccaaaatcaaggtgctggcacattcagtatctggtgaggaccggctttttgttgtgtcctcacatggcagaaggagtaaagatgtgcttttgaagccacttctataagtgcactaattgcccccacaaaggctccacatcctaataccctcataattagggactcagtatcaacatatgaatttagggaggcagaggacataaacattcaatctatagtaccaaacctgtctctcctgagctccagtcccatattttaaactacttactagacaacatcctcacctctgcctcatactcaactgaccagaaacaaaattcatcatttatcccccaaacttgctccattccctttgttctctaatttggtaacttgcacctccattaactcaggtaacaaagctaaaaatgtgattatattccttatctcatgtattcaactagttaccaagttctattaattctaccctcctaacatctttcatatatccttttttaaccctcttcactgccactaccttgctttagagcaagcttgtccaacccatggcccatgggccacacgtggcccaggatggctttgaatgcagcccaacacaaattcaaaaactttcttaaaacattatgagttttttttgtgtgatttgttttagctcatcagctattgttagcgttagagtattttatgtgtggtccaatacaattcttccaacgtggcccagggaagccaaaagattggacaccctgcttcagagcccatattaggttttttttttttttttttttggtcataaactgcagaaatgaaccctaagaaaataaaggatttatttgaaagaatattaggaaagctcacagaactgaagagaaaattgtgtagtcttgctttaggaaggactagatctggggcagctccggggacctcagcaggtagagctcagagctcagagtcttccagcctgggataccacatgaggtggctcaggtgcaatcatcttacagctctgtgggtcattagcaaactttcaaattcttagtataacctggttggccacctttgaatcaatcatccagagctaggatgcaggagtgaatggcactaattggtgatggctatagacccttataatttctcaacccctcctcagcactgtcatagacttctcaaggacctctttgcatctttctaatctatagttcttctgtctttccaatctatagttcacatgccactatttttgtatttctaaaatatatattgttcaataaggagattatacctcatttaaaatctcttgttagcgcttcattactcagaataacccacaaacttcctatcaaatagttcattttaggatttggatcctgtcttcctctctagtctcacctctcactacccttcccctaaatcttatgttcctggcatattgcaattacagtattttcaattcccctaaataagccaggctttgttgtattctcatgtttttgcctctgcttctccctctttctcaaatgtctgtcctctcatcacctggttaattcacactcatcttccccagctcagtttaggcagtagttccaaatctctctcagtctcttctcagtatgggttaagtccccttcctcattgcttccatagtaccctaaatttagatctaatttggcattctactctgttgcaatcaaccgtttctttgtctctcttcctggctaaactgtgagctcctaaaggagctcaagaattacatctgatttatgctttgttctcatcacctaggagagtgtctaatatgtcataaatgttcagcaaatatattgaaataagcaaacactagttttgaatgcataagatacaaagcactgggaggggggcacaaatatgtttaaaatttacatttccacttttaagggactcacagcttaagaggcagacaagacccgcacataagaaaagtgaaaacagaactacaagacactatacaatgacatgcacaaaacccagtgactatagtctagagtttgggattgcattaatctagaaaatcttctctttaaaggaatgacctgagtagtaacataaagaaagaagattcagggctgggcatggtggctcatgcctgtaatcccagcactttgggaggctgaggtgggtggatcacaaggtcaagagatcgagaccatcctggccaacatggtgaaaccccgtctctactaaaaatacaaaaattagctgggcatggtggcaggcgcctgtagtcccagctactctggaggctgaggcaggaaaatcacttgaaccagggagacagaggttgcagtgaactgagactgtgccactgcactccagccttgtgacagtgtgaggctccgtcagaagaaagagaaggagaaggagaaggagaagattcaaatggctgaagagattggggacagcattttaagtatggggaataagaaaaaatgctcactgtatttgaagaatgcagtgaaaacattggcttaggtagaggtagattaagagatggtgaagatgtgtgtgtgtgtgtgtgtgtgtgtgtgtgtgtgtgtgtgtgtgtagagaagtcataggctggcaaaataagagattggcagattttgtttaaatatgcctttaagttttggccttttcattctctgtctccaacacagaacacctcagcattctagattgcctattcatcacaaattccctctgtctcctccagaatccagaaaagaataattacgatattttcaaaatggaaagttcccatgccaaagactttgccttcttcaccaaactatgatttcgtgatgttcttaaaggtagtgtacaccaggtttttacattcttattttgaatgtagttttagtgtttgtgtgatttgtttttcagcctggcctgcagactagcaacccaagacttatactgcccaatttgacagctcatttttattttagtttcaccatatacatgaattggacttacaattccagaaaaattaaaggtgagaaaagggtgaaacgcttattactctatttccctagaagggaactttaagggtttagctcagtcttgtcataaactctagaaatcatctttagggtttgtctagacaatcaagttagacataaacccttgtctatgggctttccactaaacctgtgggcttcataggaatttgggctgatgtaggtcttttcaaagttctacttaattgtcaaggcccctataatgtgactccattcgacctacctgcttttatttcttcctacttaacaacgacaaataatcttccaattagactacttcatacactatcctgcgaggttctgctcaagctccacaacctttaggaaacatcccaaggctcactgacctttcttttctctaaatggttggttctaccttatcagcttgtatcttccatttctaattgtctatatcaaaaagtatagcaatcctcccattcccaatatatacacacacttttcccagcttctcaggcctaatctatgaatgagcatggctttgttgacaggaggagaaaattggaagatggctgcttctccacctttagccttctacggacatatgtgaattaattttatttcagatctttttatagttaaatctcatcactatcatggaattagaatgtcacctttaaatcatttagttaatactttccattttgcagataaggaaattgagaccccaagagataaagtgacttacctaatatattag

SEQ ID NO: 11562 - DNA, 6000 bp, Homo sapiens
ctggaggagcagagatgcctcattactgctctgcatgtgatcttcaccatcaatgatcgggggaggggagcttattaccaatggatgggggtaaaagttctgattaggtttcttctgacacccccaacaggggcaaacaagggagccttgttaccacagagtggggctgaattcagactccccactcggcctggaagtctaggctccccacttgggctttgctggcaatggggtggggggcagggccatagttttttctgtggcgtttaactggattcgcgtgattattgtctgaaagttttctttcttggcagactgcccctttcctggtccttttgctagagcgagcaggctttctttggaacttttctgctgcacatgtactggcttctgccgcactgagtccggaatatacagattgattatctgtcccttatctgaaatgctcagaccagaagtgttttagatttcagactttttcagattttggaatatttgcatatatatatatatatatataaaatgagatgtcttggggatgggacccaagtctaaacacaaaagtcatgcatgattttttttttgtttttgagacagtctcactctgttgcccaggctggagtgcagtggcgcgatcttggctcactgcaacctttgcgattctcctgcctcagcctcttgtgtagctgggactacaggcacccaccaccacgccccgctaatttttttgtatttttagtaaagatggtgtttcaccacgttggccaggcttgtctcgaattcctgacctcaagtaatctgcctgccttggcctcccaaagtgctgggattacaggcatgacccaccgtgcccagcctcatgtatgttcatatataccttacacacatagcatgaaggtaattttatttttcccttgaggactctgaatgaaatatgtgttgtgtgcctgagttttgattgcgacctgtcacatgaagtcagcgaaattttccacttgtggtgtcatgttggtgctcggagtttgggattttggagtatttccgattttgaattttcagattagggatactcaacctgtaggaagtaacaagaaaacccagagaactcacctctgtgttgtttcttgcatcttctgattctcagagggtctatcttctgtccagctttcacagtctgcttatgtttgctgtatatatactgtacagggtttttatttttactggttgggaagaaaaagtatttctactccctttttccagatgcagaagccaaagtaatatatatgtgtgtgtgtgtgtgtgtgtgtgtgtgtgtatttttttttttttttttgagacggagtttccctctctttgcccaggctggggtgcaatggcacgatcttggctctccacaacctcctccttccgggttcagctattctcctgcctcagcctcttgagtagctgggattacaggcatgcgccaccaagcccagctaattttttgtatttttagtagagatggggtttcaccatgttggccaggctggtcttgaactcctgacctcaggtgatccacccacctcagcctcccaaagtgctgggatgacaggcgtgagccaccgcgcccggccataatatttttaaaaatgtgaaccaggtcatgccatttccctgcttaaaatttcccaagggcttcccaatgctattagaataaaattcaaattccttattggcccagcagacttggggcatggcttggcccctgcctcctactctgacataccatacacatactttttttgttgttttttttttgagacggagtctcgctgtgtcttttaggctggagtgctgtggtgcgatctcggctcactgcaacctccacttcccgggttcaagcgattctcgtgcctcagcctcctgagtagctgggattacaggcacacgccaccacacctggctaaatttgtattattagtggagaggggagttttcaccatgttggccaggctggtctcgaactcctggcctcaaagtgatcctcctgcctcaggctcccaaactgctgggattacaggcgtgagccaccgcgtccagcctatacttccactttctaagtaagcctcttctgtttttcagataaggtcactgaggccctgaggttaaatagctttcccaaggtcacgcatggtaaatggcagagctgggatcctgactccagtagttgggctggagcctctgctcttaaccattaggtacgtgtactcttttctccacatgttcctgagtggtttctgagcacccagacgtttgaaaactatggccccacccgctgactgggagacaaagcaaacacctgccttggggaagagcaagatgagaggtaggagggtgaagtggagagtggagggaggcacgaattgaggccagggctcctagtgcctctggagctcatatgaagggagaggtagaatcaacacagttcttatcttcctgctcttctttgcaaatcttgagttcagcctttggaacttcatccaggtgtctggattcttggacagatctgccctggcaggatgggtgggtgcagctgagctccgcctctcaagaaacgcaagcaactcctttcctccagggtacagagcaggtgctctctcagagggctgggcctccactgccccaggttcacaatcgctgcctcagcttagctgattttcccaaaccgcctacagctcctccctgctgcttcccagcctaaagtttgatttctcaccctgtgttctctaaacaatcgttctaatttgatcatgcacaagtatcacctgaggagcttattaaaaatgcaagtcttggccaggcatggtggttcatacctgtaatcccagcactttgggaagcagaggtgggaggattacttgtaggctaggagttggaggccagcctgggcaacatagtgataccctgtctttatgttgtcatattttataaaaattaaaataaaaaaatcagccaatggctgagcacggtggctcacgcctgtaatcccagcactttgggaggctgaggcaggtggatcacaaggtcaggagatcgagaccatcctggctaacccggtgaaaccccgtctctactaaaaatacaaaaaattagctgggcgtggtggcgggcgcctatagtcccagctacttgggaggctgaggcaggagaatggcgtgaacccaggaggcagagcttgcagtgagccgagatcgcgccactgcactccagcctgggcgacagagcgagagactgtctcaaaaaaaaaaaaaaaaaaaaaaaatcagcccaatcatagtgatgcacacctgtagtcctagctactcaggaggctgaggtgggaggatcacttgagcccaggaggttgaggctgcagtgagctgtgtttgcgccaccacactccagcctggacaacagagcaagaccctgcctcttaaaaaaaaatgcaaatcacagacaatctaggaaacttgaatcctagaattaaggcaaatttaagaattattgaattttaggagtgactggtattttatgtgtgtttgtgtgtgtatatgtgcgtataaaagaatccttatcttttagagatacctgctggaatattttgaaagaaataatatgatgtatgggatttgcttccaaataatcagaggtggggaggggaagtgggtggggtgtggatgatagaacattcatgaactggtgtggccaagtaatgtgtacgtaggggttccctgtactatttgctgtacttttgcagaaaagtacagaaaagttaaaaaaaagcacccccctcactcattctggggtaccttctaaggccactggtggggagagtccctgtgggggatctgtgcaccaccctggagaagcaaagctcattcaaacaaacgcaggtggctgttgcagccccgcacccctgggcaagagaaatgcacctaattggcttgttctgcccctcgcaccctctgtcaaagaaataggaaaagacaagacccctccaaaggaaaagggcacatatcacatatgcttctgtctctttttacctgggccacagcggaagctgaatttcagccattgggcatttcataaggagtcttctattttcctttgaaagtagagtgttttggttaatagttgataggatggtgagtgtgatattttttattttccaaaactattttaattttttcatttatatatgtatatacacacatatatacacacgtatatacatatgtgtatatactatatataatgtatataatatataatatataatgtatataatatatataatgtatataatatattatatatatagatatatatatttatttatttatttttgagatggagtctggctctgttgcccaggctggagtgcagtggcgtgatctaggctcactgcaacctctgcttcctgggttcaagcgattctcctgcctcagcctcctgagtagctgggattacaggcacccgccaccacactctgctcattttttcgtatttttagtagagacaggatttcaccatgttggccaggctagtctcaaactcctgacctcaaatgatccgcccacctcagcctcccaaagtgctggaattaccggcgtgagccacggcgcccggcccccaaaattatttttcaaagttattttgtttttacaagttcaagggatgttttggtttactggggtccttctaaggcctccaggaatcttgtcctcaaccttcagctccctgaggggcaagttactttcattagaaaataaatgaatgcttcctgctgggaacttaaggtcatggcagagggcacaggtggggcgggggctgagcaggctggccggtggggcaggtttgtcttcacccacaacaggccagtgttgatacaacagagctgcctcctggctctttgggagcctgggaggagaaggagccgggaggggcgctgcggggaagccacctgcggattcactggctgctgctccgcccaggactgctagcaagcacggagggctgccagacctggggctccctgctccgtgcgtcaggttggggaaaccaccgtctgccccagaccctgacccaggacccgcctggaggaagctggggtaagaagggtgttgatgctgtgcttttgatctgcataaagtgaatgccttgggtctctggtctatgttcacttggctgtagttactagacagggcagtaggagagctttgaattcatcttggtgtcaaaaggcacaaatgtgggcccagaccatgtgcacttcctgagggatgatgtttatcctctggtctatacatggggtattgcttctggagtacccactttgtggtgctgttgacctagaccggtgtgggagtggaaacagggaatggttctagcctcgtggacttcactggtttgtgtgtggggaatccaggcagttaaacaagcgattgcaaatgattgctcttctgggggcatgtaggagggggcttagctccttgagggagctggaggtgtcagggaaggcttgtggaggaagaagatccttacatggagactggaggagtgacagggtcatgcggggcgtgggatggacggtggagaggaggatattgagtttccaaacccaggggaaagcctgggcgaagggcctgaagggggtgggagctgggagaaatgcagggtccctggagaggccaaagctggaggaggacacagaggaggccaggtcctgcagccttcggctggccagctcgaggactttagagttggtcctgtgtgaaactgggacaatgggtaggcccagtatcgagcacacagtagatactctgtacgtgataaaattaaatctactctggaggtgtggaaattcttccagaaggttgacctggggggaaaaagtgtgatttggcagcagtagggccgtcgggaggatctttgggaatagcttctgtgccctcctcctccccttggctctcatgtggc

SEQ ID NO: 11563 - DNA, 6000 bp, Homo sapiens
gcttaggggactgacctcatctggtacagggcctttggtggacagagagagactggaaaagaaaaagtcaaggatcgaggggaacgcgaggcgaggtgaagatgaaagatctagaagcagtgcttcttagactctttggtgaaggatcagtgttttttaatgctaatatgttataggctggtacatctgtgaaatacaagagcacatgcgtggattttgtggtgatgccaaattgctgtaaagtttttgaaattcttgctctcaacgtctgtccttatcttgtgtgctgacacaacggctggtgctaatctagagagaacagagagacagatagtaacagctaaccgtctgtagtgtgcggcatacgccaggcattgcctaagcgctcagcatgtgctgacttggttaatctttataactcatgagaaaagaattatatacattatgtgtatcacaacatcactgtgtaccccataaatatgtacaattattgtgtcaattaaaaagttaaaaaattttaaaaagaaaaaattattattcttcccattttatagatggaaaaaatgaggcacaaggatgttaaataatttaggaaaaaagcataagtgattaagcagcagatccgggctatgaacccagagatcgtaggcctaaagtctgtgggcttaagcactgtgctacagcgcctcgcttgagggaaaggcagaggtgctgggaggatatgaggaaatgagatagggaggaaatgagatcaaagatggcagaagaaaggatcatagccagcgtgagaaaaagtgcagccgggaaagagctagataaatcatataggcagagagaggggtaggggagcctggcagcaacaagctggggtagacagattgaggggagccataagggcggcaggcacatggccgggtgggggatcaggacgggagatcccggagaggaagggccatacggggaggcagaagtggacgggcccacttgggttccagggtccatcctgcgtggctttctgctctgcccactgagtgggtgccaagggggctatgtcctcccactctgcagggagctgcttcctatgtctggtggatgtggtgcccgtgaagaacgaggatggggctgtcatcatgttcatcctcaatttcgaggtggtgatggagaaggacatggtggggtccccggctcatgacaccaaccaccggggcccccccaccagctggctggccccaggtaagtgtacttgctttagggcaggctcaggggttcgtggtctcatttctttggggctgtgagctgtccaaggtcaacgctctgcaggaagggaggatgtaatggttgggtggggggtcccccctttggaggtgggaagtgaaccctgtaccctgaggatgtggcttggttcccctggcccaggatggacacataggggtggaatgacagggcccagaatcacaggtccttggcgtgggctagcaccgtttccctagcttcatctgttgggcttcccatcccagcatcccctgggagcggtcctctctccagcctggcttgagcagcccagggtggggaacatgaccacctgggagcagctcctcccctcagtaggaagctgtgtcctatggactcagctgtgtgtagtttctttcatctgctccttgttcatggactggccaagtttcctgggggtctgggctagctgaggagaggctttgagggaatgcccacctgggctggaccatccccttgacaacaaaggctcggagccccttcctctgtcaggatgccctctttggcttaattttaatctttccctcagcatcatgacaaaagtgctcacctcttggtttcttacactctaaaatgacagtgtcagtaaaactggccctacctgctcatcggatgccacccctgacggcagggcccctggcattgtgtcgcccacttaggcgcaggccccacgcactggctgtgtgacctccagagagtgacatgacgcctttgtgtccacacttcctcatgtctaaaatggggacgctggcacccagcggccggtgtgagagacagggatgatttatggaatccgccctgaagtgtcacttcagatatggcggtttatgatgactggattctagaatgatttttgagactcgaggtcaaaatattgtgaatggaagtggggatggggggttgcccgttcccctccttcccttacccagcggctgggggtccatttcccaggccttgcccgctccggggctgctcgcgatccccacgaccacgtgcctctcctctcccgcaggccgcgccaagaccttccgcctgaagctgcccgcgctgctggcgctgacggcccgggagtcgtcggtgcggtcgggcggcgcgggcggcgcgggcgccccgggggccgtggtggtggacgtggacctgacgcccgcggcacccagcagcgagtcgctggccctggacgaagtgacagccatggacaaccacgtggcagggctcgggcccgcggaggagcggcgtgcgctggtgggtcccggctctccgccccgcagcgcgcccggccagctcccatcgccccgggcgcacagcctcaaccccgacgcctcgggctccagctgcagcctggcccggacgcgctcccgagaaagctgcgccagcgtgcgccgcgcctcgtcggccgacgacatcgaggccatgcgcgccggggtgctgcccccgccaccgcgccacgccagcaccggtgagggcgccgcgggacccgttccgccccagcccacgcttcttctgctgccaggcttgctgcattctgggccctcggcttctgaccttttcactacgtcctgggtgcctgggagatggaaatcccattaagcacttatttaattccattaagtggcttgttgcgctattaaatgtccattcatcccattacattcttccactcccagagccctggtgggcccctggagctggctgtcccgggacggcctggagcagggatgccctgggcaggagacgtgcccagcctccgaacaccacctggccccctgcctgccagcgtcctggagcagaccgtttcctcttcctcttcctggtctcagggctgtctcctggctgcttccttagagtgggacaggggtctgacctctcttgtttcttgtgactcccctggtctcttgagctgaccccatggactcctgactgtgcagggcctggtctccactctcgatctatgggtggcctgcctggcctggggccctgggctgctggcctgaccacgctgcctctccacctaggggccatgcacccactgcgcagcggcttgctcaactccacctcggactccgacctcgtgcgctaccgcaccattagcaagattccccaaatcaccctcaactttgtggacctcaagggcgaccccttcttggcttcgcccaccagtgaccgtgagatcatagcacctaagataaaggagcgaacccacaatgtcactgagaaggtcacccaggtaggcgcccagcggccgggctctcctctcaccttggaggagcttggagagggggtgggagtgggctgtgatccagagccgggtggagggggctagccagtgagggcctcttggagggaggcagacctgagggttggggttggcaatctattccagagctgcgatggggggagaggggacagtctgagaagtcctggagaggggactggagaggtctggtaaagggctgggaatggcagagcggaggtcgggtggatggggtgcgtgccttcggggcacagggtgaggacagggcagttgaggctggggacatgacagggccagtagcaaggggggaaggcggcctgagggacatgaaaggtctggctgcagggtgtgtgaaggaagtactaggggccaagccaactgggaggcttcaaatgagaaggggtcacagaggtcaaggacaggagggtcctaattcttccaggccaaggtgatgtgccaggcagagggtgggcctcagtcctgtggggatggccaggatggcctcgaggggcccaactatgtccctaaagcatgggagaagcaagttttcttctcatagggaggtggtgggtacaaagatatggaagggtcaggtccctgaatcctgggccagagaagacccctcagccttgggggcattagccagcctggtcttctgtcccctcctgggtttggggtcctcctggcagcaagaggacctgcgacccctccatggcttcatccacccgacaccttatcctagcctttgggggctgggggtgggtgggtcaggagtgcagatctctgcagtgagtgagaagcctgggataatgtggaggactcctgtcccaagctgttccctcctgccccttccacagcagctgcctgggttggctcatgtaagggagctgccctgctacctcggcgggctcctggccctgctcccaccgcctggctttctgggtccctgccaggtctccagcccactggccttgactccagagcattccccctcaccccaggcccttatctggccacctacccctctcttcctcctcccttgcttctctcttggttcccacctgagcccctggcatctgccctgctcctgtgcccgctgcatgtgcccgtgagttgcggtgggtctgtgcatgtgcgcctgtatgtgtcggcaggcgtgtgtgttcctgccagtcactagcagtctctccatctctgggtgtctctgtctgactctggctggctcagcactggaccggctgggcgggggtgtcagggagaccattaatctgcggtgacaggcccggctgctggcggagggggaggggctcaggctgcgggagcgccgctgcaggagcctgggcgggctgcgggggagggggccgctggctgggcaccggcggggcgggggagcctagtgtggcggggtgggggtggggacctggtagaaggaggggccggctggaggagctgaggttccgagtgcggccgctgctgggctggcgggcgggcagagcacggcaccctggcagcagggcccacgccacggggccatgggcagctcgagccaggcaggctgctgcccacgcttactgccagggtgaccccagccctggggcccagccacaaccaccctggcttcatgccaggggctgctctggttgccagtcggccagcctcgggggtgcagcctgggctgggactgctgctggggtgcaggtgaggcagtggccgggccctcaggccccagggcaggcaggctgcagggagccaagtcctccatggcggccccagccgggaaggcgagcaggacaggggctctgcggcccagggcccagaaaggccgggtgaggcgggccgtgcgcatctccagcctcgtggcccaggaggtaggtgacacccggtccttcctcttctttctggggccggcacactgaggcaggtggctggcccaagggctctgactccaggctggggagagggctgctgggaagtaggaagctttgggagccgtggggcctggccctgctcacccgcgcctggctcctgttctcattccctcccaggctgggcttacagagtttccgttgctgggacttccccgctcctgtgcctgccatggcccacagtcctggagctcaaaatgcaaagtggggagatgacaggaatgagatgggtgcccagagagatggtggggaggcggagtgggacaaaggagcccatgggcaggaccaggagaagccggcaggcgacagctgggcctggcatggaggcgccggggctcctttgctctgtgtgctggggttggaccctgtgggcaaaggaggcttgtgctgttttggggggtcgaggaggctggaatgtgcggaagccactgtgtgggtggtgagggcgcgctgggctgaggcacctggctcatctcttcatgggcagccgaggtgtggtggctgggccatgcactactctgtgacctcctggga
